United States Patent Application Publication US 2009/0075829 A1 - sequence listing, part 2

SEQ ID NO: 30 - DNA, 98412 bp, Arabidopsis thaliana
aatctactacaaaattcaatccttcccttcctgaaatgagctttgtatcagataaagtgattgaatttgagattcatgtatacaatacagactatacagtgattaacgaatttgatttgagattcatgtatacagatgatcattggctctacttaaactcagttcatagaaagttcaagagacatcaaaaagtagaattctccataacctattccttaaaactaaactcagtttcttttttcaaatggatgaaagcaaaaaaaaaaaagcttgcctagagtgatttgaggagtaggctcattgccagcggaactagctctctcttcggcttcatgaagcatctgttgcacctgcgacaaccgtgaagagactttccgatcaccaccgcttccaccggaggtcgatgccgcacatcggacggatacgagccgggaattagagtgaattggagaaattaggggagtgagacggagacatggtaaaagagattgacacgatttcgatgaagagtgaaggagaagtggatgatggatgaactcgcgtagaatcatgttcgtcatcgttctgattgccgccattttgtttatctttctcggcactgaagattcttccgatgtcaaaatgacgatgtcagagaagaagaagaagaaggcgaccctaattttgcgtggctcccaatttccggtttacggttagtaaaaaaaccgtaacattttcttggtttatctctttaaaacgatccggttcagtcaaaattcaaacgcgattttccggttcataatttccggttcgcatcaacgcaattaagttagaactaacctaaccagtggtgatcatagcaagtacagagtatctcgggacaactctcagaaatctatacttttttgaggatagaactgagcttgaaaattgaaactttttccactacatgaacacataaatatccagaatgaataatcaagttagaaccataatcattcattttcaattgtaatagaaatggaattacgaaagggaaatggcattgaatcttccaattctttcactcatcatcctccaattcatgatcctgcaaagcaacacacaccaagcaatttagagagggttaagatagaattttctatcttaaatttgacttagacattcagttgcaaacttctccggatgctacactagaagctctccagccaaagctctgtatatatatacattcatctccaaaactcgaaagtacaaaagtgagtagaggacataccacacttttctgcaaatcctccaacattgtcaatcccttttgtagttccgccttagtacatagaccagccagcatactacggaaagtaatggtatcaggacacacaccactagaaaccatctcctcgaatatatcttgagcgccattaagatcacccactttacaaaacccatgaatcaaagcgttgtatgtaattgtgtcagcaactaatcccctttgacacatctcgctgaaaagctctaatccgtcatcaacccttcctgccttacaatagcctttaatgagtgtactaaaggtcactacgtcaggggagcagccttcactaaccatcgaatcgaccatctgtctggcctcttctaggcggttctgtttgcagaacccatctaccattgagttatatgtgacagtactgggaattatacctttacagagcatttccaagtaaatatcttcagcccttaaaaagttcccttctttgacaaatacgccgatcaatatattgtaagttacgacatcagtttccacaccattgacggggagactattgaacaaatcccatgcttcgtccaccttattacccttgcacattccattgatgatgatgttacaagtagcagtatcaagatccatcttacttttctggaaaaccttaaacatttccaacgccttttctaacttcccattctcgcagagaccggccagcagagtgttacaagttacgatatcaggggacacaccattagaaatcatctcctggaaaaggtcttgagcaacattaacattccccacttgacagaacccgtgaataagatgctgtaagaaacggtatcaggaactaatcctcttctcgacatctcatggagaagcttcattccatcatctaccctcttcgccctacagcatccatctatgagagtatttaaagtaattatatccggagagcagcccttgctaaccatcaaatcaaacatgtgctttgcgtcttctagacggctatgcttgcaaaatccatcgatcattgaactatacgtgattgtggtaggaaatatattccttcgaagcatctcacggtataattcttcagccccagagacctttccttctttgacaaatgcattgatcaatgcgctgaaagtaacaacatcagggtcgatattcctttcgatcatatcacgcagcaattgctccgcatcactccatttaccatagctacaataaccgtctatcatacaattgtaagtgagaacattgggaaaaatacctttctcatgcatttcagtgaaaatattttgagccttgatgtggttcccgtccttgcaaaggcgatcaacgatggcagaatagattacaacattggctttgatttggctttcatccatcttcctaagcatattcaaagccgagacagtgtcacccaacttacacattccattgacaattgttccgtaagtaaccgcgtcaggttgatgaccttcttctaccatccgatcaacaagagctagcgcttggagaactcgaccctcgcggcaaagaccgttcatcagtgtggtaaacgttacgacatttgcaggacatcccgtttcaaccatataataaaaaaagctacggcctcagaaatcctaccttccagacataacccgtggattagggtgctaaacgtaacaacatcgggatgaaaaccaagtttggtgatcttgccaaatgtagacaaagcaaaggacaatttatgacagctgcagaaacacttcatcagaatattgaagctgtagatatcaaatggaatcctccgcaattccatcttctgatagagagaaatcgcaatatcgggttgtttcattctgacgatgacacccattaatttacagaaatcaatttctgagtacaagggacgagatctaaccatatcatcgaacaaatcgatcgcatcatctaagcttctgatataatgagatccacttctcaatttcaaactctctccttcaaaagctcctcagagaaggcatactcttttcaaccttactagttttcttggcgacgcggcgatgaactaatctcgtactgaacaatctcgcagaaacagcagcagcattaccagaagatgattcagatctgcaaaccctagccaacattttcgactcgcctgattttcgttgtctctaaactctaacaacaacaaatggaggagctaacaagtctgtgtaaagtgtaaacccttaaaagagtaaacgacgaccggttcaatttgattggcacagtgaccggttcaatttgattggcacagtggccggttcaacttcaaatttcgtttagaaccttttttgttaacatttagccaaaagaaaattaacagagcattgtgtaacaaaacaaataaaataaagatccttaatgatggataatttctcaaaggcagaactttaagttcttgaattatatgttcaaagttttagctccaaatatggcagaagaaattagacacgagaagagcaaaactttaatttcttaagcattgtcatatgcaacgaaaccaaatgaaccaatagataatgatctttgtgtttttatgaagatggaagtgagctttctacaacataattgcagaagattgttcaaaaattttaagtaactaaatacagatgagttattcttagatatatgatccaaataagatagttagagaatatcagagctcaaattatgttattgttcttatctacctgaacctaatttttaaaactttaaaatgacatcaatcagagtgaacacacaaaatctttatcagctaataaactgtgtttagcaactaaaataatttgatcattctactttttgaaaccgttgtaacaaggctataatctaagtacatttgctactgttactatacctcttgtccgggttagtaacgaaaacagtatacatatttttagtgtgaattttttcttgttgtgagctatcgcatgaaatctatatatgactataggaactgtgctacttttggaagaaagaaaatcatgtaactctttttttaaagctaactctaattcatatatttgtaaaactagaagtgatgaatgtgatttgtcataaaaatatcagttgtggaatagagttctcagccatgtttttagctttaacataaacttcacaacacgttttatacaattatgcatacatatacatatatatagattaatctattttcacatatttatttattattttaaacaattatattgaactaagtagctaaaatatggcactttttttggtatgtgaaaacaaaataaaaataaatcaaaagtggctcttaataaataaataagaaagtttgtgaattgtgattattgattaaccctattttatttgattaatgagatgaaaataaaaaatttaaatatgtattgtttagcctatagtgttgattcatgatttgctacaaacaaggaaacctataggaaataattccttcacatgctccataagaaaaacaagatttataattttactcgaagtcataattcaaaatagacacaatctctttttagttgttatcatcatacagttcatatcaactctccgtaagtaataatggtctatcttttcacatagtatattctatatttctgtctcttatataactaaacatggaataacaattaggctcataagaaacccgattgtatattaagatacgacatatatattatatttgtttaccaaataactgcctaaatatagatactgctaaaaatagatgaaataggaaaaatagatattaactccaatttttatattatctttgtagcatcgctagaaaacattcctcttaacattaataataactacaagtctataatcatttttttggttattatatcttcttagatcgaaatgaacaattcaaaactcttcacaaccaatgcttgctacatggatgtgctacatagttactataattaataaattcacatgaaagaaaactatttagttctaaaattccaaaaaaataaaaaaaattaacaatggtgtgatatattctactaattttttgtattataactatattcacatcaacgtaacttcttttttgtattttcttcgtagtagcaatatcatcaaaaaaaaatcaccactagctcctaaacaaatattttaaaaacaagggacataattaatctctctacatgaacaattatattctttacgttacctattaattatcaggtaattcaggggaaaaaaagaaatatttacctacaaatattatatttacatttatgttcttcaaacttcagattcttgaatcttgcagtcattcagagaggtcttctgaccgcacgtgccacacgatagaaaaagaccttgtcagctctgcgacgccgttttatctacagtgtttttttttatacgtgggaagctgtgatctgctgctccttagaaattagaacacatgtactcgttttagattcttcatatcaatgggtaatttacattagtaattttttgattttatgtagttttctataaataatgagacatttcctacattatttatttgttatactattttgacttgagttaatttagttaaagaaaattatatatggttggtaattctcttataaacaaatattgttgataatgtataatctctatgtaaattactatacacgagagagcaatgatccctactaatcgactaatcgtgccacatgtcaaagtcattagcacaaacatcaaacttatgtaattgtatatagtatgccattatataatctgataatcaatgattaagcaatttgcagtgcgaaacaaacttaaagtatagtttactgtatcacgtaatgaaattggttatataggtagccactagtttttcatttttctactacatactttatatcaaatttaaacaattaaaaggtaataatacaataatctcattagctgttgaaaaattgtctgatataagttaataggcaatataaaaatgaatataattgtctggatcctaaatttattaaaaacatgtgaaaggaaaacgaatctactttttttttttttttttttactttaaaatggaatttttgtaattttgtataatgatgaggaagcattgggagaggacgagattcttgtgtattaaaaaaagattgtcctctaccatatcattataattttctctttttgacaactttttacactataatcaaataaatttaaatgttttaaaaatattcaaataatttgagagagaaagatttggtgagaagtcagcatttgccgacaggaaattctgtcttaccaccaaaataccaaatcaataattccaactacttttttgaggtcacttcttgttttggcgtctacgcattttctaaaaattgttttgattcgttaaatactgatttatgtcataaatgtattaattgaatctagaatgacaatgttttcgacaacaaaattgtagacaaattcaaaaagcattaatttaaataatttaaagaacaaaaagtaaaattttcagattggtattggacttttttttttttgtcactaaaatttttattagaacttgagatggaaccttacatgaaaccaaacgccaaggaaactaagtcggcagacaactaaaagtccccaaagtcataagccggaagaaacagtgaattctccgaaaactaaaatggaatcaagatacactaaaaatacaaagcagaaagttcaagtcgatatcaagaaagctcgaaatccaaatctaagaacattagcaagctaacataaaccttgaggaatgatgctagtccaaaagcaacaaatccacttcttcttaagataatcctatgaacgagatttatcaaggatgccttctgccaatccaacgataacaaattcttcttcctatcaagatgagagccaacctctcggaaccaagaaaccaagacgttagaacccggcaagcaaagacactagaagaacctcaaaccacacttccggatgcgacgacgacgataaaagatgcgccaatgttacgtctagataaaagtcttcaataagcttcagatcacaaccggatctgcaaagcaaagacaaggacagaagcctaaccactcgaaaaaacccgcctcgagaaagagagtgccatcaaatcgaaccagttaacaaacacaacaaaaccaccaagaagaggagaacttgaagaccctagcaacaacttcaggcaaaacaaagaagcccaaaagacaggacacaagcaagataaggaccgatggttgaaacaggaggaaacatggccaccggaaaaacaaagtctggacgaagccaaaccaacacggcggcatagagacgataaaaagcaccagagcagctctagatctaggtcgagaaaagcaaagataacagattattagacgaaacaaacctgtggatcaaacagatccggcatcatcatcttcacaagaaccacgccgtcgatctagccctcaaaaccgcaaccgaagagaccacaaattcacaatccgaaacaaacccacgacactccaatcgaagggccaaaacaaactacaacagagacaccatcaccattacaaactactaacagagaaaggctagacataaagcaaagaggagaccgacaccggtgctggaggagccaccggctaccgatctcagatcggaaaatattattggcggctggtttgagagagagagctttagagagtaattaggttttttttttatatcttcgatttgacttttgtttatacagccagattggtattggactattgggtacaatatatatatactatgatgttttaattttcatagcaggatttttgattgagtactatatactatgatttaaaaaacctacattttcaaatttgttttatataaagcaaaacaaaatatgtaatgtttattttctcctctttcaaagttacatattctccaagaagatattttaaaaaataatgtaaaatagtaaaaaaaaaataactatctaagagtatatttatttactttgaaggataaaagtgaaaatacaaagaaaaatatatcatacctttcacataaaattttgattagaaactagaatttcttttgtgcttttgttcttgggttacttttattttttaataattatttgtgatcgatttttttttttcgtcgaaacagtttccaaatatcaggatttcaaaattagaaaaatgagagttcaaatcaaaaaaaaaaaatgaaatgctggtgctctttttattcactaaaccagtactttatattttgggttcgaaattggaatggaataagtcattaaaaggttttggcttcagtcataatgcaattggtattaatttcaatggtattacatttttttattcttttaaattgatgatatttaagaaaaaaatattaatgtatttgtataaaacatgagctaatttactttttaggcaaactttttttgtatgtagtataagttttgaagtttcttgagattaatggaggtgggtaagatgaatctaataccaatcaagtataaagttatcaaaacaaaaataaagtgtattctttgtcattataatatgctgtttgtggggtatatttattgatatatactttttggtgtttttacccctccttttggtaagtaaaaaatgattccttgattgataattttaaaagcaaaccaattttcctgcactcaaatctcaataataattattttcaacactttcaagttgatgatacatattattatcatattataatgtagatacatatatgtgtataagaaaatggttgatgacaaggcattctcagtttgtcacaccaaagaaagagagagtactttattaaaacttgatttatttattttatttgttggtggttatgttgttacttaatttgtgtaatttcacttttagctctccagtctgtctattatttatgatatatttaccaccaaaatttcaaagttcagtactatttgataaagctatgatgaaattatggaggttagatttgcatatcaaaagatatacaacaactaaaaccttttttgaatagtagttcttgaccttttttttgtttcttttactaccatattatttacaagaatgtaaaatcatgggtttgcaccaaaaagatttgatttttgtcaccaaaaaaaaaacacatagtacaaatcatgagtttgggcaaaaaggacgaaagatttcaccttttttttttttaccattcacagtacaaatcatggggtaaacactcaaaaagacacctaatgttacaaaatctacaagaatcgaatcttggggatttatccatgaaaatcaaatcaaaatttgtgtaatcctcaagagaaacaacaagaccgggttttggattttgtgtttaaagttttaagattgttcttcttccactttgatagtttcactttcaaagcttcttcaatataacatcaaaaagctatgattttgatgcaagaacctcccactaaatttgctttcctagtgggggatccacattttttgagaaaagattttaaagaaactactcgatagattgataagttagatagatagataatcgtaatcatagttgaagtgaacccgaaaacccggttcagttcttaggtgacaaaaaggtctacatctttcgtcgtcgacatcaatagagactaacatgttatgatgaagcaagaacgtgaaaaatgttcaaaaataaaatgttttattaagtcaatttcttgaaatggaaaagacattgttttgagtcatgattaagaatattaacgttaatgaaaaaagaacaaaagaacaacagaacaaaagagatcattacaatgtacaatacagaagatgaatgaagctgtcgttgaatcttctgttgatgccattaatgttcttaactacaaccttggaccttttgaaccaatagattgatgatgatcacgacgagaggtcgattcacattagatttcattgctacgcaaaccaaatgtgtgcagaaacatgaaacttctaatggtaatatgatatagacaagaactttacaagagtcgcttgtatgcaagaatttcaaaatcagtctcaagatcattgcttaagttcgaaaaaagacacggaaaaattgcctaaaattatgatcaaaatagactaaaagaaatacaatgatatggctctctttctcacctcctaaaggagccaagtacaaattgaattaagggtagtaaaaaaaaaagttaacaacaaaaaaaatgaattcaagcaatcctacaaaatggccaagttctagtgaaaaactaaatttggtaaaaattaacaagtcacactgaggatgtatcgatgagaacatcgtttagcacatcatcttcgccattcgccatagcgagcagctccgcatctctctcttcctcgttggagaagtctctcctttcgaatttcgagttagcggatataaagatcaacttttgagctcgatccacggctgcgcgtgatcttccattcgaatttacccatctcaaaacagaggaattgcatttgaaaccacaagaagttgcatggagaaaaataagcctaactgcaactctccccaatgacctgaactcactaagataagtttcccaaacaagtctactactttgtggattagctatcctcattttccccgaaacaggatctctctccttcatttgaaccgcccttgcgtaaaccggatcaagcccttctgttctccatttcatcagctccatcatcgcgatatgtgcctcgtctctagacacaagccttgttattaacttatcaacatctttctcttgctccggggacaagcatttgaatggaggaagatattttccgctactgtcttttatcaagtaaagcggatcaagtataaacgccgcagcccaagctgggtgataactcttcttgaatcttctctcaacgatcttctctacttgcctctcttcaacaacattgaactttgcataccaatcttttatcttggaccttagctcatcccatagcggtaaacattgccctaccaaaggcctctcttcctctattctccgagccatttctttaacaagcttcaacaacaaataaaccgcctctacctcgttccaaaacccgacatctccaaccatttcaccaacctctctagccatatgatcctccattagaacagccttacacacatcatcatgcatcaccagctgaatcgctctagcgaaactaagcacatcctcaaggagattatacaatggctcaaacaaagaactatccaaaggcaaatgcagcatcctagtctctccttgctcttgcaactgatacttacaaaccgcgtttcggatctgtgccgtgctgttcacgaaattaacgagcctcgagcagctttgagagacggatttaaacaaaggaagctcttttacaaaatctcgaatcaaactgttgaaaccttgaaactgacaagagagattcaccatccattgatgctggctctcaagattcctcaatgccttactcataaacctatctgaaacaatcccaacacacctctgaggtgaattaccacaaatacccctcaccgtctcccacaaaacctcctctgcgtaattagacggcacagctccgttcacaaacacagctcgtctatacaaactcgtcccattaggcaaattcacaatcaaattcaccaaattctcgccggagctgtcgaatttccatccatcagaagcaatctgaaagaacattgcgtcgtggattctcgattcagcctctgctctcgaatcttcatacttcaaatccaatcttccggtgacaaaatctctccttgagatgatcggtaaaccaacttgcgtcaaaaaagctctcaactttggatgctcgagaccagataaagaaacagagccacaagattcaaaaacccaatcagagagagaatctaacgcagaatctatctgagctttagttagattccgcgtctgagaagttttaggactcttgagcttcttcacactatcttcaagcatagctaatggacccaaatcgtcttttccaccggaaagcatcaaatgcggctgctgtgtaaccggaaactgcccacagaatctcgagggatcaacgacactaagaggcgtcacattataagacccttgatgatgatgatgaggatgatgatgatgatgattcagagcttccacggcggaggaattacgtttccggtgagaagaagacggaggaggaggaggagaaggagagattgtggagatgggtttaggtaaagagttgaaatttggacaagttccacgtttaagatgctcagaagcagttcgggaaggattagaagctgagaaaacggcgtcgcataaagaacatcggagtttaacggctttagggaaaccagtgtcggtgttgtgtagtaagattggttcaaggtgactccaataccacgcgcctttgcctttaactgcttttgttcttaccatcattaatccttcgtaacgcttttgtaacgcctttgtcgctaattcttccgccgacggttgttgcgttggtgattgcgtttgcgtttgctgttgtgtcgccgttgttgttgcgtttgtcgtcgtcgccattgtaaagtcaaaaaacttaaacaacaaccctgaacgaaattaagctgagactagtggattttgatgaaattgaagagaaaatttcgccggcggtcggagataactccggcggttcctcataacagagaacagaaatagaaataaataaactttgtctctgtttttgcttcacctctgaaaaaaaaaaaaaactttgttcctctctgctctgctatcacactgatagtttctttcgattctattttttaagagactgagaaatttcaaaaaggagaagaagaagaaagaaagagacagtagagagagacagagagaggaaggagaagaaaataagggagacaaaagtgaatctcacgcgcataaggtaagcgcgtgtttgtaacattgaatgaaacgtttgataggaacaaggtgagaccagagtcccacgtcgtacgagaacggaaacaaagcattggttgttttagtctctcacttcactctcattggcacgtgattctcacgctctccataaaggtatttttaatactatatattattggttttatacctttttaataaaaataaatatcactttttcagttttttttaaaaaaatatttttggatgtgtcttgttttcatatttttctgttttttttgagtgaattgttgggttcttgtgtggaagaggtcttcgtctgtttcctctttttctaatttatatgattataaaatattgatctactattgtatagtatcaactattccacgtaatcaaatttggtatatgattcgtgttatgaactaacccaccaatataaatactattaacagggtaaatcattcaatgacataagcaaagcagctcacaaatttagtactaaatcattaaatgattcttttaaaagtagataattgtgtgaaagtgttagtaaatgagtgagtgaaagacatgttttttattaatttaatgtttttactttttttttgggtataattatgattgtaaaagaaggaaaaatacaaaaaaatgatgagtggggtttccatttgtgtcttgttgtctatgtgggatatattcagaatgtgggcataaaagggcaacctaggaatttaatttgtttctttagggactgtgtctctctgtgtgtgtgagagagagttgttgaccaaaaggacattctttagtaaatacttatttattattttcagaatccagtaaaaaatatatttattgactgtgacaaaaaaaatatttttgaatataattggttcagtaataaagacatttactcaccattacaatttgtttctacttgaagtagtataatgcatgttacatagtataatagaaactctactttcattttttttgaaaaaactattaactggaaaataaactattttttctcaagaaaaattataatttttttttgaaagtttactacgagtaatattattgctagtattttattcctgataaaaaaaaattcaatacaaaaatcaatatgtttcaaaccactattatcatatttcttgtaagaatgaaaacaaaatttcctgattgtcatcctgagtttttgtatcagtgacaaatagtgacaatttttgtaatttttagaattcgtgaacatttttttctttaatataattgacaaatgttgttgacaacaaaaatggataaatataacataataaaccaacgtttttttccgtaatgtttgttttggacactacatatgtttaatctgagttgtttaatctattagcattatggaattgcattgtttgtcgtagatgtgttattttgatattttagtaaattctctttaaatttcttactttttctactgaaatagttgacttttaccctatcccttttttacaacgacatatactctcttttcttaactgtcttgtgtggtattcatgagtcttatggttgttacaacactcatctcatgtttttctttagttgttctttttacttataccattttttgttaagttatttacttagattacctatttactctacaaattatacaatatatagttatgatacattacttatcataaagtagctgtggaatttagaaaataattatgcaaattacgtaattgatactccattacttatcataaattcttttggaaaagaatatagtgtcctttccatttatatttacataaaaaacgtttacggattaccaaaatgcgatgtgcaaaaacatatagatttagatattcactttttatttgcaatattgttatcagatccatgaaaatcaggtcaatatccaatatttaacgtatctatctgtggatatccctttatctttgattattaacgcaatgagattgagctatcttaatcaaatgtcagtctctaaaaaaaaacagaaatcaaatgctttcataagatctaaaaaaaaaactaaaaatatcacgtagggttacaaaatgaaagaatgtttgggtcatatatctttatctttttcacaatttattattctgggaattttgaataggattttcaatggagatcatcactctattctacaagaccatctctatatactaaatttttgtagacccacaaatttaaaatttagactgcacatatatatatattttatagattggtttatggatatttaacttattcaattttttaaaaatagtaaaacttaaaatttaaatttgtttatcctctgtataaaaaatatagcagatggtaggaatgtaaaaaaagaaaaaataataattacagatataacaatagttaaagtatacaagtggagattagtaggagtctagatttaattggtcaatgtgttaatgtcagaacagccacacgtcacaactgtctcccaccttcttgagtacgatcgtataatgtacttatgattatacaataattttgtaagaaaatggaaaaattgtattatgttaaatagaccaacccaaatatgaaaagatgaatggtccttaatttgagaattatcctttgtggtataagttgtaacatatcacccgcaagcatccggaggttatctggtaagagttatttagattgtcttaaaacattcaactcaataatttggactaattattttattcaactaaaaaaagatactgttattgataataataataataagataatatttataaacggttatttgaattctaagttatttaactaatattttgaaaagaatagtattctaaatattacatttttggtgattttaaattatattgtggaggaagtgtttacaacaacatcaaagagactcaaattacgatattatcgacacctatcgatatcaagtactccaaaagtagaaaaaccccaacaaaacttaagctctatgttttttcttacaatttaacattcatatgaaaagtcattcgactaatatataaatataaacaaaacaaaagtcaagctttgtctcacgtgagagaagtcatattcttttctccaattaccccgcagcacgtaccaactcattttgtgccatcaaactttttaatagcgaaagttttcgtaagaaaccaaggattagctaacaaacaaacaaagaaggattacacaaaatttaataattgaagagaggagtaaaagtagacaagaaacactaactaaatttgactctcgtaactcgcatgattttgtccttacaaaagtcacatcaaaggcatgggtagttacatttgtatacaaaaaaaaaacgttttttccccataaattattcccactttaacaaaactatggtctatggttactaaatagtaaatactacttactactactggtattatagtaacccaatgatttcataagtttacgtgactagctctcttgaaggtaagttggatttagcaaaattagtaacaaaatataacataaagtctgtatttttcttagtaatactatatgtacagtttgaaaccaactatttaaaaatgaatttcagattagtttagatttgaatacatcattagattacatgcttaaaagttcttaacatcataagtttatgacccattgaaactaaactagcccttgttaagtgaaatatagcattgtaatttacttttttgtttaaatagatggttgtgtttttatgtatgtcggcatacgtgtattttagagagaaagttttgattgtaaaaaaaataaaaaataaataagaaaactatttaaaacatagaaagataactatatcagaataaaatactaagatgacaattaatttgcttcatttacaagcttgtattaggaattctctatgccaaccactccactacgtttgtgagtagagcttgcttgatcaatacaaacaacaaaaagatgaatttataattatatattatactatataataaaatacaagtcacaaaagcatatgtttggaataaattattgttatgaacttggatagtttcattctttttgacggcaaatagttatcattcattttttgtatcattcagtctttaatggttccaggtaagttgcaaaagaagtaagcaatattcatgtattctctagagatttttgacggcaaaatagtatcattcattttctttaaagactacaatttgattagatattaatagattaaatggagtagtagtttttttttcaaagatgattttaactaaagattattcttttcattttgattgttttatttgtatagctcaaaactttgtatataaaacatccttcttgattagtaaatttcgcatttcaacaaaaatggaataatgttgtgcgacgattaaatggaatagttaaaatgattaaagaaatgacactcgttgagccatgagattgatgattagttgattaccaccaacgtgtacggtgtggatctactgcatacgtgcaaaatgttttccatgatttttcataatggtgtttctttatgagtttatatatcagtaactagaattcacaacccaaaataaaattcatatggaaagtccatgttaaaatttttgttagtgaaatggtgaaaaaggtactactagtaaacttcatattttatttccctttttaaaaaagtagaataagttaactaaaacaacttttaaaagtggcaattacattaggccaatttttttaaaaatgtattgagacatatagctaaaacaaaatttgttacaaaaaaaacacactcacacatcgaaaaagctggattttttcaatcacatgattgaaggagctctgggttccacattcagtaaaatttttaaaaagataaaaagtaatttctgattcagtgttttcttaattgggcttaatttatgacccatgggcttaataattcggtacgatcataatatagaaccgtttagaaccgggaattgatttcatcggttcaacaaaacataaaaggtcaaaaaccaaaagaacgtaccttcttcttcgacactagttcctccgatcagcgaatctcgaagaaagagattgaaactaaactgttgaaattttccgacaataaacttatctcttttcctcattcaatcctagagaccaaaaagcttaaaagcaaaaaagaacacaaggaaatttactcagaggtaatcgtcgtcggagccaggaggaagaggagggatgggagaggtctggacatggattatttcattcttaatccttatcactcttctcggactcatcgtctatcaggttcgatctgattcccactttggacaaaaaaaaaaacctaaaactgtttactttggttccatcgactcttcttgcttgttgtatttgaataaactctgcttaggcttattcgatcactgtattgaactaaatttagtgttttgtgttctttcaatcataaatcgtttataagaaatgtttctaagttttgggaatgtgataaagttagtaactttagggtttctttatataataactagttaatctgtcaactagaaacaattttgtttcttaaattcttcaattgcttcttgatatatgtgtattgaatctgtagatgttatcttctcagtttatatcaatccagcaagtatctgtgagtgtgtacaagtgtgtgtgctcacgggtattagagtttacttcttaatgtttctggattagtaagctctgatttggtatctgtagagttgatctataatgttttgagtaatgagattcataataaccagatattttataggagagtcttgatcatatgtctctgctattttgctttgcttgtgtccttgtaccgaaactgacggtgcttattgatatgatattttgttgcagcttattagtttggctgatctcgagtttgattatatcaacccttacgactctgcatcaagaataaactttgtggtattaccagaatccattcttcaaggatttttatgcgtattttacctcgtaacgggtcattggttcatggcactcctttgcgttccttatctctactacaatttccatctgtgagtctctcttttttaaacaatcttggatcaagtttaacatccaacggcaagctgattttgataatgagtatatcattctttcctgttattaaaggtactctcgaaaacaacatttgatagacgtgacagagatcttcaacttgcttgattgggaaaagaagaaacgactcttcaagctcgcttacattatcctcactctctttctcaccattttctggtaactagacctttcactgtctttactcaatcctaaactcgtaccaaaacattgaaaacttatgttgcaacttcgttacaggttaatctattcaacacttgatgattacgaggactgaatcacgcttgaagatacacccctgtgacaggcgacaacaaacggtttggtcaaacccctctcttagtacttgacaccgcgcttgatacaatggcatgagaaggaaggcttttaggttatgtaagttaattaatgtggcattagagagctgtgtaaaccagattttatagtcattagaatttcattgtggatctttgtggtgaagccaagcagtgaattgttaaccatgattggaaccctctaactaagtcagaaggttttactttttattttagctgcaaaattatttattagtatataaataaattggtaaattctccaaattgtagtgaagaagccagaaggatttatctttatcatcgtggtgagttctttctctagattttttatcctcctccgaatcgaaattctctatgattttaagatcgtcgttggattctgaaactctttaactttgatttctacttaaaaccctaactaatgttttgacgactggaaaaaaaaaaccaaatctcgttcactcttttgtttttttgttttgttctgaatttcgtgtggaatctgtggacgtaaacgcggaacaaacatagatttgttggtgatgtaaattgcaaagattgttactcagtaatgaatcttcttcgcatatgttatattgtttcgtaagaggattaagatgacaatagcattagggtttatataatagagtaaaaacaaaattaagcacaatgttaactagtaatgtaaattgttgttaatttgagctacgattagtgtcaataaacatcaataaacatagttaccgagctttgactgaattttgagaatttttgagtgttgttgtttactgcagttttagtcatgttcttgaatacactctggtttcagtttcttctctgcttcaatggttaaactccattgttagttttgatctacgatcagtttttcgattaaagcacaagtaaaccgagcttttgatttgagtccaatggctgaagactctctttatgatgttaaaaaacgatgttgtttacagttttggtgattcaagatttctaatgttttttgaatgtgttattgtttcaggttctttgctttaagattcaatggttaactcaatcaaaggagtcttcatctcatggtacattacataacctttcttgttaatatactctgtcgagaaatcgtatcttttatctttgttttttttgttcttatagtgatgttcccatggcacagttcattgcacatttgaacaattcgttgcctgcttcacagaagttcataattcaagtactgaaactggacactactagtatgtttgtgaagccatatgctgaggagatgatccgtgatgccgtcatcaagttcagggacgaaaactcttacgcaaaggcgaattgatcgttttttttcttcttctcggtttcggttactagatgtcgattttggatcttaatgtagtgtggagatcaacaaggatttgtgggaaatctctgatggaaaatatacatgtttgttaattattaatgtacaacgaatctgaaaaaccgaattggtttattttgacaacgcaacaaaactttgcaaatgatataatttgaaaacgcgaactggtcgcagctgggaagacttttggacatcacgggtactcgttttttgttgttgttatggctttgttgactaaggttacttggaacaacatcggaatgcatcagccacaaacgaattggtacaagggcgtatggttcccctactcaacgcccaagtactcttttcttttgtggctcacaatccaaaacagactatccacaggggatcacatcaaagcatggaactctgggcaacaagtcacctgcacactctgcggcaatgctgaagaaacacggaatctcctattcttctcatgccattacacctccgaagtttggagaacccttacgcagcggctcctgtccaacgactactctcgtgactggaaccgtctccttcctctgctctgcaatacaaatatgccaacggatcttctctttttgtttcggtatgtcttccaagcctctgtttaccacatatggcgagaaagaaatgcccgacgacacggagaaatcagctcaccaccaaaccggctcataaagttcatagacaagaatgttcgcaatagaatcaactcaattcgagacactggagatcataactacaacgcttgcctgcagctatggttctccacgaggcctctttcatccacacactctctctgaattttcctttcagctttgtaatttcagttttctctctaaaacactaaactaaccgttgcagtcattgtacaatggttttgatagaataaaatttgagaatattacactcttagacacttttttaaaacttattccgtgtttaggcacttccaaaagagtagacactttctctatgtttttttactaaaataccctattaactaaactactctcttaatccttaatccacgttctctctctctctctttctttctctctctcttcatctttgtaaacaactttagttgcgtctacttcaatggaattgttcaaaatagacagttctcaaaaaaagttatttgttggatgttcaaaatagccgatctccttataattatttgttgaatccactcactcatttctttattttagtattttagatgctatggagttcttctttcagttaaaggatttggtattcaaattttgcagaatttgagatttctatattgtagaattactcggattgttgtgagattatggattgattggagagttcgatattttattcgttttcactgattgtagattgtgatttattttgcaatttaaatctttgttttgacataaatttgagattcagttctttaagaaacttcttcttcttcaacaatggcggcttgatttgatttttgctctctctcatgtatcaaactcgtttcatctacgtagcatcgagattccagttaatcgaatctcctattatcatggacatgctatatagaatggatataaatcagtaaaaaggttttcgaatggatatatttaaatggatttgttattatggacaccaaaaaattgtttgttgattttttttttcagtttgcagaaacctccacctttaagaccttatggacatgaaactttggtttctttacaaaacacggttaatcgaatctcctgttattattgacatggtatatagaatggatacggatcagtagaaaagtttctgaatggatatatttaaatggactcgttattatggataccaaaaaattgtttgttgatttttctttcagtttgcagagacctccaccttcaagaccttatggacatgaaactttggtttctttacaaaccacagttaatcgaatatcctgttattatggacatgatatatagattgaatatggatcagtaaaaaggtttccgaatggatatatttaaatggactcgttattatggacaccaaaaaattgtttgttgatcttttttacagtttgcagagatctccacctctaagaccttatgaacatagaaattttaccaaattcctaagataatcgagatcgaattgtttaagaaaattctcccatttatttgcagaatcggtaccatcgatttttggtgagccgccgccataatcgataagaggaatcgagcctagaagttatggagacgtggagagagaaaggcactacaaatcatgaaagggggagagagagagagagatttcttttattttgcgtaaggattgtggaagagagagaaaatgtttaatttgtattaaattttaaaataaaagtagttggttaaattaaaggtaaaaatgtctttaaaaaagtcaaataatagaaaaagtgtcctctcccttataagtgtctcaaaaggaataagattattttaaagtgcctaaacgtgtcacattcccataaaattttacattctttcaaaaaaaaaagaaaacgcgaaccggccggtaatcaccaaataacattaaaataactaaaccggtttggcattcactctcttcctctctgagagtctcagactcacacacagtggtggttcgtttagggtatttgttgaatttttcagagcttccgaatcagagagattgagaagaaatcaaatagagaaaatgatgttatcgtttgcgattgcatatacagcgaagagatttgttcatcggagtcttgtggtgagaggtaatgctgcaactgtttctccctctttttccttttgccggagaagagctttctctggtaagactagttatgattacagagagaaactgagtagaaatgggctgactgaattaaagttagatgacgctgttgctctgttcggtgaaatggtcaagtctcgtcctttaccttccattgttgagttcaataaattgttgagtgccattgctaagatgaacaagtttgatcttgtcatctctctcggcaaaaagcaataaatgagggttttcgaactcattggttcgaacgaacaattcgctgaaatgtttaaccggacaatgtcggaagcttccacattgattatgaagaaggttttagaagtttacaaaggattcgaagatgtaaatactttggtggatgtgggaggaggaattggaacaatcataggtcaagtgacttccaagtatcctcatattaaaggcatcaatttcgatctagcatcggttttagcccatgctccttttaataaaggtacacggccactaagtgataattaaaattaaaaagttaccgctcttaaaattatcatattactcttgctcaatattacatataggagtggagcatgtttcaggagatatgtttaaagaaattccaaaaggagatgccatcttcatgaaagtaagtagaaaatgaaatggttaatgattgacactttgacagtggatactacatgattggactgacgaagattgtgtaaagatcctaaaaaattattggaaaagtcttcccgagaaaggaaaagtgataatagtcgaggtggttacgcccgaggaaccaaagattaacgacatttcttctaacattgtgttcggtatggacatgctgatgttagcagtaagctcaggtggtaaggagaggtctctttcccaattcgagactctagcctctgattcgggttttcttcgttgtgaaatcatttgtcatgccttctcatatagtgttatcgaattacacaaataggctcgacattttaccaacaaaaattacgattcatctctcgtacagtcgtacttgcggagactatatagagtggttgtaatgtgtaaaataatctgtgtattgttttttttatttatgtgatttaaacaaatagcatggtattatataaaaaacaatgtgttgatataccaaattggttaggattaagcttcaaagataatgcattgagatcagtcagttcagtttttcaagactagttgtatatggaaacagaagtagagtaaaataacagccatcaccaattttttccacaattcttatctcttgcttgtaaatccggtttgagactgtacttagtactactgattgagatcaatgcaaaagattttctcacaaaataaaccggttaggtaataagttctaaaccagaaccccaccggtttgcatatctcatccctccgtgtagggttttgcgatttccagagagagagagagtgagactgagattgaagtctcctgaatcagctgaagccaaatcgataagatgcagagatcgatttcattgacggccaaaagattgtttgttcattggaatctccaggggataggtaatcctccaactgttccttctttcttcaatctttgcggttccggttgctgggaacgatcttttgctagtgctagtggtgattacagagagatattgagaaataggctaagtgatattattaaggtagatgatgcggttgatctgttcggtgacatggtcaagtctcgtccatttccttccattgttgaattcaataaactgttgagtgccgttgctaagatgaacaagtttgaacttgtcatctctctcggcgagcagatgcaaactttgggaatttcacatgatctttacacatacagtattttcatcaactgcttttgccgacgctctcagctctctcttgctttagctgttcttgccaagatgatgaaactcggctatgagcccgatattgtcacgctttcttcgctgctcaatggctactgtcacagtaagaggatttctgatgccgtagctttggttgatcaaatggtcgaaatgggatataaacctgatacctttacattcacaactctaattcatggactttttcttcacaacaaagcttcagaagcagtggctttagttgatcaaatggttcaaagaggatgtcaaccagatctggttacttatggtaccgtagtaaacggattatgtaagagaggtgatattgatttggctttgagtttgttaaagaagatggagaaagggaaaatagaggctgatgttgtgatctacaacacaatcattgatggtctttgcaaatacaaacatatggatgatgcactcaatctgttcactgaaatggataacaaaggtattagaccagatgtttttacctacagctccctcataagttgcctttgtaattacggaagatggagtgatgcttctcgactactcagtgatatgattgagaggaaaatcaatccaaatgtagtcactttcagcgcattgattgatgcatttgtgaaggaagggaagcttgtagaggctgagaaattgtacgacgagatgatcaaaaggtctatagatcctgatattttcacttatagttcactgatcaatgggttttgtatgcacgatcgtttagacgaggccaagcacatgtttgagttgatgattagcaaagactgtttcccaaacgtagtgacttacagtactcttataaagggattttgtaaggctaagagagtagaagaaggtatggaactcttccgcgagatgtctcaaagaggattggttggcaacacagtcacttacaccactcttatccatggattttttcaagctagagattgtgataatgcccaaatggttttcaaacagatggtttctgttggtgtgcatcccaatattttgacatacaacattctgttagatggactttgtaaaaatgggaagctagcgaaagcaatggttgtattcgagtatctgcaaaggagtacaatggaacctgatatttacacatataatattatgattgaagggatgtgcaaggcagggaaggtggaagatgggtgggaattgttttgtaatctcagccttaaaggagtgagccctaatgttatagcctacaatacaatgatatcaggattttgtaggaaaggttcaaaggaggaagcagattccctgttaaaaaaaatgaaagaagatgggcctcttccaaatagtggtacctataatacgctgattagggcacgccttagagatggtgacagagaagcatcagctgaactcatcaaagaaatgaggagttgcgggtttgctggagatgcttcaaccattggcttggtcactaatatgttacatgatgggagattggacaaaagcttcctcgatatgctttcttaatgctatttatctcattttcagtatcaatttttgttatgtttattttctgtcaaaactcaaaagtatctcaattctcatttcttatactttaatatgcaattcctgaaaatcagattattagtgtacatcttcagcaataagtatgtatcaatttccacattttttttctccttctaattttagttgatgaaacagtcaaacagaaattgtttaaactttcatgatgtaccattttgtttttgttgtaatgtgatattttattaaacaacaaaaaattctagacaaagaggtacttatatgttaattcttaccaagaagtctaaagaaaatagatgtgtccgttaaagcagttgaaagacaaaccgagatgaatcccaaaacgaatacggacttattgcgaggaaggaatcgagcatgagagatgacccaagaagagtcgaaagatgattaaattttctgataacttttttttatgcttaaccggatctaacattttgttaaaccaacctaaaccatgctcaattccgattccctaatctgataagcacgaatcacatctgttctctatttgcagagctcgaaatttaagagagaaattgagaagccaaatcgagagaatgcttgcaaaaatatcatcttcagcgaagagatttgttcatcggagtcttgtggtgagaggtaatgctgcaacttttcctctctctttttccttttgccggagaagagctttttctggtaagactagttatgattacagagaggtacttagaactgggctgagtgatattgaattagatgatgcaattggtttgttcggtgttatggcacagtctcgtcctttcccttcgattattgagttcagtaaactgttgagtgccattgctaagatgaacaagttcgatcttgtcatctccttcggggagaagatggagattttaggaatttcacataatctctatacttacaatattttgattaactgtttctgtcgatgttctcgactctctcttgctttagctcttcttggcaagatgatgaaactcggctatgagcccgatattgtcacgcttaactcgctgctcaatggtttctgtcacgggaataggatttctgatgccgtagctttggttgatcaaatggtcgaaatgggatataaacccgatacggtgacattcacaactctaattcatggactttttcttcacaacaaagcttcagaagcagtggctttaattgatcgaatggttcaaagaggctgtcaaccagatctggttacttatggtgcggtagttaatggattatgtaagagaggtgatactgatttggctttaaatctgctcaacaagatggaagctgcgaaaatagaggccaatgttgtgatctacagcacagtcatagatagtctctgcaaatatagacatgaggatgatgcactcaacttgttcactgaaatggaaaacaaaggagttagaccaaatgttatcacctacagctccctcataagttgcctttgtaattacggaagatggagtgatgcttctcgactactcagtgatatgattgagaggaaaatcaatccaaatttagtcactttcagcgcattgattgatgcatttgtgaagaaggggaagcttgtaaaggctgagaaattgtacgaggagatgatcaaaaggtccatagatcctaatattttcacttatagttcactgatcaatgggttttgtatgctcgatcgccttggtgaggctaagcagatgcttgagttgatgattaggaaggattgtctaccaaacgtagtcacttataatacgcttataaatggattttgtaaggctaagagagtagacaaaggtatggaactcttccgcgagatgtctcaaagaggattggttggcaacacagtcacttacaccactcttatccatggattttttcaagctagagattgtgataatgcccaaatggttttcaaacagatggtttctgttggtgtgcatcccaatattttgacatacaacattctgttagatggactttgtaaaaatgggaagctagcgaaagcaatggttgtattcgagtatctgcaaaggagtacaatggaacctgatatttacacatataatattatgattgaagggatgtgcaaggcagggaagtggaagatgggtgggatctattttgtagcctcagccttaaaggagtgaagcctaatgttgtaacctacacaacaatgatctcaggattttgtaggaaaggtttaaacaaagaagcagatgccttgtttagagatatgaaagaagatgggactcttccagatagcggttgctataagatgccatcttagagaatggtgacaaagcagcatcagctgaactcatcaaagaattgaggagttgcaggtttgctggagatgcttcaacctttggcttggtcactaatatgttgtatggggagattggacaaaagctttttggaaatgctttcctaaactatccttgaagtgagtaagccttttttaataagttattacttctcaatagtcaatacaatccttatgttcatgagtatgcctgattagctttctgtgaaccagcattgaagttttagtgaacattttgagttgtgatttggttttttatcttctgtatccaatattgttcatatcttataaacgagacattctcaattatgttaatcaaatttggaaacttttatctttgtttcgtgcattaggaaacttgcaaattgttaatttctcctatagaagaaaatggttctgatgcgaatcatgtatgtaccagaagctgtctttgaacaggtggagctgcatcgcactccatttcacatgggaactcttgttttgcaggctcaatgacggtttcagaagatgatatccaaactaatgtgagtatatgagagagtgtagcagctgtaatctcatcaaatgaaagatatttcagtgttcaagtattacttctcaatgcagtcagtatgttcccatggtgtagttcattgcacattggaacagttcgttcttttttgtgttgaacttgaattactatcgttgttttttgtagttcctagtggaattatgaacatgtgtgtggctggacaaacatacacgtagtaccaggtttagtacttgaattatgaacttgcagagatggttcaatggcatagttcccatcgtcaatttcattgattgaatttcccttgccagaaatttctgttttatcataaattttgagaagtagttttggttttacggggtttcttcatttctgaaattagggattttatttcagggtaagaaatcccaagaagaaatgaagaagaaagttagtacgcatgcatatggagcctgctcttcctttgaagatggaccttgatagaccgattcttcctcggtatggaatgttagatcagtatcattatgaaataattcctttgaattccgatgcttactctgccattagatatgagaatgtatgaaaatcttccttaggttctatagcataatgtgaagattgaaatatggtttgatcagttgctgtttctgacttttgaaatttggtcagttagaaatttacatgaaacttcataatggttacatttgtagactacatagggttttagatattcacatagggcattctcatcttcagtttggtgaatcaagcaattactatatacctatttatctggagtattcaggtttcagagaccaactggcccaattccctcgttgatgcttgaccttgaagtctacacaggagctatagatgattttgattttgaggattacttgaatggtaattgttttacagctctttctcatactttttagactgttttacaccaaaaaaaaaagaaaccctatatatttgtctgcttctacaatggtcattgctcaaatagtgactatcatatactacttgcagtgtgtaaaccaagcatccttgtcttgcagaaagttgaactctttgagtatataagagaaaaactgtttagacttgtttcttttcttagtttcaccattttatgggttgttctgataagtagtatctactccgcagatcctcgagaatccaagatgctcaaaccagttgacttccaccaccacgtcatggaagttggggttagtctctccaaaggcccagcttaaccaagttccttgtaggtcaaaacagtttatactttataatgccatcaaagtattgaaactggactctacttgtatgtttgtgcagcctaacgctggggaaatgatccttgcagcgccgtcatcaagttcagggaccaaaactcttgtcgaaagcttcaacaataagtctggtgactaatatataaatagctgatttggatagtgtgagatcaacatggtgttgctagacaagtgtgcagaatgagataattttatattagaacagccatgtattttcttgtgatgtttcatgttcttaacttctcttatttacacggttcctttttgagctgctactgaccatgagaggtgttatgtgtttaacgcaataactttttgttagtgccttgaaatatatgttttctcatgtaagttgtccttgtaactaagcttttcataattgatgacatcagtactgatctttttacttttatttttgttaatgatatattataacctcgagaattttctcatatgtagacgaaatcttggaaaaacttctggtacgtattattttcttaactcttggcatcttatttttgaaatcaggtgtttaggtcaatagcggaaacagagcctagtgatgtgaagttagggctggacttggtgagctctatgaaggaagagcttgagttatgtccttcaacatgcttgtgccaatgccaaatataagcagaacgctagctctacctgtatggaaagagtacaaatttgaagaacttccttacaatgtcctcacaagtatttaatgcaagagctcttttatctcctacatttaaaagaatgattttgaacttttcttagtcatcgtatctaaaagagtggctttttcttagtagagagttctttttttttttttgataaatcctatcgactaatccggtcagcctcggtagaaacgcaccgaagtacttcagagtagacttctccccgaaagaccacactgtctgtctcgagtttggaattcttagtagagagtttaatagggcacatcttagagatggtgacaaggaaaagtttactcttaaaaatgttcataaaagcaaggtttattaaaactgaaaattgcaagtgttgttcttccgtctaatggtttatttatctgattctcgtattgacaatatggagataatgtttctgtttatggaaaagcaaggtgaagaggcatctttacctacgctcataaacctgaacaaaagagacattaactgaacaatattaaaccaaatcgtaccagagaagagaagtcagagtgaaccggtcggttattaaaactggaatatttaagaagaaatcttgaccgtcaaaattaccaaaatgatccaacggcgcagaaacgcgagatccctccgtcttcaaggttaaacaataatgacaagttgtgttcatttagggattgtcgcatcacaatcgaagaagatgagtttggcgaagagatttgctcagctgaggaaagcttctccattgttttcccttcgaggtgtctatttctctgctgcgagttatgactacagagagaaattgagtagaaatgtgttgctcgatttgaagctagatgatgcggttgatctgttcggtgagatggtacagtctcgtcctttaccttccattgttgaattcaataaactgttgagtgccattgctaagatgaacaagtttgatcttgtcatctctctcggcgagcggatgcaaaatctgaggatttcatatgacctctattcgtacaatattttgattaactgtttttgtcgacgctctcaactccctcttgctttagctgttcttggcaagatgatgaaactcggctatgagcccgatattgtcacgctttcttcgctcctcaatgggtactgccacggtaagaggatatccgaggctgtagctttggttgatcaaatgttcgtaatggagtatcaacccaataccgtcacatttaacactctaatccatgggctttttcttcacaacaaagcttccgaagcagtggctttaattgatcgaatggttgccagagggtgtcaaccagatctatttacttatggtaccgtagtaaacggattatgtaagagaggtgatattgatttggctttgagtttgttaaagaagatggagaaagggaaaatagaggctgatgttgtgatctacaccactatcattgatgctctttgcaactacaaaaacgtgaatgatgcactcaatctgttcactgaaatggataacaaaggaattagaccaaatgttgttacctacaactccctcataagatgcctttgtaattacggaagatggagtgatgcttctcgactactcagtgatatgattgagaggaaaatcaatccaaatgtagtcactttcagcgcattgattgatgcatttgtgaaggaagggaagcttgtagaggctgagaaattgtacgacgagatgatcaaaaggtctatagatcctgatattttcacttatagttcactgatcaatgggttttgtatgcacgatcgtttagacgaggccaagcacatgtttgagttgatgattagcaaggactgtttcccaaacgtagtgacttacaatactcttataaagggattttgtaaggctaagagagtagaagaaggtatggaactcttccgcgagatgtctcaaagaggattggttggcaacacagtcacttacaacactcttatccaagggttatttcaagctggagattgtgatatggctcaaaaaatattcaaaaagatggtatctgatggcgtgcctcccgatatcataacatacagcattctgttagatggactctgtaaatatgggaagctggagaaagcattggtggtattcgagtatctgcaaaagagtaaaatggaacctgatatttacacatataatattatgattgaagggatgtgcaaggcagggaaggtggaagatgggtgggatctattttgtagcctcagccttaaaggagtgaagcctaatgtaataatttacactacaatgatatcaggattttgtaggaaaggtttaaaggaagaagcagatgccttgtttagagaaatgaaagaagatgggactcttccaaatagtggtacctataatacgctgattagggcacgccttagagatggtgacaaagcagcatcagctgaactcatcaaagaaatgaggagttgcgggtttgttggagatgcttcaacaataagtatggtgattaatatgttgcatgatgggagattggaaaaaagctatctggaaatgctgtcttgaaacaatcaatcctcgagaaacgaattggggagcaaccatcttcccttgtgattgcatatgtgaggtgaatcgccttttttagatagctattcttgtgtttacttctggacccgttttcatgttaaatttgttcttgttgttgttgagtgtaagtttcgtggacatgactggtacagttctctgcagtcagtatgttctcatgttgatatagatttgtttcttgtctaatcgatgatttatcacctgaatagtattcttccagattggttaagttcatacgttcaaagaaatttaaagaccacgctccttattcgactgattgatcgatgaaatagcagatccatcagtcataaacggcgctgaagaaacacattaacacaccaaatttatgtaccacacgacaacaatttcttcatatgtacagactacagagagaaaaacagagttttgaaaagatcagacaaacaatttgtcggttcgtctctcttctctccatccattgtaaacgtttgcaatgtaatcttcaatcctgctcgtcaatgtgtcatcatcaacatcatcaccataggcatgattatcatcatcatcacggttttcaataccatcatcaccaccatcttgattacattggctaaaatcttcatcatcgttccatatacaaccatcattatcaacttcatcaaaaccatcataatagctaaaacaatcatcatagtaatatcttgtgaaatcacaacattctctgttcttgtctatgatttcaccatcaagcatattgtcttcttgaaaagtgtacaaaacatagaaatctccggtttcttcataaacagagcgattacgatcgatgataagtaagaaaagaatcgtacagaggaaaaagaaaagaagaagaggattgttgaaatatctcaagaagaaaaagagcattagtgttgaaacaattgttctccagatgatctccatgacattgattataatgttcaacatcttcatctggactctatctatatcaataaaagagtaactttccgggaaaaaaccatgaattctgctgagataatgagtggaaaaagtctgttgtgtgaagttattgtaaaacttaacatatataaaataaaggttttaatattctaaggatgtgttgtacacatgtctgtttcttgctgcgcaagttctaagaatttgtgtatgtgtacctttagtattaatatatatgttcttgagagagaagtttacgattcttgaagtgggacacaatgagtttttaagttatgattgtaacaagtatgtcatttatctcattttaaaagtatgtttttctaatatttaaatctatatatgtagatgagaatataaaaaatatggtgtagtttaatttaaggtttttgtgatccttactctaagatcatcaaagtatgaacatgccaataacaataataattcgtattgaagaactttgcacaacctatttataggacctaaacccttaaatccccaccattgtataaaatcttccaaatcaagaataaagtaagattcaaaattctaatcataccacattttctacgtacatttcatctagatcaaaccttttctaccatgcatctccaaaggaattgaatccttaagccaactcacgtgaaatcgaataatccattctcgcttctaagttgagaaaatccaatatttcacgttctagaatcatgacgtacgcgtgacatttagaaatgagaccttaaccttttaaaagtcattgataaaacattacaatatagtttcttttataagtagtacaagaaaactttgtatttataatctcggtaatatgatcgtagtagagaatgtttaagaaagaatacattaatttgtatgaacaaaatacttttgaagatgtttttttattggactccataaataataaattcagatattttcacatcatttccatgactcaacaaaactctacctacaatatgtctaagagagtcaaagactatcatcctcttctataaccaaaaattggtttgcacacacatgacatgacatgaacaagaaactactctcctatttatattcactctagagccggccctgttcctaacacataaatcaaattcaattcgtttaaaaatggagagtcaaaagcaagaagataatgaatacattttccgcagtttgtatccatctgtgcccattcctgacaaacttacactggtaattaatatagctaagaacagtttttcatttccggtttcggtttattataatttaggttaagattcggtttataaatactaatggaattaactaatggctatgtgaaaaaagcctgaatttgtgctccaaggagttgaagaatacacagagaatgtagcgtttgtagaagcggtgaccggaaaagctgtgacgtacggtgatgtagtgagggacacaaagaggctagccaaagcgttgacatctctcggactaaggaaaggtcaagtgatggttgtggtcctaccaaacgtcgccgagtatgggattattgcccttggtattatgtctgccggtggagtcttctccggtgcaaatccgacggctcttgtttccgagatcaagaagcaagttgaagcttccggtgctagaggaatcatcactgatgctactaactatgaaaaggtaattaaacattactgttttctatatgatttggaaaactttttaaccagcaaatgtatgcacatgataatttcgttcggtttggttgctgcaatatatggtatagactaaaaaccaaaccgacataattccacagccaagctgaactaaaccaaccaatcaccaaactcgatttatttgtgaaacatttactgtttgttttggacaggtgaaatcactaggtttaccggtgatagtgttaggtgaagagaagatagaaggagcagtaaactggaaagatcttctagaagcaggagacaaatgcggagataccgacaatgaagagattcttcagacagatctttgtgcacttcctttttcttcaggaacaacaggattacaaaaaggagtaatgctcacacatcgcaatctcatagccaatctttgctctactctcttcggtgtcaggtctgaaatgatcggtcagatcgtgacgcttggtttgatcccattctttcatatttacggtatcgttggcatatgttgtgctacaatgaagaataaaggcaaagttgttgctatgagtcggtacgatctaaggattttcttgaatgctttgattgctcatgaggtttcgtttgcgcctatagttccgccgattatattgaatcttgttaagaatccgatagttgatgagtttgatctttcgaagcttaaacttcagtctgtcatgactgctgctgctcctttagctcctgagcttcttactgccttcgaagccaagtttcctaatgtccaagtccaagaggtaagacttaagacttttatgttagttattaccttattattcatgttcaatgatgttttgattggttatatatatatatatatattaggcttatggattaacggagcatagttgcattacgttaactcacggagatccagagaaaggacaaggaatcgcgaaacgaaactcggttggtttcatacttccgaatctcgaggtaaagttcatagatcctgacaccggtagatcactcccgaagaacacttctggtgagctatgtgtgaggagccaatgtgtaatgcaaggttacttcatgaacaaggaagagactgacaagacaattgatgaacaaggttggcttcacacaggagacataggttacatcgatgatgatggagacatcttcatcgttgatcgtatcaaagaacttattaaatacaaaggttttcaggtaaaatgtttataccaaagattaaacataattcttccttgtttcatattggccggattttcaaagttgaagcttttccaataggttgctccggccgagcttgaagctattctactcactcatccatccgttgaagacgttgccgtcgtgccgtgagtatctatataaatatattgccctaatgatttcttgaaactgatatattaaaacatgaaatgaaaaggttaccggacgaggaagccggggagattccggcggcttgcgtggtgataaatccgaaagcgacagaaaaggaagaagacattctcaactttgttgcagcaaatgtggctcattacaagaaggttagagccgtccattttgtggattcaatccctaaatctctctctggtaaaatcatgaggaggcttcttagagacaagatcctcagcatcaacaagaagtagaagaaagaaaactcttacaagcttttaattaatctactttgatttaagaatgtccttgaacaataaatactctttgtggtttttattattgctccttgattaggaaattctacagttcaattctgcaccgcgcaacaactaaaaagattaaactatctcctcgaaagattttaatcaaaacattgatataactcacggaacaacaattttaaaccgcaaaaacacgctgctttctcatgctgtaaaaagttatactgtagaattagatattgaactgacttactttcattaattcgcaaactatgagtatttattcacaatgaactcaacaagatataaacacaaactcctaaaatataggacataaactctatcaccaaagatatcgtactaatctaattctcaatttttaatcttcatagttccttattatataaccaagataatagttgtctagttgaaacttgaaatagctcaaggatggagaatttatcgtctttcactttacttttcttttattcaactttctcactttctccaatgtataactacttcagtacttcaatactcactagaccagggaaaatgtatgaaatttcaattgtatatttgtatgcatgctttagatatttatttttttccaagattcagattatatcgaagtaacattttttgtaattgtgggcattggtcaaacacctagtacttctgttttatgtcagacttgaagaatctagagaatcttaggaacagtagtcagactttgatgtttcgaaatatacaaatataaacagtaccgtacttaatcaacggtcatattataaattcatacaaataaaagacaacggggtattaaatactgaagattagagaacattttaagtcttttatggatttatgattcagtgattcaaagactcacagtgcaatattgatgtatctaggaatttacactaagaaatcgacagtgattataaatagtactcagttgcttggacaaaactaaagatttataaagaaaaatccgacaaaaggcataattgggaattgaactcttttttgacaagaaactttggaatgaagttttgttgttgttcaagcatagtttttttttttaatatgagtaattttgaatttactgcactgttctaggtttccgacctaaagggattatttgataaatctttaaacatttactagtattacatactccttccgtgtcaggtatcactttaattaagtgatgttcactatatttaagtttgtcttttggtgtatgtttttatattagttgagttcattttgggatgttcaaataattagttccgccaatttctagcaaaacaaagaacagaaaaagcttttccttatagattttaaacttttgtatggaagaagtctacaaaaccggaaaataaagggtgagaaatttaatttatccattaatttttgtgggattacgaattcgaaaaccatttttgtgggaatacgaaaaccactttgaaggtttaaagtaacaatttttttattttgatggtttattgtgagagttcaaaatcttgaaagtttttaaagtgtaagttgttgctactttgaaggttttttataagatttttcggtaaaataatcttattctcattaaataataaataatacaattaaggttttatatacaattgataaaggtctaaaccagaagccactaaacggaaaatctaagactggtttatacaataccaatttgtatagactctctatgaactattgtatatacaacatttctatgcaatcaaaagctatatacaataatattgatatcacttaatcaaattcacaatgttagacttgttttgcgaaatatcattaatttgaaaactaattctataattagataatatttttagaatttttgattaaaaaaatctacatttcgtatcattcataaataacttaaaaactgtagaatcacaaacatgatcaaattatacataaaaatttattttatcttatttatagtttctgaaatacattgatggaagggtttgattggtgtaggcaacaaagaataaatgcttgatggtacaagacaaacagacaccttcttctcccactcttaaattacacacacttacttacacacacataagcttgcacgtggttcttgttcacatggtggaagccacagatgtatatagagagacagagagagagaggaaacaaaaccaaaccttttgctgcagaagagacagactattaaattgcttcacctgctttacttactttccagccaaggcacactctccacgcactcatcttttctcaaatctctctctatatagatttgtgtccagaaattaatgggtttggttcggaaacttatgactggtaatacccagatcttattctatgtttcttgaaactctcttctcgaggcaaatgcagctacttcttcatgcttttgttcttcttcttcttcgtttatcaagaaattgttaacgaaatagcttaaccgggtttgagttcggtttaggatccgataaccgcaaatgcagattgggaaattgatttgggtaataatgttcatattcgttcacattattattacatcatctcgaagtttctcggattctattattaccgaacgagagattctacttcaattcaaagacaacatcaacgatgatccgtacaacagtttagcttcttgggtctctaatgctgacctctgtaacagcttcaatggtgtatcttgtaaccaagaaggattcgtcgaaaagatcgttctttggaacactagtctcgccggaaccctaacgccggcattgtctggtttaacttctttaagggttttgactctgtttggcaacaggattacaggtaatttacctttggattacttaaagttacagactttatggaagatcaatgttagttccaatgcattgtctggtttggttcctgaatttatcggtgatttgcctaatttaaggttcttggatttgtcgaaaaatgcgttctttggagagattccaaattctctgtttaaattctgttacaagacaaagtttgtttcattgtctcataacaatctctcaggatcaatccctgaatcaatcgtaaactgtaacaatctcattggtttcgatttctcttacaatggcattaccggtttgttgcctcggatctgcgatattccggttcttgagtttgtatctgttagaagaaatttgttgtctggtgatgtgtttgaggagatatcgaagtgtaagagattgagtcatgtcgatataggaagcaattctttcgatggagtagcgtctttcgaggttattggattcaagaacctgacttattttaatgtgtctggaaaccggtttagaggggagattggtgagattgttgattgtagtgaaagtttggagtttttggatgcttcttcgaatgagttaactggtaatgtacctagcggtataaccggatgcaaaagtcttaagcttttggacttggaatcgaataggctcaatgggagtgtacctgtaggtatggggaagatggagaagctctctgtgatcaggttaggcgataactttatagatgggaagctaccacttgagctcggaaatcttgagtatctacaggttttgaatttgcataatctcaatctcgttggtgaaataccagaggatttatcaaactgcagactacttcttgaactgtgagtctttgtatctcttctatgctgatatttagtgagtttttgattcgtttatctaactttttagttttgttaatctttgttgtttgttgtagagatgtttctggaaatggtttggaaggagagatccctaagaatctattgaacttaacaaacttagagattcttgatctgcatcggaaccgaatcagtggaaacattccgcctaatctcgggagcctctcgagaatccagttcctcgatctttcagagaatttgctttctggtcctatcccgtcttccctcgagaatttgaaaagactgactcatttcaatgtttcttacaacaacctctccggcattatcccaaagattcaagcttcgggagcttcttcgttttccaacaaccctttcctctgcggtgatcctcttgaaacaccgtgcaatgctctcagaaccggatcaagatcaagaaaaaccaaagctctaagcacctctgttatcattgttatcatcgctgctgctgcgatcttggttggtatctgtctagtgcttgtcttgaaccttagagctcgtaaaagacggaaaaagcgtgaagaagaaatagtcacttttgataccacaacacccactcaggcttcaacggaatctggtaatggtggtgtaacatttgggaaacttgttctattcagcaagagtttgccttcaaaatatgaagattgggaggcaggtacgaaagcattgctcgacaaggataacattatcggtattggatcaattggagcggtttatagagcatctttcgaaggcggggtttccatcgcagtgaaaaagctcgagactctaggtagaatcagaaaccaagaagagtttgagcaagaaataggaaggcttggaagtttaagtcacccgaatcttgcttcttttcaaggttactacttttcctccacaatgcagttaattctttctgaatttgtcacaaacggaagcttgtacgataatctacacccgagagtctcccatagaactagcagtagcagcagcagccatggaaacaccgagttaaattggcatagaagatttcaaatagcagtaggaaccgcaaaggcgctttcttttcttcacaacgattgtaaacccgcgattcttcatctcaatgtaaagtctaccaacatactccttgatgaaagatacgaggcaaagctatcagattacggtttggaaaagtttcttccggttttgaacagctccggtttgactaagttccacaatgcggttggatacatagctccagagctagctcagagtttgagagtgagtgacaaatgtgatgtttatagctatggtgtggttcttcttgagcttgttacaggtagaaaaccagtggagtcgccgtctgaaaacgaggttgtgatcttaagggatcatgtgaggaatttgttggagacaggttcggcttctgattgttttgacagaagattgagagggtttgaagagaatgagctgattcaagtgatgaaattaggtttgatttgcacaacagagaatccattaaagagaccgagcattgcagaggttgtgcaggttcttgaactgatcagaaatggaatggaatcatgaaaagaactcgtttatttttgcagagaaattgtgtagtgtttactgttaagttcattcatttgtgattcttttgtctgttttgttgctaaaattggtaaaagttccattaaccgggtcttctctaaccttaaaccgattctggattgatattatccggtttactgatataaagagtctgattcagaataaaccaaataatcaaattgtaatcaattttgagatttacatgtttcacaaacttttctaatgcggttcataactactggcacatctctctcagacaaattactgaaacagatacggaaccatcctggttcgatacagtgacaacaagatcctggtatgacattgatcttgccaatgttcaagagcttgttccacagctcaatctcgcctttttcgctgtaagatgaaatcaatcctcgcatatcagcccaacagtagaaccctccattgcttcttgtgcactcgatccctaactctttcaacccctccacgagctccgtgtagatactctgcaatctctgcctgttggttttcacaaatctctgaacattttttggattggagattgcggatatcagcaaatgttgggttggagatgagacaggtgagagcgtcgtgagctttcttgaagcggataaaacactctcgttgaacgagtagatagcagcggatctaagcccccggaaagacaagtctttcgaaaggtcatacacgatatgaactctttccctgtcgatattctcttccgtgtcaactatttcagccatgctaacaaactctccttcttctccgtggactgacccagcaaagatttcgtttgatataatatgaatgttcctctcacgggcaaagtccaaaagcgcatagagattctctctgctcagtaggcttcccatgggatttgaaggattcgagattataatgccgcggattcttacacctcgtttcttagcttgatagaatgctcgatcaagcacgaccatcgacatattgaaattatccgcacttctacatggaacgtgtataatgtcaactcctgttcgccatttaacatccctatcatatctacacaaagaatgtccccattcagtattctctcgtagcattagcatcgggtccaaacagtatagacataaagttttacccgggagaacacggagttggaacaaggaaggcgtttcccgaatcagctaagcagaaggaaagaatctcaatagcagatgatgcaccagaagttaacactaactgtgatggatcaaaagtcaccgagtttttggtagcttcagtcataaatcctgccacagcctatcacataatccagaaaacttctctcaagaacacatacaaatccccaaacaaaacactccagtgaataagattaatgaaacaaaagtttagaactttagagtaagagatagcaaaccattttcagttccaaaagtccatcagaaggctcataagaagcaatgccactaatactcaatccatctgaaattgcttcttttggattctctaaaacccaatcatccaaactcaactattataagaagaaagagatcagtcaaatccaggaaataatcacacaaaaagtttcaattttttttgaagaaatttagatacaaaaccttgttgttttgagctaaaccaagttggataactccgtccgggttacccaactcatcatacggatcatcctcgacccgtttttgaccaacgtagtaaggcgaagaatctccacctttgagtacacaattaacccgacccgaaaccgaaacagctccaccggaatttctcggcgagaggagaatacgagagagagaacgaggtaaaccagtaagctccgtgagatgaccagcggattgtgaccgggtgggatccggtaaacccgaattaggagaagaagaagaagaagctgaggagttttgttcaccggaattatctgattcgtcgtttttacgatttcgttttaggtaaaactgaagaaagtagaagaaagcacaaggaatcacagagcctaagaataaaccaccacgaccttgtaccacaccttgtaacggaacaataaccctcatcccggtggttctacctccgccgacgttaccggaattcttatcggaatcggaattggagctccggctccggtttggttcggtacgggtcattgtagtgaactcatgtttttaggtaaataaatattttagtgtttgaaatcaaaatcggagccactttgaaggttttttaacgggtcgggttaacggataattgagtccgacggcgaagagatttgaaagagaaagagaagagttttgatttttaggttaaaagaaaataaaattcgaatttgtttgtttttgctttttggatttttgtttaatttctgatctgttttatttcgtacgctcgtttttgggtcgttgagattttttggagggagagaggagatgtaaattactatattacccttttcttttttaacctgggtccctgaagtttttggattctctggaaacttttctgtctttttctataaaagtttaaaaacttgaaacaaattatagtgaatgtgagtgattattttaatttgtatgtatatatgtttttttcgggatatgtaattggatttatatgtaagaaaataggttatttgtatgttttagatgtgcggtccaaatggagagttttgattgaattgatggtggatgagtgaaatattgagtagtattgaatctgaatctaaaaacaatttgagtatattcctgacattgtaaacaaatctttggtctttgtgttttgttatttttgtacatatgagctggacacttgaatattttagtttctaattaaaacttaggaaaattataagggatatacccagaagaatgaagatttaagtatttatgcatgcttttttcttaattaggtgggtaaagagagagtggtgtttttatatttttacccttgtcagatagaaaaagttggaaatgaatgagaagaaaaaaagatgaaaaagttcaacgtctatgataactcataagttaccggtgataaacgaattaacatgataaataaataaactaatacataaattaatattttacaagaatagataattgttaatcttttagttaccgaatattaacatgatataaaaataataatttgttatgtataatagttatctataatgtagcatacaatttaccactttaaaagacatgttagggtgataactaaattgttaatgtataagttaacaataataattaaattaccaaaataaataaatgtgttattagataatacatattatataataccagatttaacacaagaaccatgttttcgacgtaagatgaatagtgctttcaccttgctaatgttttttaaagacatgtttatcatactaatcaaataattaactacctaaacttgttaccgccaaaactcattttttgttgttggatataaattttttatcttaatatttttcttgttaacgttatatgagacgaagggtatttttgacattagtatgagtcagatgaaagagaactaaataacaaatcttcatgattagattttttatttttcattcttctgagtatatatattaaattcaccctaaaacttatatagaatgataattacttgttcatagtaatggtgtaatgtgaggcttggaaaaattaggacacaaaattaaggaaagggaatgttatgttgaatatgaaaattcttgatattgataaccaaacaattagttctaccagaatcttgagaaaatttagttttcaagagtttaacaaaactagtaaatatgaaataactagctatacagatagtattattctacacatatcaattgttttatagtcaaatatttatataatgccgataaaagaaatctatatcgaataatgtccctataattcttccaaattgcataagccacaaaaacatttgatatataatgacaattattttcgtgaaagaaatatataaaaaaaatttgaattagttggcattggaaaatgagagacagaagttgataaagtagaccaaatggatttggcttagtttgtgtttcaacctcaagttgagattggctgcggtttttagtcgttatatgtaaaacatgaatcgtcatgtggggctcttcacttgtgctttcgttttaatacatttcttaaaataatcacaaccacatgtttataacatctaacccctattatgtgttaagtttaagagcatgctcaatggtgatttctaaccatagtttctaatctactaaagtaataataaaataaaaaataatattatttaatttgaaaagtttcttaaaatagttagaagagtcttcaaaatctcttgaattagaaattctcttacctttccttagaaactatcttaattaaataatattatttattattttattattattattataggttagaaactttgcttagaaatcactactagatttaagaaactcaagattgcaagagactaaatcatataacttctggtctccaaagtacttgggcctgggattatataaaaaagatatgtttaagttgggcctgagatcagtattatctagatgtacttgttgatttctacaatttccataacaatttaccaaaatccatttgggccttgaaatatatatctgggcctcttggaagattataaataacagaagttaattctgctgaaccagaccatgttacaaacgtttttagtttcaatttctttagaaactattaaaactgcaaccaaaaaccctcaattgaaacaaaattataaagttcaattattcatctttaaactgaagtatggtttaaatttatttatttagacttaatgttatttttagcttaaaatttaattctactactttaataatcaagaatttttttaatattaaatttaatatgtattcatatttaaaaaatcgtgttaacgaaattaaaaaaaaaaaaaggtgaacaagcacagaaaatatagaaaaccagtacattttcaccttatttaagaaattttgcagataaaaacaaaaatctaatttttctcctaatcaatttttaccaaatttggatcctaaattcctaaatttagtcattaatacatttactaatcaattaattaaataaggtataagaaaatctaaaacataaatctttacaacaataaaattaagtccgtcactttgccttccactgagtaaatatcaattctttctctttctctctctccgacggagaagaagtctctccgactgtgtcaaatgatgagccatggtggtggcggcggcgtaagtaacggaggaggaggagacgctgaacgaatgctagctcaagcagagaagctactcttaagcggagacttaaacggttcaaaaacctacgcgatccgcgcatgcgaagccgatcactcactcgtagaccacgccgaactaatcctcgccgtcgctgacactctagtcgccggagaatcacgaatcagaggaacaacctccgatcttcccgactggtacgccgttctccgcctcgttcgtttaactcacaaccccgaactcgtcgcgactcagtacagtagactcgccgtgttgcttaacccgagtcggaatcggtatccgtattctgaacaagcttttaggttaatctctgatgcttggtatgttctctctgatccttctagaaagacattgtatgatagagaattgcatctgagtcaatttgggcaactcggtcaattagggtttcagcttttcaatcaaacgccacaatctcagtctcagtctcctcaacatcatcagcaacaatctcaatcgcctcaacatcctaaccagaaccaaacagtgtcgtttcagaatcagcagttaccatttcagcttcatcaaccacattttgctcaagctgttcagactcagtctcagtcacagcagcaaaggtctcaatttgatcagcagttattgcaggagcaacaacaagcatcttggaggcaacaggttggtcaagagcatagtagtggttcgagtggtgactggaaaagaccagtggaagaagtgaggttgattaatttgaacaatgcaactgaaagggttcaatctagtcgtcgttttgctgagccagagcggccgcctagtagatcctttgagggatcttctcataggactccttcaactgaattgacatgggcgtctaagcctactccagtgtctgagcctgtacgtcactctgagcttgtaccgtggcaatactctgagccggctaggcaatatcagttatctagtaggtctagtgaagctgctcaactctcgctgctgccttctgtttctgactcatctcatgcatctcagccaactcgctcgaatcagtcacatgcagtctctaaaccgcagcctgtttctaagccacatccgccattcccaatgtctcagccaccaccgacctctaacccatttccattgtctcagccaccatcgaactctaagccgtttccgatgtctcagtcatcgcaaaactctaagccattcccagtgtctcagtcatcacaaaagtctaagcctttgctggtttctcagtcatcacaaaggtcaaagccattgccggtctctcagtcattacaaaactctaacccattcccggtgtctcagccatcatcaaactctaagccatttcccgtgtctcagccacaacccgcttctaacccgttcccggtgtcccaaccaagaccaaattctcagccattctcgatgtctcaaccatcatcgactgctaggccttttccagcatctcagccaccagcggcctctaagtcattccctatctctcagccaccaacgacctctaagccatttgtgtctcagccacccaatacctctaagccaatgccggtatctcagccacctacaacctctaagccgttgccagtgtctcagccaccaccgacatttcaatcaacctgtccctctcagccacctgcagcctctagttctctctctccactgcctccagtcttcaattcaactcaatcattccagtcacctcctgtttctactactccctctgcagttccagaagcctcgactattccttctccacctgcccctgcgccagtggctcagccaactcacgtttttaaccaaaccccacctccagaacagactcccaagagcggggctgcaagaaccgattctgagccggaggtttcgagtttctggactacttgtccatactgctacgtgctttacgagtatcccatcatttacgaggaaagcgtgcttaaatgccaaactaagagctgcaggagagcttaccaggcagtgaaagttccttctccaccgccagttgccgaagaagatagttactattgctgttggggtttctatccaataggattctcagaagtggtgactaaaatcccagtcactggtttacatactaaaatcccagtgagtgatttacccaaatcagcacccaaaaaaccatctccaaaggtatactattatgacgacgaagaagaagatgatgattcatacattggttctgatcctagtgaggacgacgacgatgatgactggctgatgaatggtacaaaaaggaggaagaatgtgaagcagagtaaagctaaagcaacaaccaaaccaaaacgtcaaaaagtaattgaggttgattgagtaaaatcagtcgggtagggaacagaaaaagaacaacttcagtaaggctctctctgttcttcatttctggctctgttgttgtatttttagttgtagtagtttctgtttatgtagtgtaggcgtgtaggtgtagcgtaatgttgcttgcttccgcggtttccatgttctgcttaggctgggtctgatcggtctaagctattcgggttaagtttagaagtagtggctgtaacttgtaatgttttggtgcctctttttggattaatgtagtttctggaaaaacttgcagaagaatcgttttgatctgggatttgttctcttactgctagaaccaacgaaaagtgaataatccataaacatgttggacttaactggtccagttgatccacggcccaatattacaatccaacaaagtatagtttagttatggcttttttgagatgtagtggaacactgaaacaacaaaaggtgagattggagttttgacttggatttagtttggttcagaaattattaatcggttcagagttgccggtttagatctgaaccagaattgaatttatcaaattaaaaccatcttaatgatcgcatattattatcattcatgaattcgtcatcacctacaaatctgtgattctgtagttgcatgaagatcaatatggacaatggacactaacaaaatagatctttaatttatcatattaaaacaatgttaatgatcataaaaccatatcactaattcgtcatcactgatcacatacaaatctatgattctgtaggtgcatgaagatcaaaatggacatgcaaataagggaccccatttaccaaaatgtcagacctaatcctgaccacatttaatatattaattacttcactaacaattattgcaaaccattcaatggttttttgagtgtccacgttatcatctgcaattacactccttaattattgcgcgtcattactattaattaaatacaagaatcttacttaatctccttttcactatactaataaacctttacaaaagatttgtgttttctctttagtctaagtttaacttcaaattcaactaagctgtcacataatttgtatctgccgacttaaacttgatggctcgttttatttgtaatgaaaatatattaaaaaaaaaacatgtgccataataagtcgataacctcaaaactaagaattatttaaagtttttgaaataaaaatcagtcagtcataatattaatttcacaaataatgagttaataaagtttatttgattaaattatttatggtaattaactacaccttatcatgtatacaataaatacatgtcaatcttcttatattcaattaaatgtggaaaataaaatcaagaaaccttgacataactactcaaaataaatgatgaagagatgacattaacaattggtagcaacaacaatatactaataattgacacaaatcaataatcttcggtcttcgttcaaaaacagtaaatgtttggtccaagagaagaaatacagtttggtccatcaatgctgcacgagctaagcaaatattcagctaagatccgaaatctgaactctagctgtgttaagtactctttgttttaaaatatacttcctacgttctaaattaagtgtcattttacatatatactaaattttgttttaaaataaatgttgttttatatttgtaatgccgacttttgatcaaagttacaactgaatctattgatttagtgaattgacggttattttttgtatattgataaaaagtaaaaaaaaaatgtttcttctctccgttttaattaatttatcattttaccacttaaattttgtctcgttgtcattttagatctttaaggcaaatgtttggtaaaaattccagttttttcctcaaagttttgatatcttgaccaattaaaacatttagagaatatattgagtaaaaataaaataaaatttaattattttcttaattgatgtgcaaaaaccttaaaagacaaatactttaaagcagaggaagtatttgttttcttaatattctatgtattatatcaaaaccttatatggcacttattaataaatggtgagagtatggtgttttagataaaacacacacactttaagaaatttatcttttctttaacaactatcatttaatacttgattaaagaaaattcaattaattatataaaagactgcaaaatacaaatatccattaaaaacaaatatatttacagttaacatagaaatctgtaaaacatcatatatataatgaaaaacagaatctctaaagtatcatattatactataataaaacagatggagtattttttgaccagaaaaaaaaactttaaattttgtatatatcttatatatgtaattgaatactgcttggaaattcaagtgaagagtcaataaccaaaataaaatccatttcaacattttgtggagaaattttttacaacagtaagaagggaaatgacttgattagtatatataaatgatatgagataatcttgttattaacctttgagttggaaccatgaaacttaacatagtattagattctgaacaacatatgttgtcttgtttccggtcgaaaaaattgccgaccatcctactaattgatggtccaatagaattttcaattccgttgagatagataggatagtattatcaaaaatttcataagaatttgtaacatatccatttgtatgaatgtttaagtgtaaacatctgtatatatttttatatgaaacccatggattaagaattattgtgaagctgaaatttattggagttgaaaacttaggtggtgtgtaatgaaggtgagatgtatatgttcaagcacatttaaaacatacgttcccattcttatttgacgtgattattaaatggccactaaatgaacagcgcaaagtttaatttaatagtattattactatcatctttaatttaatcccaactactcatattttgtggagattttagtttcttcgagatcgatcactaacctatcatcacatctgtccaattaaagaggagaagaaacaaatcttggaggcaagtataaagagcctcacaagccagaaagtcacaacactacaagaaaaatcaaaccaaattaaaagtactcatagatatcaaattccaatggattgtgttccttcattgtttatgcctgattcaacctacgaagatggattactattttctgattcttttcttctttctccgtttatatcataccaaaacaatgatgttttccattcgatcacaaacaaaattggtggaagcaataagaaacgaagtttgtgtgatataacatatggtgcgaatgaagccaacaaaaatgatgatgatcgagagagcaagaagatgaaacatagagacattgaaaggcaaagaagacaagaagtttcatctcttttcaaaagactaagaactctcttgccatttcaatatatccaggtaagttatctagtgggagatatttcattatgattagcttgagaaatattttatatttttatctctatatatagtccttaattacatactaatttacaaaaccatttcatttgttaaagtgcaagcgagcagttttctttccattgaaaaggaaagtatatagagaaccttagttttgaaagcttttactaactattcgatcattcatgctttcgtatatacttttaaaacaatttttttacataattaaatctttcgtatatatattgtggtaccactttatacatagaattagaaactcttacacattcgtattaatatctaaaatatataaattgaaattttgacaaatagttttttttttcaacgtagtgtaatactcgaattttggataccacatcaaggaaacatcttcttaaactgatgagttcattcttttttcttaacactagttaatatatccaagtacattcttgaatcaaataattgctagttagttgttctaagcatgaccatatcatttaacatacagggtaaacgctcgacatcagatcacatcgtgcaggcagtgaactacatcaaagacttacaaatcaaaatcaaagaactcaacgaaaagagaaatcgggtaaaaaaagtcatatcggccacaactactactcattcagctatagaggaatgcaccagtagtttatcatcatcagcagcatcaacactatcatcaagctgctcatgtgtaggagacaaacacattactgttgtggtcacaccttgtttagttggtgttgagatcatcataagttgttgtctcggacgaaacaagtcttgtctctcgagtgttcttcaaatgttagctcaagaacaaaggttcagtgtagttagttgcctctcagctagacggcaacagagattcatgcacaccattgtttcgcaggtaaaattgttactaaaaatataaagagaaaaggttacaagaatttacaaacttttgggtctatcatagttgctaatatcagtttttagttcacataccattttatttgctaatttctatacaaattataatctgtttgtaaactacttttgtggttatcaaaaatacaatgaatatacttacctgaaattagaattagataaataaattactaattttctaaaaaaaagttttagtgtttgatcttttcttgccttaattttctaaaaacaaaattgacactaatcatcatttcatttcaaattttcaggtggaggatggcaaacagatcaatattttggagcttaaggataaaataatgactatgtagccccatgtacaagaagaaaattagttactatgacaaatgaaaatattacgtggtttgaaattggaattttactgaatttcaatgtatgcattatttgagttgttagatactaagatcatgctattttagtgtatcggcttacttctgagtgcttagattaatgttacaaactaatgcttgtttttcatttttttttttgtaaaataaagtttgtttttcttggcattctaattatgatatacttcattttaattactattattaaatagaaaatatatgatcgttacaagggtgtatatatagaatctctaaaatatggataaaacatctccaaacatatgcaagtccaatcttagtaaaaagcttaggaaaagtggtaattacaagaaacatgagagattcttgactggctagttggagatatggaaatgataatcaattagtcatttgctcaataatttctttgggattaaaataccctattggacaacaatttttccattaacattcctttaaaaatcggtcacaagtgatttttttgatagatataaaaattgggaccttgctaaacttgtaacaaaatcatatcttaacatgttaggtacgttcatttttgaaatttgaatgaataattaaaaaaatataatttgtagctttctttagatatcatcatattcttcaatagatttataagttttaggagaatgtcgacattatcctagttcgaaaattggttgtggagaatagtctaattggtctttggtccgaatacgatacgtggtgtcaaaacatattccctctcataatataacaaaagaaaagaagcaatctcattattctgccagtgattaataaatgaagtgatatgttatcaactagacaccttttgttataaatttgaccaaaacaaaaaaaatgaaagaaaaatatatgaagacattagaaagtaaaactaactaataaaataattagaatgcgaagggaggcacagaccaaaacaaacatgaacgcacgtccattacttacttgttcatactcttctttcatagtgtttctcacgttgaaaccaattttttcgcctttcatttcagggaaatttttttaagccattgtattcattatatatatgagatcttatgcattagtaagacttggctttacagagagataataagagtaggcgccctcaagaaaacagagtaaaaatggatcaaaatttgtatcgcaagtgcctggttattttatcgatgatggcaatgatcggcacatcaatggctacatatgccgggaccccatggcgtacagcctcagccactttttacggtgacgacaccggcagcgcaactatgggtaaagtccatatacttctacattgtattgtatgtagaagtagaacacaaactatatatgactcgattccatattatttgaaacgattgtttgtttgcatttctatgttttaatgtactaatcatatatcataacataaaaatgcaaacaagatgaaacaattatggcttatttataaatacatgaatctttaatttcgaagatcattaaaatgtactgacaatttttaacatgaccatgtatatcgatcaggtggggcttgtggctatggtaacatgtatgacagcggctacggggtagccacgactgcgctgagcacagccctgttcaacgagggttatgcatgcggtcaatgtttccagttaaagtgtgtgtcgtcgcctaactgctactacgggtcaccagccaccgtggtaactgcaaccaacatatgtccaccaaattatggccaagcatccaacaatggtggatggtgtaatccgccacgagtccattttgatttgactaaaccagcttttatgaagatcgctaactggaaggctggtatcatccccgtctcatatcgcaggtaatattcacatttcattagagcattacaattatagaggtagattgaaaacgtaaagaaatggtttatcttaaccatagtgaaattatatatatttatagtcaaatattttgaatgatatcttgtttgaatgcaccatttgcaaatgctaaaatatgattatgtcgatatatatatgcagagtggcatgtaagaagatcggaggaataaggttcaaatttgaaggaaatggatattggctacttgtgtacgtgatgaacgtaggtggtccaggtgacatcaagaccatggccgttaaaggtagccgcacagggtggatcaacatgagccataactggggagcttcgtaccaagccttttcttctctctacggtcagtctctctcgttccggctcacctcttacaccactcgtcagaccatttacgcttataatgctgctccggcaagctggagcgcgggcaagacctaccagagcaaggctaattttaactaatttaggtcatattcaattccgagaaaccggtttatttgaatatacggttttgccatttgttgttgagtccgatcgatcgagaggttgatcctttttttctaatgaataactccctttggttatatggtagtcattaattcttgtatatccatcattgggttgaggaaaatttgttgatttttatgtgtgtttaaaatttttgaattatcttctcattcatatattagcatcaaaatgattgatgggatcattggtactttttttcttatcagaaaatgacttttctaattcaagagttatcaataaatatgacataacgattagacgatatgatcatgattcgccaatgtatgatactcacttcagtttaatataaagatcgtttgacaaattttgatgcgaattaagagagtttgtatacaataatagtacattcttagaaaataattgctgttttataattctgatctatttaatacttaaaattaaatttgactagagtaaaaatgaaaaatttgtaaaagaacgttatacacaaacattgaaacgtcagttatttaaaaaatagaaaattatatattctataaaacgtacactttactcaaaacaatctcacgccgcctacagtttcataccccaagaaatcatatggagtagcataaaaactatatacatatatacataaatatatctatcaaataaaagcaaacctgtcccttcaatccaaagccttcaccaagctctaaaaagaaaagagaaactcatttctcatgatcgactcttcctctacacttcttcatcgcatcttctcatcacctcaacattcaaacgtgaacaattactccaccaatatcgaaaatggtaacactaacactctatcctccctctattcaactaataataatcgtattattcctcttccttccctctcatctagagggttcgacttctactactactactcaagaagctctcaatgaatcctcaaggcttcttgatctcattctaagagattacactctcaacttcttcaagaaccaacattattctatcaagaccggtgttattcggcgtgttcatctcccgtctgactactccggcataaaacttgacgccgttaggttccggtgtgggagtctccgacgatacggagcaaaaatcgaagaattcaatattggcgttggagctattcttgagccgtgtggtgaacgtcttttggttgtgagacaaagcttgggatcaaagtggtccgatatatattacaaaaactatgatctctccggttatagacttgtgtctccggttctagggctcttagcttataacgcattaaacgatgttgttttagggaataacgtgagtagctcttatcagataagtctcctcctagcccgtactaaagatccatccaacgttgattttgggaacgtttctggaccgtcggtggtagagagaacgttcttgaataagccaatgtgcgctacttttgaacttgatggaaaagtaacgcttgccgccgaagtgaagccgtttgtgtgcgccgttaaaaccaatggacattttggtttagtggtgacggatgatccaaaatcgaatggtggaggagaaaaggagatgaagaaggagaagatcggacggtggaggaaggttgttggagggcttgttgggtctgtgacggtgggggtggtgcttttagggctggtggtggcggctgctgtagtgacggcaaagaaaaggagaagaagggcaaaaagggaagaaatggagagaaaagcttatgaagaagaagcttttagagtagtgtcaatggtggggcattctagggctttcgttgcttctgctacaaggacttctccaggtttcatggaatatgagtttgttcctaattaattaattatatttacgtgtgattccgtttttgtggattgttttcttttttttttcttttgtaaaaacggttttaatttatgttaaaatgcatgttgttgggggttttgggacatatatatatatttcgttggtgacaagtaaggtacgtatggtgatgattttttctttctttcacggtgatgaatttacaaggtaacaccgctagtggcctagtagtaagtagtaactattaaagaaaatcaaatgagcaaagttacattcaaagtcattgataaacaataaaacatggtcattttttacaccaaaaaaaacaacatgatcgttgcctacacgttaattaacgaggcatcaagaattataatttgatgaaatatgccgtctggcgtcttcataagaatacaatatgtttgatgaaaatctacctctaatcaaatggtagtttttttttttttttgaggagtcacatagctaggaaacgttttatgctagtaatatcacacacggaaacaattacgaacccatgtgtacaagtgtttaggctttgagaccttaatgaagtgcccaatgagaattatttttaggtccaccaaactcacaatattatatggcccgtacattaaatcactaaaacttagtatcgtgtcactaatagtatctcattgttctctgattaatggccgcattattataagtttttttttgtgtcaaaagcattattataagttgagaagtcgttttcataggaccacaaattgtttcagatgtgagatgtcttaaatcttaggcttaagagaacgacaattctgtccctcttttctttgttcgaccaactctgtctttgtccctctttattttgtttctttcatttttctatacgaacgaatatttttgatgtcattgcgtaaaacaaaagggaatttgtacataactacataaaaagggagaaatggaaagtagtttttccatattggtgaaggcgtgcattattctctttttcatttaataatatgcaaaatcctcttttaatttgtattttttatttttgtttatagaatatattatgtgctattattttagttttttttgtgtcatgtattattggcattattaaaaatatttgatctaatcctattacgatataaactacatgcaacatatgcaattacaacgaccaaggattccattgttatgatgaaatattattttagtttttgtaattaattgcagttttttttttgcaaaaacttaagactacttggatggctattggctccaatatgccaagccggaggaaaaccagaagatttaagaatatatttttttaaacgatgaagtggaaaaataatttttttaacgtccaacatgtatgttcagaagatttgtaattctgaacggaactattacatgacgttacaaaaaaccatgccacaagagtatccggacttaacaacgtttcacaacacatcaattttttttttttcagttttatggatatttctgaaattctagctaaaaactattagtatatattaaagttcatatatcaaactattgtttgtgtgctatattaacttcatatcaaactaggaaaaatatgaaagcatttttctatctatcaaataatactgcaattaaattatcagagtgttactgttttaaggttatatgactaagaaatggtgcatcaaagctgtatcacattttgtccaaaaaaatttaactgtatcacgtaattgagtatttaatattttaaaagaataactaattatatttgttctttaccaaaagaagaaaacaaatatactatatttctatactattaaatagtattatcaattaggtgttaatactatttgttaagtgggcgttagaggattaggtgtgtctaccggtcctgtcgttaaaggtgggaagatattttattttcctcattctttttcaaaatttcaactaatttttaagttcaagttgttgatcacttattaggtcttaaatcattgtcacgagaaggaaaataaaagtgtttttaatttttattttaagtttacattttatatacatacatatacacgtatttatgatttttgtaaagcacgttgttaacgtgcacttttttcataactttacgtcaaggtatatatcagcatattgtggaatcaaacatatatatagtagcagttttctagactaaagtaattcagattaattgtaaagataacaatcaccgtataaaacaatcaacgtccgtgtgtttgtattcacatatctgatgaaaattagtaattctagttttcagtctttcgattaacaatacaaaaataatactttcaatataatttgatctatgtaaaaataatatatggtatggccggaccagacccgtgtataacaaacattgttttaaatgtattttgtatacaaataagacaaaataatctataaacaaataatgtatatttttagaaaagaatggagtgaaaaacaattaaaggggaaagaaatcaggacagctttatataggttgatttcatctgacaattctctctctctctctttttctaatcatacgaacacaatctgcttcaagaattagggttttgatcagacacaaaaagtatctctctccggtcttgtgtcaaggttatgcaagaagcggcactaggtatgatgggagccaccgtaggcggagacggagacaccgcggtcgtggcggagcagaatagacagttgaaaggtgagatagcgacacatccgatgtatgagcaattattagccgcacacgtggcgtgtttaagagtagctactccaatagatcaacttccgatcattgaagctcagctttctcaatctcatcatcttctccgttcttacgcttccacggccgttggataccatcatgatcgtcacgagctcgataatttcttggtacgtttgaatataaatttattagttatattttaaaaaataatcttgtttggttaaattacttacaagttctgtttctatcttttttcatttgaaagtttttttttgatggtttctagtggactaactttgaatgaagttatgattactaaccaatctctgttgggaaattatgtttcaaacaaattatgtttttttcaatgattttcgtgttttactttttacaagatcgttgggagttttatcgatcgaagatgtaaaccttttgtcaatatatcaacaatttctataaattttataattactaattcctcttgtgggaagttatacttcaaacaaattatgtttttttccaatgatttaagttattggtatttttttacctgatttttgtgaagaagtggttttgttcaactttcatggaaatttatgtatcttcacacgaatgttcaaatgtataatacacacacatagatgtagatatggttttttgtatagttaggtgctaaatttcacatagagtgagtcaatgttaaatgtcattttgtaattaaattgaaattctatttaaactttgaatattatcatgttagttacgattgattttctactccgacctaaaatttgcaattgcattaaagttggaattgatattgcaactataattttggaattagcttgtgaaatgttccaaaaaaattcggttttatttatatttatttaagttaggtagaaaataggactatataatgatctaaccgctcaaaacacaccacaccagaagcacatatttatatgtgtgtatgcatatatgtggaaaatgtttacacattgaataattatatgaaatgtgagaggatatataaaacatttaacaattataattaattggaaacaggcacaatatgtaatggtgttgtgtagcttcaaagaacagctgcaacagcacgtgagggttcatgccgtcgaagctgttatggcttgccgtgaaattgagaacaaccttcattctcttacaggttcttttcttttccacttttttaatggtattttttataacccaattaaaaaacataacttcatgataattacatgttattatatataccacatagctatagaatcagaaagtacttaagatatatataattaaaattcctgttaaaaattagcgatagttaaaacaaataatagagttaggtatatctaaaggttcttgctgatcataccagatatgaacaactagtaaacatattaaatgtaaggtgttggaagatgatcaggaagagtatattatatgcccacacaataagaaatagagattttatttgtgcttatatagttatattatatgattagtctaaagatgaaatttcttaattatacgaaattattaaaaatatttatttttgcactgatgaccacgtaaagcgtgggatgtattgattaggattattgtatgcgtaagggcatatcaggcttgagcctaagtttgggcttgggcttgacgtctaaatcttgtagtttgactgttggagtaacatttcgtttaaaacgttctgtattcttgtaggagcaactttaggagaagggtcgggtgcgactatgtcggaggatgaggatgatcttccgatggatttctcgtcagataattccggcgttgattttagcggcggccacgatatgacgggatttggtccgttgctaccgactgaatcggaaagatcccttatggaaagagtcagacaagaactcaaactagaactcaaacaggtataattaactaatatgttatgattcacaatagtaatacagttattttactatttattttcttgttatgacgtttgtttatttttcggataagggttttaaatcgagaatcgaagatgtaagagaagagataatgaggaagagaagggctgggaaattgccaggagacacaactactgtcttgaaaaattggtggcaacaacattgcaaatggccttaccctacggtgagtactctctatattttacgaacaacaaatatagtttccgtctaattgtttgtttgggtttacgttttcatgaaataatatgataatcattataacatgaaacaacaaatgaagatagatatgtaaatgcaaagaaacaatcaagacccattttggttacactcaaagtcacaacatgcattttttttctattcttcaaacatactgaatttgttactaatactcaaaaacactatacatctctctcccgttcaatatttggcacaagccaaaaaggtggactacagtctaaagttgcatgctatagtggaaaagaaatagcctttgacgctatcagatctgcacatgcattggcctctcttcgttgaaactgaaactgattgtttttgttttctttcctaaaatgtcattaacaacaacaaatttataatgtaaaaaaatatgtgtcttgaacaggaagatgacaaggcaaaattggtggaggagacaggattgcagttgaagcaaatcaacaattggttcattaaccaacgcaagaggaattggcacaacaactctcactccctcacttccttgaagtccaagcgcaaacactaatctcttcttactatattagttactacctctacatatattcatactaattacactgctaagacatgcatgatacatacgtaattcatgttactgataataacgaggtgtgatcattaatatcatgtacttacttagcttattagatccaccgactactatatgatttgtgcgttgcgtgattactggttgttactagattgtaattcattttgtttgtattgtgcattcaaatttatctttttggtaagaacactgattttgtaacgtgttttccgtggatgactagaccatcatttggaaatataaagtaatgatgccgacaaaaaaggcagtgttttataaaatataagccatatcataatatctttggaccgatcaatgaaagaaatcgtccataaaaatggattagtttaattccagtttagattattggtattctcaaaaactaattaacgtatagttttctagttctttatttgataccaagatttgtgtaacttaatattttcaaacgagtttacaaacacaactagaccgagaaatagatatatgatgtattcattaaaaaagaaaaaatagctcttgagattgagaacttgggatcttactatcttagaaaagtcaccacatgccgccatcatttgtccactacgattcagacagaagatccgatctgtttatatatatatatataaaagtaaagacattactttatgccttatggtaacccccgattactataacattaaactactaattaatttgacaaaagaagttggactgactgcttaataaatgaatgttagtgacatacgtatatattttcgataacgtgtatggtatttaagggcagggggatttgtacatttggagttttatatgcttaatatatcaaatgttgtatagatccagatctttggtttaaacctcattagtttcgatgtcaaatcaattacaatatatatagaaactttgcaattacaatatttagtaccaaaaatcggtggaattatgtacatatgaatatgatataaatcactacattaatttgtaattgagatgtatctgtatatttattgaaatgatactatgtttaaagggttaccgattcgttaacgggttcttttgctaagttagctctttgatctcataagattcggatgcttaatataatatacgcatttatagtcgataattgtgaattgtaaattcaaaacagtaacgtgttttaagtgtttttttctttttcttcgaactttttaattttcactattaaaaaatagtatgagtagtagttgaccagaaaaagggtggtaaaaagaaaaaaaagagattctttaattaaaattgcaacgaataatacatattttaaattcagacacccaatgaagtggaatctcctttgtgtttaactaataatttctcacgccaccgctttcacagatctctgtctaaaattcagacaacaataaactattttaaacacacaaaaccactacgaaacacaataattcatgtttagggtgatctgtcacatattatattcatatattgaaataattttttgttattcctactaacacatttttttcaatgacatttccacgaaataaaatttataaagtcttcttatatttactgaataaaagttctacattatgctattaaaagtgtataaagtaacaacaaatttatacataataacaagttttcttataaaaatattaatagcatttttttttatccatagaactatttttatcatataattttaaaaacgggataacttgtttattttatgttaaatttaagttaactagttgtataagtactaatgaaaacattttcttaaattcaataacaaaaatttatcactactccaattatctacacatgttttgcttaatttttggtaatgtcacctaaatttaacaatttcctaaaatattcatgaaaaaaaactcatgggtcacaaatctcaaataagaaacgatgggtggtcaaaagaaaaaaactaaaaagattattgcttccccgagaaattgggataaaaagaagcaacaccgatcacaacgtctccctataccatctccttcagatccacacactctctcttatatctctccggcgaaaactttccgatcaccgacaaaaaaaaaaaatggttgcagacgcaaacggttcatcatcaagctcatttaacttcctaatctacggtaaaaccggatggatcggtggtttactcggtaaactctgcgaagctcaaggaatcacttacacttacggctccggtcgtcttcaagatcgtcaatcgatcgtcgccgacatcgaatccgtgaaacctagccacgtgttcaacgctgctggagtcaccggtcgtcctaatgttgattggtgcgaatctcacaaagttgagacgattcgtactaatgtcgccggaaccctaactctcgctgacatttgcagagagaaaggacttgttctgatcaattacgctacgggttgtatatttgagtatgattcgggtcatcctctcgggtcgggtattggattcaaggaggaggatactcctaatttcaccggatctttctactctaaaaccaaagctatggtgagtaactttttacattttcaatccttttatttatgaataacttcagatttgatctgtatctttagtttcttctttgagtaaaccccaaaatctaagattttttagtaaattaagttctgatttgtgtgaattgttgaggttttgacttttgaatgtaagattagctctcaaattgtttcagatgattgtagattagacttgtgagagcttcgttaatttacattttgacccctttagttacttaggacattattcagatttgacctgttgctaatttggtttcaatacttgtgattgcttaggtcttagatgttaaattagcaataaaaatgttccagatgaaatactttgaccagaacttattgattcatataatcattatcatgataagctcgtgtattgactgttggaatctggttttgatcttggtgaatcattcaggtggaggagctgctcaagaactatgaaaatgtatgcacgctaagagtgcgaatgccgatttcatcggatctaacaaacccgagaaacttcatcacgaagattgctcggtatgagaaagttgtggacatcccaaactcgatgacaatcctcgatgagcttctcccgatatcaatcgaaatggcgaagaggaacttaaccgggatctacaatttcactaacccgggtgttgtgagccacaacgagatcttggagatgtacagagactacattgacccgagttttacttggaagaacttcacattggaggaacaagctaaagtgattgtggcgccaaggagtaacaatgagcttgatgcaactaagttgaagactgagttccctgagttgatgtctatcaaagagtctctgatcaagttcgtgtttgagcccaacaagaagactgaagttaaagcttgaaatgtggttttgtaaggtaaacggttcttaaccccaaaaaaacaaatcaaatgaaagacaaaaaaagtttgggtttttaaaagaagtatcttttttttttttgggtttatgggctgaaaaaattgttgtgttttttgtattttatttttttgtttttctttttcccaatgttgttgtattgttaaaataaacttttgtttcattacaaataagaaatgtactattttgcattatttactcttgttaatcaaactatctttcatccagaggatcagaaagatcttagccttggcctaaaatattacatttgaaatctggatcggaacgtaaatatgataaacaaatgaaacattgccagagtttccagcatatgctgcattgttcagctagcgtttttggtaaacagatgaatgtcactactcacttcctcaaacttcagtttccattggtcccggatccagtttgaaacaccaaaattgacgatcattccattattaagatcaattgatttagttggaatctccttgaaatactacttttctttggattttgcaacacactttgcatcgttattgtaagagtgatgaaattcacctttcaaagccgaataacagagtatgtgtttgatatgatcatgcatgaatgtgactacaccatgtcattttttaatacttaaaatcacaatttgacataatctattcaaaaacttcttttaaacattctcagtctcaaaatatgagacaaaagaaaaaagaaaaaactcgacccacgcgcgtctattgggctcagttgtggattttgcttaaaagtggcctaaatccgtggactatagctggcgtttatgacgcaacgcgcaacgcgcgtgaggaccgcacgtgggattttcctgaaacactctcaggttgtgagaatttttttttgtttggtaataaaagttcagagagggttgtttgataaaaagaagggaatgcaaaacttctacatagtccaatagtctgatgaaattcacctttcaaagccgaattacagaatatgtgtttgatatgatcatgcatgcatgtgagtacaccatgtcatttttttatacttaaaatcacgatttcacataatctattcaaaagcttcttataaaacattctcagtctcaaaatatgagacaaaagaaaaaagaaaaaatgaccaataaatgataagaaatagaggattaatttacttataggaaacatacgagttttagttgaagtctagaccattagctaattccatttcttgttctagatttctagattggtgtgaggcaatagttaaaagatacaatacatatagggttacatgattttgtttttctcgaacataacattgtactctaacttagatctagatagatcaacacagtctgttctattcggtcgaattaattattgtcaaaagaatacaaatcatatgttaaaaggagacgaagaggaagagtgtacgtacctttgatttcttctctctttcatgtgtttaattaagctgaaccagtttcagggcaactctcctttggcaggtcatttataaatcgatcatcggaaattttcgatattcatatatgtatgtgtatatttggaagtaaaggacctgccaatggagaggcgccctaaaactagtgagtttacatgtttctcttcatctctataagatccatatgaaggcttgtgtctgtatttatatatatatgcgtgtgtggacatatacatatttaaagatagataaagaattttggacaaggaatattaggtttttccatgatgtctcttcataatgctggacatctaatttttgcagctttttatttatctgaacacatgaggtgagaataattatataaaaagatatgaatgttgaaaaaattggtgattactgtaaaattagtattatttgaaaggtgcaatgaatccggttttagtttgatttcaagttttagttatgcggtctaatttgatacaatttgagcttcagtttccagaatctgtttttggccaaatttgtcttagtagaaataattcgttacaaaaaggtaaaatcgatgcttctttattgtctagtttggtttcattaattttggttacggtattatttatatatttttgggttgtttttcgtaaaactaaacaccttggtacgttagaaataatcaaaattcaattccaaagtgttaagacatatttcagtctcgctactctaaaaagttttgtaaaagatgtgccatatagaccgatagcatatgccgttggatattctgttgtgccatacttactttaaatgaacaagaatagcttcgcagtcccaaataaaactatttctagaagtgaaaaacaaattaattggaatacttatcttgttactttatagagtctaaattcatagaaagaaaatcgatgaggaatatgttatataacccacgttacgagaacgttattttcattatataattgcatttttttatttagatttagattgtccggtaattatgtattaatatgatcaaaaaatttcgatataaacaatttcttgattaaagaacattatatattgtcgatttttgaacatacaccaagattcgaatggaaaagcaaaaaaaatgaccgagtttcattgaatcgagatcaaaattttgttgaaccgtgattaaaccaaacatcaagattatcgacgtgagtattaaaataactcacaacaaaaaaaaatatgggttgaaaaagatgatgaacacaaagttttacaaatctaattagtcgataagaatggtattgcgtcttctagaaaatgtatcttggtaggatgacctcccacgatcatatagatgcccttgagagagacatatacatatcctccaacagcacctattcccatttgacattcgacattttacacagggcgacgagatcgccacaatacgatctaacagacccgatgatgactgcatggtatcctttaaatgaaacattattttctaaaaagccatagtagatgtcatccgcgccaaatgggtgaactgaaaaatacctcaaatccgttaagatcatcaattggcactacatatatgatcctttcactgaagttataggaagggattgaaagtattttcatcaagggtttaaaatccaactgatgataaaactaaataaataagtaaatatatttattagttggaaataagttttaaactaatatatatttatcattttcattggaataacctaatagactattgatatccatttatcttgatgattaaaagcatgtcctaactatacataattagttggaaataagctataaataatataaatatttatcatttttatcaaagtaagcaagtagctagttacattcagtttattgagaaaattaagatcgttacctcatatttttgctgaatatcaatttcataagtgaattaaatataattttcttgataatacaccctccgaacatttttgtagtataacaacaaatagattttttttttttttttgctgaatactattgttcaaatggacattccaagacacatagcagttaagactttaaatctaatttaaattaaaatgtcgatatatgtcaccaacatttaattttggtatgatttaaggttttggttaatcatagatggtgaaacaattgaatatgttagtcttggtctggtggtacatgagattaaaatatctaatttatgtatatgtcaaagtcagataaacagatatatcaacataacccaattggctcagaaaacatgcagagtacacagttacagattcaacaagagaaccagaaatggatgtgcatggactaactggtatataaaagcagataccaaataaaaacttataaatttatatgagaatttattacaatacttcagaaaaagaatctcacaaaactggaatttccaacaaatggaggatttgatattcaccgtatatatacgaatatacatactatatgtattataaaacacatatacacccatatgaattagaacaacaaaaataatcaaatcaaagagaggatcgatcatacacactgttttattctattttgtaaaatttggtagcaaaactccaaaatcaatagagtgagttataagtacaacaagtagcaacgatggagccaatgcagatgacaagtgatggtagaagagtggcattcaggagatggcctcttcccaaatatcctcccaatgttatggttgcatctgccacaacacgagccaacgttccagcttctgttgagagcaatcctccgttgtacgttcctttcgatagccttgatgacattacccgcgataacaacgatagattcacacctaaagaaaccaaaaagggtcattataagtcagttgttcttttaaaacagaacgcagaggtttgtttagtttataccttcgagtacttcagcagcaacaaacattatgagaccagagattacgtattgaggtacagtgtatggaacaaacaaattgaaactgaagagaatcccaaggaagacgatgatctcagatgttagaaggatttgcctgtaagagacacaaattgcaaatcagtcaccaaaaaaatgaatgatatttttggtttggtttgagctcggattcaaaagattacctgtcttcaaacatattactgatgtaacttccgaccaaaatgttgattggtagcaccgtgaggccaaggcaggccaggaagatggcaacagagcttgttgtccaactaaagtagtatgaagtaatgacacttgattctgacagtaatatttccatcgaatatttgagcatgaagtagatcaacagttgaacctgccgaccagaaccgcacaacacagctttcagccagataaaactttaaaggaaatattccgagaactttttatcaagaattcatcaatgtcttaacagatgtttaagaaaagtgatgaatgataccttaacagatggagtaaggagtcggtatgcttctatgaaagaatttgcaggtttgtgagaatcttctggggattcttcactttcatcgcattcctcttcatcttctggcttgattcctgaagtgatcagcaacggcaatcgaagaccttcctcgactctgctactttctactctatctgtcgctgcatcaaccaagaatccattcaatactcgttaataattgttacagacagaaaagaaaaacagcttttactattaataatgacctgatgttgtttcatttcgattgtttttttctccatcctctgtgtcacgcaacggctctctgaatgaaatgcatagccataccaaatagaacagccaagccacagccataacccatcccggcaaagtagattggttaaatgtaaacttgtaaaacttgaatttgatttggagtaaaccggcaagcgcagggccacaagccattccaagagcacttgcactcacaaaacccgccgatgcctgcattcggattctcaaaggcacacaatcgctgatatatctccggttaacagctcttgctgatcccaacctgcaaatttaaagggttgaaatcagttgaggaaaaggtttcctctttgacacgatatataggaaaatgattgaacttttaactcacccacaacagacacggccgagtaaaagaagcgctatggaattggcatcatatgccaacgcatacatcaaatttccgataaagagtgcgatgctgctaaacacaagaggtttgaagtaagatttgttggaccatgcgctgaaataaaccgatgaaaatacttgagccacagccatagatccgatgacaacaccacaaaccgttgctgcagctccaaggctcatcgaatagtcatccgctgtagggacgatgatataagtgttgaccatgtacaaaaatgtgtttcctagattcaggagtaacgaattaaaatggtaagaccgctcatcgattgtatcctctgaaggagtcaccaaatcatcttgcatgataagagcatgttgtgccaagaagttgaggaaattcgtcgagaaggttaacttgtccaccgcgttatttattgcctcaaccactggatcctgtggagttttgaggaaaagattaggatttacaaagcctgtatagaggattctgatttgatatatttgaaatgtagtacctgagccggaagaacgggttggtcataaattgaataaaagcttccttcattttcttgaagctcatgaagattgcgggaaattgctccaacaacagctccaacaccctacaaattccatacacagaacatttaagattcctaacaagaagagcctacagatgaaaccagtgaaagggtggtaagaaaaattcatttaccacatgcttaaaaacttgttgaagctgagagtaagggtgattagcgcgggtcttcacgtaataatcagcgaatctatatccaaaccttttgtcgaatttcttaagtatcttgcgcagaccaatggcgttcaactcaacgaatttcaggagctgaagaaggtctcgtccaacatctctgtatgcttcacgtagctcgaaaattcttgatatgtcaggctgctcaagtatagcatcatgagattccctcaatttggctaatcgccctgaaagcaacccttgttgttccaacatgaaaaggacagttgtctcaatctgcaaacaatgattcactttcaatatctcgaacaacattttagaggagttccatctgatcatcagaatggtttatttcttaaatgtcttatctaattaagagaaacaatgacaaacactggactgagattactcgtatgtagccatatataacctcggagatgcacagaaaataacaattcagtgaggataatactcaaacaagatcatctcgacaattatctataacatacctgagtatcgagcatcctcgagaaatctttgagaacatggcgaggatgttgagatccgccttggatttgttcagcatattgcttcactttcttcttcatcaatttgtaattgatataatagctacaagggaattatcaaaacttcattaggaaaaaaaaatcagatgatcaaaagatatggctagaaccgagatgtcgtaagcaaatgcatacccactccattcttcgatttgtttccgctgcaagtatttcccaaaagccaccatcttttaatcgcagaaagcagagagcaaagtttagattaaagcctgagaagtgagaagaatgtggaaattagaacactttgatatcacgtatataaagattttgctctctgtcaacttgttgaaggaaatagagaatgggtctgtggcatacataatatgaatttaatacaaatacataataatagtatccaaagtcaatgacactccagaacagttttaaatccacattcaaagctcctcaatacttatagttacatgaagatttcaatccaccaatccacaataagccttactcaatggaagctaacaacatttcataaaactcgacctgatcattacacagacaatttcacattttgcaactaatgatcagacagtcacaaagagagcaacatagatagatttcaagagacataagcgataaagcagattcaagggattaacacaaaacctgttttagaaagagtcaaggacaaaagtacaaactgactcaagcacgaaaagatcaaagagcatctaaaaggaattatacctctaaatggatttttgaattgctgtgaatctgattagtgctcaagcacaattctaaaactacaattatagaagccaaaacaagaacgcaacacgttttataaaaatacttataagcaagtcagcgctacaagccatgtgcatagatgatataatcacgcaaaaccagtgaggacaatttaataccaaatcaaatcaaatccaaattcagcttatttctacttcacacaacacaaagcctcaagaacaagaacacaaagcttatttatactttaaaactcgtgcatttcaagtgaaaaagatgataaacaaataagccaaaagcagagatcttgatatataaaaataatacctgtatctatcctcgttcttcctagttcttcttcaatacacaaaagctgatcttgagatcttcttatacagattaaatctctgaaaaaaaatagattaaaataattacaaatagatcagaagacacgagcttagcatgaaggtaataaggcctacacaaaatattatataaatactagatcttagtggagtcaatgatatatgattgataaaaagaagcagccaagacaagttgctttagtagtcacaaaattgtttttttgccaattcagaaaattccacaacttgaaaaacaaatgaaaaacgccaaaaagttttcaactttttctaaaatggagttcaatcaaaaacctagattctcttcttttgtctactttcctttttattctcacaatcaacaacaaaaactcagtacctgaagagagaaacccagttgcaaaaatcgcaactttgtcttcttgagatttagatgaccatcaacgtaatgagcctgaaataaacaaaaaaaaaagagccttcctttatgaattaaataaacagagaatcaaacaccaaagatgggttttttaaagcttctctcaatcacaaaccctttgaatcttgtaagcgaggaaattggtaaaaaggtgaagaagaggagaatcaaaagacgactagtttgcttatagtagatcgcagactcttatcgcgagtaatgtgatcatttatcaatcgcatttactctcggacccaatcattgaggaaatatcaatcaaatcgtggatgctttaagtcctcaaattggcacgtttttgtaaaagggggtttttgcgtgattctataaaacttctatggggtgttttttggttaatgtgtaagttttggggtcaaagaggaataaattatttaagacggctgcatattaataaagaaaactactcatgtagcgttattatgatagggatattatacgtgttgttatagaattacacatgatctaattacgcacatgatccgaaatattattttattcttatgaaacatcctaaattatttacaacctccttaattttatgtgtataataagttgatagctactaatttataacgttattccgatagtgatattatacgtgttctaattacacatgatctaattaagcacataacccgaaatattatttgtttttgagaaaaatcctaaattatttacaacttccctaattttatatgtataataaatgaaagtcatggaatcgtattcaatttgccttcagtttattggtattgtaatggacatgtcatatgtgtaggtatacaatttgtatcgttgtttttttttattttatttttacataattacaaaagatagcgacacaattttagttggaaagtggaatatttaataatctggcagacatttttttcttattgcgtatgtgcgttagtaatttagtatgatgagaatgtggacaaaattataatgaaaaatagggttggacaaaaaaagttaccaagaataaagagaaaattatatacacatatttggccacctacaatacaatgcttttagtataagttacctaaaatattcacaaccgtgatttcacgtgatactcgtttttcaaaatatgaccaaagttgatactcgttaaatttgctaggccaatcatttcttttgtttccttatcaatttatacatgtattatagctattgatgcatatatgctactttcgtcatggtgctattacatgtgtattttgcatgtttctttttcaattagtgtgttgcatctaagtatgtaaccaaaaaaaattactggtgttaaaaataaatgaatacgtgtaaatctacaaagtactattgtgtactaattaatacccaatagtactttgtagatttgcaacactccactgagacagataatttaattggcagcacatacatatttccaaaattttatctagtaccaatagtaacttacttagtagtgtttaaatactcacttgatcaaactatagaaccaaaagtaacttaacgacactttaacaaaaaaaaaccgatattttatctgcagttatatgattatgtatggtgtcagtcagatattctcctgatttaatagaagtacacaaaataaagaatactatattttagttgtttaggtaaccgaatagctgttgcattcaagaatcacccattcacaatgtccatcactacggggttacttcttagtggttagaacatttaaatcttatcttttgatttgctaaggttctccgatcgcgaagaaaagaaaatgcttaagctagtggcgatatgtattcacgacatgtgtaacttcactttctagacagagataaacaaacaaaaaaaaaaactcgtttaattaatattttatataaaagtatcataacaaaagcaagtgcatttgtggacctgtgtaagaaagtattgagtagtacactatgacatgcaactctgtagaagctacatgaaatatctagaattttttttaaaacaatatatagaattagtgtatatcatcataatattgtttaaagttgtttagaaccaaacataaaaaagttataattaagtcaattgctgaaatggtgattgagattagtgttttttgctatgaatataatatcattaataaatgagatgtttaggtattaaagagagtttttacctacaaatttgttaccttggcaaaaaaagctttaaaacaaagtaacaaatgattttagtacaatatgagtgaacttactgcagctataagagcattaaccttcgaaaatgtttcctgtattttcttgaggggtgatgatagtgttggggattttctctgatcaatacatttgaagataatatgtggagatatttagattagtattacttaaaggctttggttacttataagaatcataagcaaattgcaagaaaactaatctaaaccggttaagagaaagaacaaactgtatgctattgagaaccgatctaaaccaggaaaaaacagagcataaccaagagaactaagtttcacttctcataaggaaaaccgaagatgtaataaggatcatttgcaattgcatgaagacggatataaacaaggtaaagaacagaaacataaccggatatttcatagtcaaaccggaatttgcatggtttacatacagaaacagaaacagaacagaagcctcctttgccagcttctcgttgctgcttccactaagtaattaacctttaagcctttaggtggaaggcaaaaggtattacatagtgaaaggagcaaaaagaagcttagagcaaagccaaaaggcttttcccctatatctatctaatcactttttaaacaaaattacacacaacttcatacattgttcgatattataccgcagaagagccagtctttttttttactcttacttggctgttcacgggttttcggagaaaccaccggactcgagtgtaccatttttaagatactttgacttgtagaagttcattttctttggggcaattatctttgttgctcccaagacacacttgtggtatgagaagtcttcgaatgtcccgtctattcttacaacctcgaagcaacaagaatctccgtgcttcgatttagcgacctataaaagaaacatggtcaggatctttatgtctttaaggattctgaaacatatgagccttgatttacccggattcctttgacgcctggtccaattttctcaacactgttggggtgcaactgcagaaccatcttcacaagtccttcgtccctctcattcaacagttcattgatctcgtaactaacaaagattaagccattgtaatttgcatcagccaaaaggaagaaagaatctttacggttttttgaacagtagaatcttacctgtggagaatgcgtttcaatgactgggaaagcaactcgatgtttttccatgtaaagatcgttctaagcagtgacataggaatccctttcccatcgagtaccttgatatctttcaggaatgcggaatgtagcaagccaaaaggctggaccgtggctttgtctgatttaggcgcagagtttgttctacgcatcgtctttgtactactcaaaaggtcatacacatctaccggtgtagtaaacccgtgaacctgatggcatgcataaagacacaaattagaccactgaagttatgtggtctaaacggatcaaaagatgtaaagttaatttacctttggcgaaatgatgatttcgaactgatctccagttccgaaaccaggaacttttccccaagctaaagcgtcgatagacccttgaagatcgtctctgacaccttccttagcagctttgagaaagcattgacttgggctctgcagagattaagcaagcactaagtatcaaatgaaatcctatataagctttgtataaccaaaagaaatgggattttgttacatactgagaagcatgcttgagtaaaaggtgcaggcgtggactcgacctgtctttgtttactccaacctttggcgtttaatgccacaaactctcccgtaacagagagactatcagctacgagaagcagatgctctcttagtatctccttaccagtatctgacaccgcggactccaaattctgcggtcacaaaaaaaaaacttcaaactttagaagctgcgagagagaccaagaaaatgttaaagaaaccgatactgactgctacgaaaatgctgcgtccagcatctattccataaactgagcagcattgtcggatattatcaggatggcttcggccccagtcaatcatatccatgatgggaaggcaggtttctaaaagagcggtccaacagtttcttttgccccgatctccatacattgtaaccttcaagtacagctcacccgccaaatgattcccattcctttttggcgcttttggtcggtcagtccacaaaatattcacctttttgatcccttgatcacctgcaaaaacagatgatagaactcataagaacgataataacaaaacaacgatctgttcagcttgctcgtctttatttttcatccggttttacctttgacaggagagtcaagaagaaaagggatcaaaacgagacgaatagcatccagttccaaaaccgagtgctttgaggcttcaactacagtcaccgtgatgcaaacgttatcatccttcattgcctgatcgtctgaagagcagtggtttctaatccacaacacataaatgtataacaaatcagtttctaatagacataaaagcgaaacaaaacatgtctgctacaaattcaagaatgttcttacgtgttttgtatatctaagtcaactatatcaagcttcagttctctgttcctgctcttgtactgctcgtttaaagatgaaacaacggattctgcgctcagttgtttccgcttcagtactttctgtgaaattaaagaagaggttcattagaatctgtacacatatatatatatgtttgtggctttatatgggtatgagtttatacctcagagatatgaaaatggcaaacccacgggcttaacggtactttcgtgttagaacttggagagaatctatgaaccaagaagacaataaacatttgttaagagaagcccttaaccaaaaagattcatatagacagttaaaagttaccaacattatcatagatgttgaaacgatctctgagaaactaagtttctccaagtggttcttgatctcaagtgacccgtattcgaacccgtgctttttctttgaaaggtattcagacaaatacaaagacattgtctgttctcgttgacctttctttgatccacactccaatacattctgtagaaagagataaaatctagttagagaaatgcaaacgacttaagtggaaatgattcaataaatcaagaagcgaagaataagaagaggaagaccttaagattcagaagcggcgaagtttcaagaaggctgattggctggtccagcgcgctgtaagctgcctcagataatgcacaagcagaaagtgagccaagtgcctcacctgtgatatcttcaacgggaccatcagtctcataagtaaactggactaactggtttccgaaagaatttctcacagtgccatcataagcagcgtatatgtcccgcatgaagaacattaatcttctgctcagtgtccccgggagatcagcattaccactgaatgaactgtcacgacttgtaactgaatgaacaaaagattccaatggattcagacccgttagaaacgagttctcaatgactccataaggaacatatgactcagtagtggtactgtcttttccctttgcgccacgaagtggactgttcgggtcattccaagcagcgcaagtcagttcacgcggaaacccaaaggacaaagaaactgctgaattctgcagaccgatacacatgctgtgctgaaccagcttcccgatattccctttgctgccggctttcgacatgatcaaaaaagagttggattgatcaccatacctatatgctagtgcctgaacatctctgtaagcatccttaaaagcactgactgcaagttcgcttaatgtagcggatttttgtctctcatagcagaatcgggccaaatccgatactgaatcctcttccttatcctccccattaactgcaaggaaatctctccaagattcaaccattagctgttgcttgttgcaaacttgctcagcttcccgcaacccgtatgatatctcttcagtcaagttttttcgagactgcagatcagaggaaaggtacaaatccgccaaggacacactcaaaccgcgcatcagcaaccactgagatagcatttcttgagcggaatagatgatatcaagaactttccctttgtcgtgtttgagcaatctctcgatgaaattcccttctccatctctgagccaagcagatccttcagagaaagacaaaagctcgccgttactcacaactacattattcagaggataagtgtagtcaaacccgggaggaaacagcattccgaatagctgcattcccgtccattgaggctcagtgctcgaaggagaagctttgataattgcaggcggaggaagctgaaatgggcaatacatttgaagctgctgcatctgagctcgattaagataacagttcttctcaacattgaccagataagccgccgtcaagctatcttgtcctaaagaaagcaagttccgaccattctgtctgttgataagctgcttatccaaagcaacaagctcatcaagctcgacctttgcttgaatggactgaggaacgtaaccgtggagacaatctccatcaaaatcaccacggaacggcaaacagcagatcgggttcaaggagacaacagaagtcgttgggaggattctaactgtcattgcaataagcgaatgctgatgaatcgaaggcggtctgttcatcagcacagtgtctccatccattaaactccggaatattttgtctccggtttggaggtcattgacttgaatagccaccaatctatctcctcttctcacatgcatctctttattgtccaacagtgtggggacaaaggaagtgacaagcctttctttattgcactggttgagatgctctgatacttgaagcctttttgcgatactctcgggtatgccaatctcgttgagcttcaaggacggatcaccaacaactactgtccggaatgtatgatcacttcttttaccgagcagcacgtctttcatgaaccttagaccgcaaagttttggtgtatcagacttcttctggtacggatttgcggaatctttactcgaagacacagtttccgaaaagagctgtgcaaaaaacaagaaatactactaaccttcacagaacagaaagaagagtttaaatctatcaggaaccactaacttactctggaatattgcatgcattccatcacacgagaactcaattcaagtgtgtttccctcaaagccgactagtttcttgtagatccgagtccgttcatccttcaaaaatgtgacagaaactcgaaaagataagagaaataccatagtatatgataacaaattatataaacaagcgtttttagcttacaaatattagccgagctccgttgaactgatgaactatttcggttacacggtaaccatttggtgtaacaggaaaagatgtcagaccaagagagttgaacatagggatatccttcttgatgagcctctgatcaatccctaataacagagcataaacctgcaaaaaggtgaaattttcagaaaactatatatagtaagaagtcatggagatggtacatttcactcttctatacctgtgcatgcgttattattcgccttgttggtttcaaacagctctcgtcgatattagagtcttgcggcaaaaaactccaatagtcaggaggcaatgttaacactccccgtttcttgagtttcatcagactctcttcgtttacttcaacaacgattccggatcgcctgaagacttctttagtagttaccctaaacttcattagaggataaccggtattcaactgatatataacaacaacaaaaaccgaaaattagtgttggaacaaagttttaaactgagaaaattagttgcaatcatatattcttacagtgcagtatctacatctctcaggctggtcttcggtaatctatatcaagcaaaaatgacattagtatatgtagttccaaaacacacaaaccaacaaaggatttggaaagactagtgaacctgaaactgcttttttcgaatgtatttacaccccggacagattttgtttaacaacgcagctacctccttgaggaaatacgggtttattatcgagtacgcgaagtttataaccccgaaatgccctaaaacagagagaaaagtagcaaactcagggaactaatcataaaatgagctaaaagattggaacaatatttgccaaaaccagattctttatgataccttcgcaaacttttcgatctttgctgccacaggttctgcagacagaatccggattcggtaatcctagccgagaatcagtcacctgattcggtgcttcaacctctagcacagacattttatcctataataaagtaccattacattaaatatttgctccatctactcataaacaaatcaagaagaataaataaggacaacacttactcgatcattgttgtttgaaatgctaaaacctatcgaggttagagttcccacgggaacctgaagctcctcacaatcgtcttccatgttgaagagtttcctacaagaaaaaaaaccatcagtaaggaaaatttagatacgtaagtaaaaacatcagtttttataagcaagttttagtgaccaattccaatgtgcagaatatgaaacaaaaccaatatttagcatttagacagacaaaaccaaaaaactcgctctgaccaatactaaccactgagaaacagacaacttcacaaactatctctgtgagtggccacttagaatctagcatatatccaaagaaaagagagaacatgttcagggaagaagattctagctcaaaaatatttgacgaacacacaaaatagttcaaactttgaacacacattattgaaaattaacacttacttctgtaacataaaacagagctaaaactcacggataaatcgtcgaaaagatcagtttctatctgtaccctctatcatcaaatctaatgtgcagcagaatatgaaacaaaaaccaatctttagcatttcattgaccagaacacaaaaaccaaagcaaactctctctgatcaaaaaattgaccaaagagaaacagacacttttgttaagggacaaaagtgttaccacaatcttcctctgtgactggcctatcaaaaacaagttatagattcgaaattgaatttactaatagaatctagcatgaacccaaaaaaataagagaatacatgttcagaaaaagaagaaagaaaaaaaactgcagaacatacacacaaaaaggttcaatctttgaacatacactattcatggattaaaaaaaaaaaaattcactgaccaaaaaaaaaaaaggacaaattttccaaatgttcttctaaaggactcacacaaacccttagtgcaaaaacattcgccgccttaagatgatctctaaacgaaagaaatcgatttctcataagaacatgcataaaccaaagtacttaacttttcacaatcatccaaagtaaacaaagttcatagaaacaaaatcggagttcaaagacaacgatcgatcaaatttaaacaaaagaaccgtgataaggaatcagacacagtgatcaatcaaaaaaaaaaagaactcaaattgtttcaaagagataaaaagaaaattaccgaaaaaggttttaaaaaaaaaaacgaaagaaaaaccagaagagaattgaggaagaacaacaatgtagttacttactcgtttcgtcgaacagagaatcctcactatgtaatgatccaattgaaacagtgcacagacaaaaacttctgatccttagctccgacggaagatgccggagaagaagttgaagaagagactctaaagaaagaacaaaaaaaaagagaggaaaaaaaaatcgaaatcggaggcttttgagaagccgccgtttgtattcccaaaggaaacgggaaaaagtgagaaagcagagaaaacgaaaaaaaaactcttctctaagtccaatggggactttggaatgtgagacaccaaaaaaaaaaaaaaaagaagaagaaagagtgtaaataccgaaactaccccttgacctgtacctctatttacctactttacgagtacaccttttaccttttggaaatctttttacttcctcggttgtattattttaattactttatgattttctgtttctgcgaattttaccttatttgtataaactctgaaactgggaagaaaagaaaaagttgaaatatccttccttaagtatattatattagctgtattagttttttacttttggcctaattttaaaactgacaaaaagttattagaataattaatactttttattagtttaatgtaatatttaaataaataaaaataagtgtataactaaattttcatcttagcaaaaaaaaaaaatcctagtggtttttatttctagcttgatttttggttcataactataatatgaatagcgggaaaaaaaaatataatttgaaccaaaaacaaattccatttcttttcttatatgattttgcgatttttctaaatactagttataatctctaaataatctaaaattacataattatacgaatttatttgtgaagtttgtgttagtatcaatcaaagtatgatatgtaaaataaaattttgttttacgtatagttgaggctataaatttgttatctttgattcgaaacatttatatttcgttaaaatatatttttgttcgataaaaaaattatgtgtaattaaaatatattttttgtttgaaaaacaattacaattagttagctgcttagacaattatcatataattttataagaggcgaaatgtgataaataactaaattaattgagacaaaaatagattaaaatttataagatctagaatcttatttgagagtatgtgaatgtccattaataaatcaagatatataagtgaaatcagtttttcttgtcggcgacgtgaaattagattcttgtttacgtgaagttcacgctttcgtttgtaaaacagttacatagttagtttagtggttatttattaaaacagtttaacatataattattactaaaatatactccttctatttaaaattagttgtcgtttaaggttttttgtcggcggcgtgaaattgaatttttgtttacgtgaagttcacgctttcgtttgtaaaacagttatatagttagtttagtggttagttattaaaatagttttgtttaaaattatttgtcgtttaagattttttgcagtgaaaataaaaaaaaacaattaaattttctactttacccttgttcaatatagtttctaaaaaaattattggtcaagacattaatactcacatttttattaaacatttgcattaaaaaactaaaaacgataattattgtgagattaaatttaagtgctaaaatgataattaaattaaaacaaaatgagtatttgttttgaaaaacatgtagtagaataaactagacttaaaaatgtcccagtaaattttcttattaaccttataaactgtaaacatttggggtagtctagttaataaaactatttataatgccagaaataaataaataaaattgtgagaaaaactattattgagtttgacaacttgatgacccattatgtaggctcacatcacctgactagacactagactactaaaaataaggatataataaattttcttcacctatgattgaacaaaaattaacagttgcttttcaaatccaagcatgtttagaataaaaatttcgtcgattaattcattactactatatgttaagttaacaatttgaaaataaggtttgtgttgattcgtgatctctcatttacagctttctcctgaagtcttcaaagaatcgtacaaaggtcgaagtgtgacgacagcagtcaaagaggggtacaactgtaaactcatcattttgtgtgcaatatattattcttaactcaaaattatacgtttctttgttcgcatttaaagttgcatgcattaaaacgtttggtttacgttaaaaataattaagctattggacgtttttgataatcattttttttcatttactacaattcatgcacgagtctggatttgttaattgtaacacggcaactacaatataacacatcatcatgaaagctacaaagtaaaaactctagttctcaacaagtaatgtaaccgtttgtaatacaagaaatctttgctttcatatctaaattttgtttcaaacatatcacttcaccaaacgggatcatacattcatacattaccaaaaaatttaacttcaacactaattttctttcaaagtggttaacttagaagactaacaatcgtaaacattagaatcggaaaagatttagacaaattcaatcttgatttcattcatatcttacttgagaaaagtcacaatacaaattaagatgcgtaatttctacgctgctttctttcctttttgcattggaacctgatcaacccatcaacatgaatcgacaattggtattcattattcgttgtattattattctttgattcctttatttttttgcctaatttgtcaacttctaaggtgcgttaatcaataccgaatttcaagcatttttgaatcatttaccgtttacactgattcatgaaagaaagacaaacagtacttgtattaactacgaaacaaaatttaaaccaagattgaaaagtaagtaaatttatacttcgaaaattgtggaagtaaaacaaaaaaaaaaaaaaccaagggtccgctttttgtaaagcgacctataattttccactagaatctcatgttctgatgttgtaggaagtaccttttttttagtttcaatatttttttctttttatcacaacttgtaataatgagattaagattctggttgcactattaaaataatgatgtatgtatctgtttctgactcatcgtatggtattgttccctaatccctatcaaataccactctctctgactatatatatgcatggcatttttatattcacatagataaggacatcatttttgtaatgtgtttatacatagactatgtcacaatttaaaaatggaaacaacttgaatttgcagatatggatcgaatatctccagtaagaaatctacattaacgagttttgcagaatgcagagtactgctatacattagggagatagaaaaatgtttgtgtcagttaatttttttgaaatatcgttgtaacttttagccaatcctctcatgtaaaataggcaaccgggtcgtgccattggcaataaaagttaacttcatgcatggtcctacttctgcgatacataaaactaaaaggattgctttaacgagtttgccaaatagccgcacgagacaaggaacttcgctttaataatttgtccgccgatgaaaaatgaataatcaaagaagttgttttcacttattaaaaagttttaaatatagtattagtattacacatcgtcattacttgaaagaaaacaaatactatagtattagtaacaatgtatttgaccctaccaaaataagaaaagtacaaatgtatttgattttatatacgagggaaacttgaagagtatcggattaatttcgattagttcatatctagtccacttaattaagggcatttcccttcaaatattttgtcttttaagttggttactcgcaacgtggttgcgtgaaggcagaaaacttacattgtcatatactgtctttacatatatgaaatcttaataagaaagcaaaaaagagattaaagtttttttttttgttgtcgaagattaaagtttttatatgcatggaaagctagctaatattttaaaagtcgctttatagggataagctttctgcaaatggatttttccgtgaaagttatacttaatcaaaaagatcatatccgtgagtcgaatacttaaataagaccacgtttgtcgttggtatagtgatccgtttgtgaccattggatcatagtcactggcaacaacaaaagaggaagagaaagtaaaaaaaacatcaatttttttttgtaaactttggaatgagactttcgcatgttagataaactaatgtggcgggattctttttccgtttattacaaataaaatatactcagaatattttctaaccaagaaaattacattgtatgattctactacatgcatctcgaccgattcatggtgatatcatatgattttactgcatgatctatcgatcttaaattcttaattaaactttatagctactactggaaaaaaaaaaagatcttaaccaataatgggatttttccggttatgaaaaaaaatatgatttttcttgacacgatagtacgaatacgatacgtcttgtttttgtgagcatggtatagtacatacaactctggtcaacataatatgggttacatacatcccattattgtctggaaataaaacagctttattatttataagtgttttcttttcggatttgccattttatttatctgagaaaaatattgaattctccaacacagctcaggaaagctgaaaatagcaaagaaacaatcagaaagaacccgatggaagagacagggatagagaatccatattttctcagtaattaagaaacaaaaacaagaaaaggacaaaactctcgtcttcttgtgaattatgggcctttcaatttagaccttttatttagcccaattgagatttcaaagcccactattgagtgttcttcgaatggaatctgaaccaaagatgttatttgagttgttgttttgtctcatgagttattgacttcgagagagagggtttcaaagtttttttttttttgggatgtatattaggtaagattgtctcaaatggcaacaacatttttgattatttcttaataaaacttatactaatacaatttggtaaatacctaggaaactagataaaccaaaaaataaaacacatttaacatataggctggacctatcatatctatgcccatcattaagcccatttattatgcatacatacacatacgatctttggttttttaacacatacgtattttagtaactccaaagtgacaaatcttcgtaacacatttcttcgtccacgtacacactcgtattcatatcaatgtacgatcttggcggcgacatcaacggctcctccgcgagcctcatcatcattccagcgactccttcatccgacgtgtcaaactcactggctgagggtaaaaccgtaattcctgtactaaactccggcggcctgaacatctccgctgcttcggccgccgtgcgcctgatcgtgtccggatcagtggatgccggcaccggcaacctccaagcagaatcggagaaattcaaacacgcggatctcccgcgcagagcaagaaccgccacgtcgtgagcacgtgcggccatatctgccgtcggataagttccgagccagactcgacgctgatgaatcggttcacggacttcgcatacccatttgtcgccgtccctacgccgcacgcctctgtagattgggtgacgtgtctccttgaaaatcctccgtccagcacgcttctttggcttcatctccgccacggtgatatcgtcgttttccatctccgatctggttctgctgaaacagagtaaaatgtcaagtaaaagtaaaaaacaaaaagatgaaagtttctttattctttataactctgttaaaaaattaacagagtaaaatgcaatataagacagagaattcaaaatatcaaagaagacacttcacaatggtgaaaatgtataagaagaaaagcttaaattacctcaaagggttctcgaaacagaattgaaatgaagctttgtgttgtgtgttgctctgttttgtggtagtgaagtagaagagtgaagtgagaagagatatataggcgttggttggtgggaaccacaaagaacgaatcgaacgcgcgtaatacatactaaactgattcacttttagttgtggatcattgccatgctggcaatatatttttttgctaaacttgtaaatatcataaaaatgagattaggtaatataaaagagtactaaagaagactaaccaagccaaaaagaaataaaaacaaggttacaatagagctttaaaagatttgggaagagctaacggatccaaagcaccataagctcccgccaacgcttcctatgtcttctcgacgagatgacgttgcgaacctcacgatcaatcaaacgaaagacccctgagacggaaagccgaagggaattgtgaagaacattgtttcgctgcctccataggctgtatacaagaagctggcaatatttaaacatccttttttttatattagctgtttgttaataatgttttatatgtttgatagtgatttaaaattgtaaatcaataaatcacactattttttgaagtgaaaaataattattgattttcagcaaacatttttctgtgttatatactctgtaatatatcatagaactgaatgtaaaatgcttttcaaacaaacttggaaaattattgacaataaactagaaatattttaagtttctgttattgttacacgattagtctttacgagtttgaatttgatgttttatacatcactttatttattggaaaattgaaaattaacattaataatcacagaaatatttgatccattatttttattttgattttgtatcaacaagaaataatgtttacataagaatttaaaaatatcatggaacaatatgagacaagtacaataaaagttaaaaaaaaaatggtggagcccttatatatattttcctcgtgaaattgaattttaatgcgttttttggattgggtgaattttatccacgttgccttcttaattaaactagctgcgaatatcacgtggggttagcgtgggggtaacatttcttttattaaactagctgtgaatattcagtttaagacttgagagtttgaagggttcttattatatactctttctttgtggctccgagattcactctcatggtaatcttacttctttgatccgctttaactagctgtagtgtatgatggttccgtaggcactcatttcttttcctaattctcatgtaatcgtctttattaagaaaaatgaattcagaaactaaaaggaaattagttggcattttaactagtagtatatattgtgaacttaccgtcaccaacagatgattgggttacgaaatctatttaatataacatctgaaaaaattaaaagctacatgaagtcgtaaaacgttagaattgatctaccatatttgcaaccctatatatatactctagtgtatacgaaaatacctatgaaaaagatgtgatgtgcatgaacgtctcatatatttcatttaagtttcgttgaatttcttaatatttttgttcagtaatgaatgtgttgtaataaaaacttgaatcacatatatatatgttttactgttttagcctttaatatttgtcaaaacgttttcaaaaatgtcaaaactatcttctgtttattttaatgttaagtgttattactttctgtaagtttcttatttccactgaaattaagtgacaacaattttagagaaatcgatcgatatcctgcaattcatctaataataataagataatcatgtatatatgacaaaatgagatgagttatagaaagcatatatggcggggtcgggacaagagcccaatcatattttgttggagtaaatgcttaatagttaatactgttaagttgagttaaacactagtcatttgcgcgtctgcttcacaaattttaattctttaatctttaaccgttgtagctctttatattgtaatgtttatttcttgtataaaatatacaaagtaattaccctatatatccttaagaaaagaataacactatatccaaacatggttaattaactctactggttgaatgaaaaaaaaacaaagttcagcagaggatgatttgtgaggtgaggtcactgtatagaggtaagagtcagtggctctcttggttattgagttaaactaaaatggatggtttaaactgcagaaacacctagtcaataattaatgggaagatattcatatgtgtgtgtattaacggctaatgtaacattacaccggccgggacaatagggccaacgaaccctcgcgaaagatatatatgcccaaataaatattgggctattgggcctaaacctaaatatttggattcagatttatccagaccagacccatgtattttgtatcttgccttcaattcattttcttatctaatgccatgtgtttgaattacatgcaatataaccatgatggtatttgtaccattgtatttcattttggctgaatcttgattgtatctgcaaactaattcgaacatgaaaatgttacattgttctcatgttttctatgaaaatctattggctttagatgtgaagagaagaaaatcgcctgtcacatacatatgtctgtatccattttaattgactacacaaaaaaaggtctgaaatcaataaaaagtttaaacaaaaataaattaaaattgtattactttcttacagctattacaaaaaaaaatccccaccaaacacaaacacaaacaaaacacacttttgggaaaccccacgcaataaccacgcactctcatctcatatttaacaaccttaatttctgatcacataaaaccctaatctatttctatccatatctctctccctatatctacttatatataacaaataaacacataagttgacatatatactatatacaagtatattaattatacatatatggctgaccctaacaatcctatcactgaacctaaagctataatccaatcttctacttcatcgtcagttactattgtgccagttcccacgtgcggtgacagcctctctgactctgccacgtgtgaaaacccttgtccacttgatactatcactactactactactactgtttgttttgcggctccttcttctactgcaagtggtaatgatattaatactttaatggccactgacaccgacatctctcgccggaaaaagaatccggtttatcggggaattcgttgtcggagtggaaaatgggtgtctgaaatccgagagcctaaaaagactacacgtgtctggcttgggacttatccgacgccggagatggctgctgccgcatatgacgtggcggcgttagctcttaaaggtggagacactctcttgaacttcccggattccctgggatcttaccccattcccctttcctcttccgcagctcatatcagatgcgctgcagctgcggctgctgcgactaggggtgcggctggagcggccgtgaaggtaggtcaaaagaaggaagataaagtttatgatacggcggaatcttcaactatggggtttgtggatgaagaagagctattgaacatgcctggtttgctagcggatatggccaaagggatgatggtggctccaccgtggatgggatctccaccgtcagatgattcgccagagaattc

SEQ ID NO: 31 - DNA, 100512 bp, Arabidopsis thaliana
gaattctcagatcgttctagtcaacaacattcacagattgtaaatctttgatccgaaaagtcaaaacatttaaacacgtacatatatacattcgcagattttcaacacattttggacaatacccatcaacgaaactcaaatgggttctaaggatttctgaaaaaagttagattattagggggaaaaatgatcgaaagcttactcagaaaatctgcgtcctcgagacctttggcgctgacaagaacaacttcaagagttccatgaggcatttttttttgtttttttctcttgtgatctttttgttttcaatttgaagattcagatcccaagagagagagatgcgaggcttttgtctgatttgttcgatcgttttgagcacgacaaatatgaatataatggggaatttaggacatcgctgtagcgcgtgggcgcgtgtaactaacgctcagtgccagctttcttttccttaattagtgtaatgaaaaatagttggtctttgttgaaaacttagttagatgattttaataatttcaaaactttgtgtcaaacttgataatttcaaaaaattatgatattgttacagtcctacagatgttatatctttcctaatgagacttacaaattaatctattaataaaatttgatttattaagatttttttcctcttctaggcttctagcactgttttatgttttttttttatgaatgatgaatactagtattgaataaaaacatagaaaaaaaaatactaatgaacaaaaatcaatcctatgattttatactttttatagattattcataaggaaaagcacaatgattttgatataccaccaaatcaaatcttaatgacaggatctcttagataggccgttacatatattttcatatattgcaatgaaaaatagtaaatgttaaaacataaaactttacaaatttggtcaatttttttttttaaattgttacaattcttaatattcataaatttagattgattaattatagtaagaataaatggatgaaaaattggcaattgaaattaataaatattatattctgagaaataaattatgtgtatatgtacatatgctaaaaggcaacaaaaaaataatctaaattgaatagtttttcaatatatttttcttttcttgactctagttaaagtttacattgaagtcatttaaatctagctacaaatcttaatttgatcacttttcttgttccaccgattaggcttttttttgttaaaacttttttacatcttctttataacaatgatatactacgttttactctagttcttttggacaaacaaccttctttctgaatatgattactgtacagtaatttgggaacctaaacagtactaatttctaaaaattgatcacgtaaggaaaagataaacaaacacaagagagtaggaaaaagtaaattgactcatggcgtaattgaattgtcaacataaaagtcactgatataaagttaactatactaaagtagctcttgtgcttgaaccaaacatcagcaaaaaccataccttaaaatcaatctgcaaaaaaaaaagtaagagaacatcattagttacataaatgaatctaaaaacaatcatttaacccaaaagtaacggaaaagaaaaacccatgaaacaaaacagagatgttagaattgaaaacaacactctgtccgcaataaacaaagctaactaattaaatctttcgtctcttcacatttcttgtgggatctttcacacttttgacgaaatttaagttgaatacttgtatagttctactaaacaacagacctaattaacgttccaaaaacaaaactattatttcccatataggtttcttgcaaagcaagcaatcagtctaagaaattctttgggctaaggagtggaaaaattcatgaatacatgataaatagtaccttcaagttcattgattatcgatatgtctcttgaaataagcagccagtttatcaagatccccaaacattcttttcctgaacttgaatcccttagggtatagaccgatgtactcgtggtgcggatttgcggatcgtatgtaagacaatataaagctccctggatgttcatgagaaacaccaaaactgtaaactaccattttcggattcacacccttctcaacccgaagaagatcatctatttccgattttgtcccagtccgaaatttccggtggtttagcattgtcataagatgagttaccaaaggatcaacataccgatccattacctgaaatattgaaaacgcataagtattttcacttgtaccaaaactgaaattttgtaagaatataaagacgaacctcatctagatcctcgaaggtttcattcccaattttcagtgttttcccaatacgttgtaagctcactatatctttgttctccttctcaccttcgattatctccttgttagcatacacattatcagaaatcttgatcatcaaagtcaaatgattcagtcctcgtgagcttggacgaacaatgctttctccaatattcttatcagacaaatacactgttgcttgctcggcagtgatgttctgaaaccgaggatgaacaatcatccgagacttaaactgcttcttttctttaggaactttctctttctctatcaggacactatttcgtttctcctcgtggtaataatcatcgacatccccgagattcctgtgctttctcatttcgctttctttgcagacaagtaacacatgatacctttgctttagaatcgatttgaccttgcaagtaacgatatcgccttcacacagtttgttagacaaatcaacgatatctctaccatcatctgagtaatcttccttcaagagaatcccaggtaatccacaatctaatacacatttggctttaccacttgtcactttcttaacagtggcctgcacaatcctcccttcaccaatagtttctttggtttcacctgaaatcatataaaactcctcatctgaatcaacctctttaaacagactccgccaatcctgaaatccacagcttaattctctcatgatcagactataagtttccttcttattctcttggttcttgcttctcaagtactcatcaagaacgattttcctcaaagaagctggctcatctctcacatgctctatcgccatctctattgcatcatcctcatcacctcttacagtatcatgagcataaacatctttcgccaattcttgcgcaagaccgtatgattcgggatgtattctagtgtcatccaacagatcaataaattggctgctactacaagccaacccgctcctacgaatccgtaagaaaccagctgcatttacgaatacctttttaccaatcccatgatttatcagttccttgcggacaaatatcgaaccagctctaacaagagacttctgcaaagatgcagctttcctaggaccaagacctgaaacaaactgtaaaggagaaaaaagccattcatggctcgcagccagattaatgtcgattccaacttgattcgttatgtcaaccataacttgttcaaccatctcatacttctcatctggatcaagaaaatcttgaaaagaatgaagcttccaagacagaatatctctacctggaccgcataaagttgagatcattgctaatggattctggagataacgtccaagagaaactgcgcgtttcacaattcctgcttgttgaggtagttgttcacttgagattctagaattttcgtatagcctaggaagagattcatccgcataaaccaatggaaaatcataaatcctatcatctacataattcaacggcagctcttccaccatttggaatatagcctcataaatctcatccttcaggcgtacacaactcaaattaacagctgctaaagccaaaacatctggttgatggtctcttataaactttagaaaacgatcttgatccatttttttacgtttctggtcatttacatcccgagaccgcaatccaatggaacctgagtaaagcacatcaaccagctctcctgatgaatcaagcatcacaaatgtagtttctggatttccaggtccccaacaacaagctaggaccctcggtgcagcttcctcctccgaggtattattattccttcgatatggccctgaagacactttgttccataaaacctgtccatactctgaaagcaactgagtcttcgctctgctagttagcaaggatcttgcttctttctccattgacggcaaaacaaaaccatgaaccgcatcctccagtatcaatttcctctgctcgttccagagttgagcatacttactaacaccaacacttagatagtgttcactgcattcactaattatcctattcatctgattctcaggcagcttgaaagttacttgaagaagcttctcctcttctgctttctgaatgagaagccattgtacaccatcaaactttctcaatggcttctcgcttaaccacttaaccgcagaaaaccgatggaaggaatctataaccacattcccatctggtgttggactcgttgagactactgcattctccataaaaattccacgaacatactttctaatcgatggctcgcagcttatctcaaccgcagccatatgccttgcacctttaagaacagcttgagaatctccaaacattgcacactcatagttcaatgccatctcctctggtgttttctttgcatcttcaagctcatcaacaaaaactttctcaagagacaacgctagtcccaattgctcagcgctataaccaaacttgtttgcaaattccttaatcccaaatttgctgcagatgctatattgcgatttcctattcggcctcttgtactgtccttcatcgatctcacaatgaggaaaatgcaagttgaactttgagtctacatcatcaacttctctctctgtctccgccgcttgaagagacttaataacagattcaaaaagactcttattcagatcagacatgcaggtttcttcttcaaaacgtttggtatagtaaccaaacaacgcggttttccttttccgcagaagaacccactttctatccaaatcttgaatcatccacaagactttatgccacttggtctcaagcttcttgtcaagattgaaatcactaccatcatgatcatcatcagaactgtccaataaactccgacactgctccttccgatacatagctataaacggtatctctaacttctgcacatgaaacatctctaaaaacttcacaatgtcatccttattaatcaaacaaccctgcccttgttcttgaagcaatcgagcataaatccagttgctctcttcttgaatgctcatgtcatctagggaaacaattccaatggcttcttcaaatatctgcattctctcaggaacatcaagcttcctaatttcatcatctttctccgtcatatacttctcagagagaaccattggttcaaactcatcttctaactttctttcgatcttttcgttatacttcaaatcctttttccgaagtttcaacaattcttcaggatcaccaaatacatcattagcgtatcgtaaagcgttcgaatcagttccttgcttatatttcattttcttcctcctcattccttgagcaccatgatcatcttcatctacaatgaagtgactcaaatcatcatcatcatcatcattattgatcttatcctcttcctctgaagatttcttcaaacgtttatacttgtttctttggaaagtgtcgttgttatctttaagaagtagataatcatcttcgtgaagagtaaaggattcgtctttcttccttcgacttctactctttttctcactacaatgtctctgttcttcttcttcttctccatcatcagaaccattcactaaaaacccatcgtcaaactcatactgatcatcttcgtcttcatcatcttcctcacggttctccactggatcttcatgaatctggggctctgtctcaaaaacagagtcgaatcgttagaaaaataataataacagagaatttagggcttttgaaagcagagctttttatgtaccttcgtcgatcctattcatgactaggttagaatatttagctatacgaaatcgatgaagatggagatcaaccctagaaactctgtgatcgtaaaactagtctctatttgattctgaattttgcgaagagaaacaaagaaaaaggcttttcgtacttctagggttcacaccagcattaagaggctactaattgaagttttgaagcatttcttatttttaaaaatatttatgaaactctttttttagctgatatttaattaatatatttggtatttttttcgattcattaagagatttatttttcatattcatacaaatttatattgataattcttttttccactaattttttcattatataaactaatgataaaatatataggtgaaatatatttttaaaatattaaacctataaaaaacaaagaaattctcgaaaactaaagcagaatctaccgaaaacacttaataaaattcatagcacaaaaaaccataacaattaagaattgcaaaacaaaaaaaaaaaaaaaaaaaaaaagatcaagcaaacaacggaggatgggataatgaatcctaagaactgaaaaaagtaaagaagcaaaccagaccgacgatcacttgaatcaatagaaaccgagtttgagccaaagacaagtgtttagaagagactgctagatcactagaagcacgaaccaattagaaactctagcacaaacagcaccaaaccggaagcaaacgccagactgatcaaaactacaacgggcactcactcccccaacaccaaaccaaattactattgataatttcttatatcacatcttttgaaaaaaggatttaatttaagcctagttattaaggcgcttaacgttgccaaaaaaaagaaattattctataaaattaatgatttttaatttaaaggttaggtgtttctctagacttaaattattttcttacacgatagaatacttagaggttatttctatttacgaaaaatgagaaaaaaatggaaaaaccaaacggactgaaatcacatggagtttgtatatgcattattaattcatgaaaagaagtgtcttgaattttcaaccattttacttttgaaaatcacactcaacaaaattagcttttggtataagtatttttttttgttgagaaattcgtgaagacgtgtcgttgggtgggttccaatagatattgttctaatattggctaaaaggtgtccaaaaatagagtgattctgcagaatatattagtataatcatctccactggataaccaaaaacaatattgtttgttacatcgtttctcttttgtcatcttatgctatcacatgatgattttttaaaaagtgatgcaagtttgtaaccctctatgttcacatgctacgtacacgcaaattttgaaagcacggtcattcaagaatgcaaaacgtgttggtggtcgagaaggccgtggacccgtggtcattacaattactcaattagtgttttctagtaatttagaatgcacatgcactccccctctttacttcatcttctcatccttatgttgttattcagtttctcgattagctgtaacactaatctcttcgctctctaaaccacatgacccaatccaaccaaaaggttgtggtcttgtaacctggcattttaatttgaagactttttatcagaaaaaaaatgcaaaacgtgttgtcttcatcaagaatgccagattacaattagtaatcacctaaatacctatcatcttggacatcaatcaattttctgttttatgttctctaaccaattaatgccttgataatttggagaatttttttttttggtgcaatgcgtttttcgtgaattggaatcagacgttgtcaatttaaaaaaaaaaaaaaacatcggaaatcatctaccgtagaccattataaattaaatatatttggaaaattctgtatgaaaatttaaatgcattatttatccgaaacaaatagtgagcacatgttaattatattgttgaagaagacctcttatggaagttgaatttctcttgtctaattgttaaactatgattatatccaaaagatatctaagattatgacatcatcttttatctaccacttgttcatacctatgaatcactctttgaattccttaaaactcttcataatatattgtagtaaataaatagaaaggtgaaatactcctttgtaaagttttttttttctttttcttttggcatcgatatttaattgacccttagttaatttctagttttgacatccctcatgtctccaacgcactccagagaccatagttaaagaaacatagaataataaccaatttcaaaatcattctagaatataagaaacaaaaacaggattttgctacaaatctatgatcaatccaaaagctggctatatattatacggaaacaattacttttgcggattagtataggtgaacatcggtgaagcttagtccgaatgtatcccaagacatgatatcttagagcgccacatgtactctagtataagtgaacaattctaccataaactatgaacactaatttagctcactgctcaccaagaaaaccacattggatatcgcataaggtcctatgccaagctgcaaaaatcatgaacataagagaacagattaaaagagattcgagagtatattaacataaaggaagagatgaatcaaaagtaaacgacgggtttaccttttatgtgtcttggaagatccaacgcatttgactgacaaaacaatcaaattttaccgttacaaaagagagtcatatatgcagaggatgatccaaaagagaaagaattatacaaatgcacaccgtaattgctgattcataaacaaaaatgtggcctaatagaaggattacattcgtcatgtagaaagaagagaacaacaataatacctttctgatagggctttggtctgcataatatgtagtcatccgtaacatcataatcatggcggaccctagtttgaaagagctttagcaggttatcgtaaggatctctaacctcaaaggttatgaaatacattctaccaggcccagtacacatgtaagtattggctttgacaaccttgagaaattcatattctgtaaactgttttcacaacaaaaaaaaaacaatttcatcagcaggtaaaactaaaattgatcaaaacaacaacaaagagaatttgaaagcagaccaattctgaattgtagttcttaagggagttttgagacagcctcttgagtaactccgtagtggtttctgttgccaaagaatactctttatagtctaaatcgtctaaatcaacagggcggtaattgaacacagagcgaaactgtgtgaaatcgatgtcaaaaccctaaattatataacacagagaatcgacaaaaatcaacatcaaaaatgaagtgatgaattgaaaaagaacaagaacaagaacaacaaggagaagaagaaccttgctcttcttcacttgtcttctcatcataacacactcttcatgtctcgtgtacataggctctttcttctcgtcccatcgtatatgcggaggaatcaaattcacaggaaacgaaccaacctcgtaacacagatacacacgtcccggcattggagacctacctgagacaagcttatccgagtcagggctatacacaaaattgactatatacaccaaaccctaaagcaaaattggattcgcaccgtctatatgaacctcccccatcgctcctcacggatcaagttcttgccttgtgttgaagaaccctaatttctagttttgtttttatattttctatattaaaaacattatttaatatttagttaaagaaaatttggccaatgaaaaagtttactgcagaatataaatagtcactaaagttcttaaatttaatttttgcatagcaacttgatatttttcttcaaaacatcttatattgtgaatcaaaaataaaatggctaaaacatacaataatatgaaacaaatggtgtatacttaaagtttaatgaaaaaatcaataaaagttggctaagtattttacccaaagcaaacttgaaatttatttcaatagttaaaataattcagttaggaataggattacttcattttcaggcttcttaaggattactccaacaacattatctcccactttctaagacatagcaataaagacaattttgtatttcattggttatatatgcataactttcaaattctcatatgacactagctcatatatcatatacatttcaaaatcatagtctaatatatgacactagctcatatatcgtattctagtttttgaagtatcaattgcactttttactaacgttgttatttgaataagattttttcagaataaagttttcgatttggtagtagttgtacgaaattaaaactatgaggtcaaagaatcattaaaaaaaaaaaaaaaaaaaagagacttgagtaaatagaaagataaagaagggaacgcaactaaaatcactttcaacaaaacgaacagaaaaaagttagggtttcgtcatctcttcttcaacgcaaagtgcgatctttgatacgtgaagagggaggcatgggtgaatcattcgaaggttttgtttctctagactctaggatttgtaaaaactcccgatcaatcaattaaaatcccttgatttcgatttgttatctcaggctggaatgcgtggctcgaagatgcatatttgctatgtacacctgaagatcctgagtgcttgaagcatcactatatcacacgaactgagaaagacgagcctcagtacacagtagatgaagaaattgctatgatgaacgaacaaatcacgaagagcgaggtttttgagagtatggtttttgtttttgtttcaaagttgttgtcataatgaagtattgtaggttctgtgtgaattaggggttcgatattgatttctcgttgttccgatgtctgttcaactaccatcttgttgaccccgatgatttcgatttccttgatgatgaatcagaagaaaccaacggggatttcatgaagaggttttctcaagaatctcttaagcgttacaatgacgaatgtgtaagaaaataataatccatttacgttcctaatgttcttttttgtacacagcaactcaactgagctgaatgattccttgtttgaaacagggtacgaacaaatatgaatttcacgaggttgtcaaagccaattttcacggatcttgtggatatatgtttctcatcacgtttcaagtgtttgatccatctgatgaccaggaaaaaaccttccaagctaggatccgttacactacacattaccccactgaattcgtcttttgtaggccgaaaccgaatccagaaggtacaaaaaagttattgttttggatacttgggttcatagcaaaagcataagtgatgcattgtggagtatatatagttgcctctttctcttgtttaaagatgtatatagcttgtaaaagtggttattatctctggttgttgacatttgttttatttttgattgatttgccagttgactctcatgaaactgccgaggaagatgtcaaaggttgacgttgacgttggaatcttggattgaaatacccattcaaaggtttcttttgtatagtgctcaggaccggtggtcatcagttttctaaacccaaatttacttagccctatatatcgttaacaagcttaagatagttgttttgcttagcactatcattaacaacttaaaaaattgttatcatacaattgaaattttttatcgtataggatttttaaatttaaagtttcaaaaccagtaaacagaaggttgaaagaattacaaactttatagagaaaatattttaacttcataaaacttgacaatttctttatgatggaagctaagacgtttgaacatagcaataagagaatgccgtatttcattggttatgcatagcgatcaaattctctcgtattaaactaaccataatgtgttggagaagaccgtggcgacaactggaggagaaatcggctgacagtgaacatcatcgagcagacttgtttcggagatgaatgtgtggagaaaatagaaaaagtgtcagaatttttagaccaataatcgattactacttactattgttattgtaattatcgaaattcgacatgttttcattgtagtacgtatatctagctagctcaaaaactgtacttcaaattcatatactttttttttttttgtcgtatgctagtttttcgagtattaatttaaagcacttttaactaacgttgttattttgaataagatcattttcagaaaagagttttcgattgtgtgcttgtatgaaactaaaagtatgaggccaaaaaaacgaaaaataaagaagggaaacgtaactaaaatcattagcaattaagtctttttttcatctcttcttcaacgcagggatgggggaaacattcgaagttctgaatgcaatttagtttctctaaaatctagggattgtaaatacacagtgcttgttatttcgatttgttatttcaggctggacttcgtgagtccaagatgcatatttgctatgtacacctgaagatcctgagtacttatattcagattcaacgcaaatttagaatctaatttggtaaaattgattcaaaaacacatggtttgaaaatcaagtaactttttttttttttttttttacaaatttactgtaagccgtgatttcacccatggatatctgattgatcatacgctcattattctacatggaaacaagttttcagttttcactttatgtctttctctaatgacgcaattctaaagacttcattctttttgctatggggcttttacttggttaaaatgtaattgggctaaatccaaacacaagcatgggttttatctcttactccgaaaagtaaaaaaaaattacaaacttttttatagaggaataataaaagataaaatacatcaactagaggatattttctatttgtcgcaatacaagacattaaagttgtagtatttcactagcaatgaaagatactttttcgtatcataattttatccaatgcactttttttttttactaacgttgttattttataaaaagaaagatttgagaagagagagctttcgacaatcgacagggtggtagttgacgaaactaaaagtataaggccaaaagacaaagaaaggataaataacagcgacttgaggaaaataaatttggatattattataagagagttccagaagaaggtagttaagagcatctccaatggatgcaaaatggagttctcattgttggttctcttgaaaaaagagttgaaaaataaatcaaaatggattaaaagagagatagctgtctctcttgagagagtttttgagagagatgagagacgatgacgtggtgccttatcattggtcaattgtttttaacaaaaaaagcaaaaaaaaagcgtgaaagcttctcctgattctatcttgatcattgtttctaatcatgtcgatgttttgacttacattgcttggaaactctctggttttcaggtgaatcgagttcttggatctggtatactaatcttctcggttccgattcttaatcgcagatcatctcgatgttaatgctctagatgtaaaggtcagcttctatctaagggatttgtgtaataaagctgtgctttttttagttatagactgcgattaaggagtgattagcttgtttttatatggtttagtcattagtgtgataaaaatctatgcttctgttgtttaatactgcagctacagaagtgtcgaagagtttcacatagactttcatctcaaatacttatggttctttgccttattcgttttcaggttatctttgtgtgaagaagttgcaggtttggtttgaaaaattgcagcttttaattttttgagttatagattgcaggttttggtgaactaatttgcatgttttggtttgagaaattgcaggattctgcaaggtttggtttaagaatacgaagcagcactaccttctttccaataactgaaagatagtgaagatggaggttgagttgtaggtttcatgagttgcaagtgtttaatgagttacagttttttcttatcaatgatttgagactttgagtagttgcaggttttcaatttgagactttgaattcatgtatcaatattccagtttgttttctgcaatgtttcagccatatcttaacaaagtttaaaatcttgaggtagttctttgtgaggcagaggaaattatttcaactcagatattatcagatgcaaagatgacaactaatctctccctagagaccgaccatatcatgattttattacactaattggttgtttaacaacaaaatcaacagaatttttcacactattacaacaatttcaacatcaaacatttcaacatttcaatttcaaaatcaatagaatttttttccctgagaactccacaaagagagattaccattggactttacaaaattaaaaaaaaaacacataagttctcatctcttcaaattcaaaattttattcttaaaaaaatggtgagaacccaatagagggctctcactattggagatgctctaacgaatctaaaatcactttcccccaaaaaaaataaaaaaagggttagggttcttcatctgttgatcgacgatgtgtgatatcgatggaagtacgatttcgaatttcgttaatgttaagtttttaaggtttataatttaactctatcgattccaatttacaatgtctcaggttgggttgcgtggctcgaacctgcgtatttgctgtggaaacctgggggccgtggctatgttagaccttcatgcatgactaggacggaggaagataagcctgagctcacaccagaggaagaacttgcccttatgaccaaacaagtcaatgctagcgatgtatgtgttgttcccctaattacttttggtttattctatttatttatgatcctaataacaaatcacttttcaggggtttgatatagatttcagttccttcctctgtgtattcaactaccatcctgctattctccattctgatcaattcgctgacgatgagtttgatactactgaggatttactcaagagccttgctcaggaagctcttgatgaccacaatggcagacatggcacagagtatgagtttgttaaagttgttaaagccaattttcactttgcttgtgcgatgatgtttctcataacatttcaagtcaaggatccttatgatgacatggttaagctcttccaaacaagggtacgccacggtaaacatatcactactaactatgtcttctgcagacctaaacccaatcaaggaggtattattatataaaccctaaactcaatttcttctcttgttgaaacaattggttgtttctagagattcacatatatagtatttgttttgatagtgaaatactttggaatcaagaaagttgtcaagagagatattgagcaagttgtcaagagccatgttcccaaagatgtcgtcaagaaacaaaagtaagtgatggaaacatctatcaatttactttgcttttctgattcttgtatggctgattttcttctctttacagattggaggatgagcctttgtgtgccacaaggagttagaatgcagagatgctgaattgtttttataatctatttgcgtcctagatgatgtgactttagttaattacttatgggagctcttgtgttgctagggaatgaacttattatatattgtgcgagttttactgttttcatttatctgtatcgttcattatgttttagaatgaatcttactctctcagtctgaattggtagcatagcttcttcctatgtcttctgattttgactggaaacgaagagaatacaagaaaagtatgaatttctctttattgctctgcttaaatgtcaaaactctatgaagttatgtgatttatctttactctgtaaaagttttaatttcgcgcaaccttttgttatgggtacacacattttctatgtaaaatgttggccgatattttttacaaatttttaagagcttctttaaaagcattttgttcaaatactatgagtgttgtagtctagtgcaaccaaactttagacttcaattcaatttaactcttaaaaacaataaactaaggtgacatgggattttttgctattgtaatggtatatatagtgagtgttatatataggggtttataatatcacaaagaaaatgtatattaacacaagagcatctcccggttctcactccttgtggcatatagaagctcctactccaatctgtaaagtgaaggtgatggtgattactcttaaaaaccatccatacatacaaggaatcttgacatcaaaggaaaaaaaacactcttgcagttaaatctttcgattacctcttgttccttgacatttgtttggacatctttcccatcattgttcttcacaccaatgcattccactatcaaacaaatccaaatactataaatctactaaagaaatagccacgaaaatatataaagaaggaagatcgaaagcttaatccatcttccatggtgggtgaaagaggcaaatatatattccacaacgaattcataaaaaacaacaacaacgtaactagagatggaaaacaaaacaagattagagatacctccttgattgggtttcggcctgcaaaagacgtactcagtcacgatatcttcagcgtggcgaacccttgtttggaagagtttgatcaagttatcataagggtcaacaacttcgaaggttatgagaaacataatcgcacaacaaaagtgaaagtttgctttcacaaccttgacaaactcaaattgtgttctctgtttttcaaaacaaagagagaagaaaagaatcaatttatgtaaatgtgatgaaagcacaaggcatatacaaaggttagttctcactgattcttgattgtagtcatcaagggccttcctagagagcctctcgagtaaatctcttgtggtttctggctcatcaacgaattcatgtgaatcgagataagcaagatggtaattgaatacacaacggaagtgtgtgaagtcgatatcaaaaccctgttgtttcacaaactctcaatttcacaaatttatttatagagctcattataaaccgaaaaaaaatcacaaggataaatacatcgcttgcaaggatttgtttgtcgagtaaggcaagttctttctctggtgagtacttaggctcatcttcctctttggtccaatccctatacgctggtctctcatagccaggatcctcaggtttccacagcaaaaacactggttcgagccatttgatccagcctgagacatatcattggaattgatcgggagagagtatatataataaaccctaacttttagggaaacgaatttcgaatcttaccttcaaattcactcatcgccttgtgcgtacgttgatgtcttgatgaacagaagatgagccctaacttcgggaactctataatgtcccttttattttactcaagtcccttttatttattgatctgtcttcctttgccctcgtattgtttgttttgtaagactaccccctcaaaaaaaaccggtactaaataagagctagtttttttttatgatgatgagtcaatccaacaattttcttaagtttttctatttgttattaatattattttactattctttttgccacacaattttaattccatatactactctttcttaaaaactaaacttatccaaattaaatatctcaaaattttaaataagaaagcttttataagaatattttagttatattaaatgtattatgtttttctattagaaaaaaaaatgaaacaataaaaatatgtagtatatgtatttcaacactaacaaatgacttcatataatattaagttttacattgaaaccacaaatcaataagcctaaacttagaatgacgtaaatgcaactttattttataatataaattaataagatatttaaaatttaatttaaaagtttatttatagacaaaaaaatggattttgggttttttatttatcttaaaattaattttaaaaacaatattaattagaaatcttcataattttgattggctacaaaacatattttttgtaaacactaaaactgctttaagaactacaaccattcaatgccaaaataaccaactgacgtggaagattctcatagcaactccattgcacaaataagttgagtgtcttcctacacttaaaatcttttatatttaattattaatattttataaatttaatattttaatattgttaaagacatcttctttctattgtgcaatgaagttgctctcaggaccttaagttaacgtctccgattccaccatctcaaaatggatattgtggtaatactctagtagaagcctctatttcgtcctatacggctatatctgtagctataagatagcaacattggacgaattcgggtccttaattaacttcaacattcattttgagacggcgatggtggaatcttctcataagctatatcatttcagacatttctaagcttggtttaattattaccttttcacaatgcttactttcactctttttcttagccaacaaataaactatcttgtcttttcctgtaaaatatgttttcacttttttttacttgccagttttcaataacgatgatatttgtttgtctatattattgaagttaattttttaatttttttttaagagatgtagtactttttgaaaactcgcatttgtttacatatacaagttattgtaatggtatagtgagtattataatgggtctttcgatcttggtcattctgtttatgaagcttttcacaatcttaaaaagggaaattcggattgagctagacgaattgacgtggaggagaagtcgaaagcttctgaaatgataaaaagggtttgaataatggtgattaataaattataagtagagaaagagaagaaaaaaaaactaagcctttttacacgcctgtgacttgggttataagcaatcaacatttcgtttatctcaagccaatgggaatatcattattgctacatccgtccaatttgtggtttggtctttgttgcttgacctcctactcgatcgtctttaaataaatgagcaataaaagcttttatctcctaaaaaagtttgtcattttatttccacatatcaagttatgtttcctgtacatctggacacatttacaaaaacaccaaaaaaactataatattaaaaaaaattaaaaatgtatatataatattttctaaatgatcaaattttaaaaaataccaaaaaaatccattaaatccttgttgactattattgtaactttacaaatgacaactcaacacctcataatatttggttttagactctttaaatccttgttgtcaaaaaaaactatctaaatccttaattatctattaaaaaattaggaaactaaatcgaattacacactaagaaaaaacaataaacaaactttaaatatcccacttttccctctaatccttgtggatttggtcataactcgttatccataaacccaaaaatagcaaatgagtcatctctcttttgttccaacaagatcttttttatttggtcaaaaaggtgtataaagtttgttataacaagttagttatataaaccctcacgaattcaagaaaccaatcaaaagcaaaaaagctttctctttctctacctttttccttaatttcacttttgcggcgtcgttcttatctactcacaagaaagcaaccgatcaaataactcccagaataaagaaagactcaaactttattctctctctctttcttaaatagtgaagaaagcttcgattttgggaagtgggtttgttcgaaaaatgggttcttctgtggaacagaacattttggtgactggtggtgctggattcattggaacacatactgttgttcagcttttgaatcagggttttaaggttacgatcattgataatcttgataactctgtcgttgaagctgttcatagggttagggaacttgttggtcctgatctctctaccaagcttgaattcaatctggttagtaccacaaaaaagcttcgatttttatattcatatggctacttttagagtaatcaggattgtatttttatgtatagattcttttggcttgttagattttgattgttttgattaattgcagggtgatctaagaaacaaaggagatattgagaaactcttttccaatcagaggtaatgtgaaaatatttgaaacagagattatgcaattttttattcaggtgagttggttttgatattatgattctttgtgtggagaaacagatttgatgctgtgattcactttgctggtcttaaagctgtgggagaaagtgttggaaaccctcgtcgttactttgataataacttagttggaactatcaatctatatgagaccatggcaaaatacaactgcaaaatggtttaagatcaaaatccttcacttttgaatatgtgttacttgttctagtttagttaccaaactgttctgactcttgactttatatgcagatggtgttttcgtcgtctgcaacagtttatggtcaacctgaaatagtcccatgtgtggaagactttgagttacaggctatgaatccttatggtcgtactaaggtatttcacacctcgaatctcttttgttctgttttgtgttcataatcttgaaggttatattatttaagactgtgatcttgaaaacatttgaactatttgtgtagctgtttcttgaagagatagctagagacattcacgctgcggaaccagaatggaagataattcttctgaggtacttcaatccggttggagctcacgagagtggaagaattggagaagatccaaagggcataccgaataatctcatgccttatatccaacaagtggcggttggaagattacctgaactcaatgtatttggacatgattatcctaccatggatggtagcgcggtataacatcgataataccgtttctttcttcgaaaattctgtttggacttctgatgatagattgataaactaaggtgcatttgacacttgcaggttagagactacatccatgtaatggatttagcagatggccatgtggctgcgttaaacaaattgttttcagactcaaagattggtaaactctttatatgacttttaactgtttgtttttgttttgatggagtcaaccaatgattagaattttaataatgttttgtgtgtgtcatcttaatcttaggctgtactgcttataatcttggcactggtcaaggaacttctgtcttagaaatggtttcttcttttgaaaaagcttctggcaaggtaagattttctcttatttccgcaattatgcaatgaaatttgtgtgaataagaccgaagatttggtctctggatgctataaaatatttgtttctgcagaaaatacctatcaagctatgtccaagaagagctggagatgcaacagctgtttatgcttcaactcagaaagctgagaaggaacttggctggaagtaagtaatgaaccatactttgaatacttttcaaaacacaaaagactaattttttgtttttctttattagggcaaaatatggagttgatgagatgtgcagagatcaatggaactgggcaaataagaatccatggggtttccagaagaagccttgattgattttgttttgtttcaccactcaatataaagaaaaaaaaagatatagatgtcgttttattttcctgcatctatttgatttctctcttcaaaaaaagttgtattgaactcgtcatctttcggttaataaagtataaagtttatctacattgcgtaatactaactaatcgttataatcaacgaatcatttatagttcactgcagaagcattctcaattcaggattgaaaaagagaagatgaggagatacaagatgttgttaacttgttgagcaagtaagtaccaaaacatgttaacaagagtcgacaacaacagaacatacagactccaaagaaaaaagcaactaaaatgtgtaaacatataacaagcaatgtaaacaacaaattgatcaaatctcgaaccctttttctcatgggttcctcagctgctaaatgatacagatattcgcatatttgcaagtttcctcttcttactgttctagtcttctagacttcctcgccttcttcgtagttgctactcttgaggatgttgtatttgcagaggggacaagtagcatttatgtaaagccatttatccacacaaccgcaatggaaatggtggccacaaggaagttctcttagctctgtctcgtcttcataagcggaaagacaaatgcagcattcctgtagattgacagaagcaaatctggttttgatcatcaaaatccaaacagagtctagccacagaggtttacaggttttttgtgttacttactgcatcctcatgaggaagagcatgttcaacgggtgaatctgtaccacattcagtcatcactcctccagaatctccttgtccttgttcttcatcaacagtgtgtttcatagtatcaccaacctttcggaatttgaatttagtaagttggtcaatgtcttctttcgaagctccttcctacattttgcaacagattttcattggaacaaatccaactttcttggaggtaacaaaagaaacaggtaatttgaagctacctgttctgctacggcgtatagaactgcaatgatgcaaggcaagcagcagcaaacagcaatgccgataacacaagccaatgcaacgcagaaaacaacaaagaacacatcgaaaccaagaaagactatacacaacctataaaaacaaagacatccaaacaaatttaagaacttaaacactttaaacattcaagaatctaagagatataagagaaattaacaacaaaccaataaagctgtggggatccttgtgctaactcttgaccaccagaagatacccaataaaatccaataacccaccatataaatgagatcatcgtatttgcagattctagatgcttagcaaaactggttacagaaaacactgctttagccaaaattcacatcacatataagacaatatctgtttcacaatcactgaagcttaaaacaaatgtacctattgttttcattctctaattgacctagctccaagtaacgttcatctgagtttctactcaaacccaaaccttcttcttcatccatagaagaagaagaagaagaagaagaagagctagatcttggactcaaatctcttcttcttctactattcctcctacgatactcaacacaaacacaaaccatatgcatcatacattgcaacccatacccaataatccaaaccctaagaggcatattcggattctcatcgctgctaagtaccaaaacagctgtagcaacaacgacaaaagcaagattccaaacgaaatccaaaaccactacaggtttcgaataagcccaatcgctttgtctctcttcaagctgctcagccgcagcttcacgaacaagcatcgatggctctctcatcatcattctcccgctacttgcatgtcttagtaacctcgccgcttctcttaacccttgtcttctcaccgatctccttcctcctcctccgtcggttaaaatcaaaggcgttgcttccgtcgtcgtctctcttgacattttgctttctcttttcaaagtttcttcctttcttcgaaatttcaaaaattgatatcgaattgatgaaattggtgaagctttacgccattaaattggggcaatttcaatctcagagacaatttcggatttgttagggtttcgattcgaacagagagagagagagacagaaagagaaagaagatgatgagtcggacaaatcgggaaacgtgatgtttgaaaaatgaatataaaaaatcaaaattgtaatgaatttaatgtctcctcaaatgacaaccagagaaattaggggacatatatgtaatattcagttttttcagtggctatatggtaaacttacactaacttgattcaaattaagggtgggtaagaaactgaaccaaaccatattaaaccgaaatttattcttttgtccaactgagtaaaaaattaacaaaaattcgaaaaattttaagcataatttttaatcgaaaaccggaataaatctaaattaaactcaaatccaaattgaaaatttttaatcgaaaaaattatagtttatacgacatctatttagggaacaaacccaaaaaaaaactcaactaatttttatttggacgtttaatacccaattgtttttggttggaaggtaaatacacgaagtaataaaaccgtgcaatttaatacacaaacaagtaattgttgttattttcatactcacgatctcacaacaaaaataaaattccaattttacccttaccatctcaattaattattaatttttttataatataatattaaattttataattttgaataaaaaataattttattaacattttagtttatggtctctaatttttattattattatattattctaaaatttaacataaaaattatagaaaattaaaaatattttaaaatggccggtaaatattcttcgtagtgagaaactctcttttcgattgtatatccttcaagaatcaaactattttcgacaaaatctcaacccgaatctcatcgtatttctcaagatttatcaattcataaaaatggctaattttgtttttagtagcaaaatagctaacctcaacccaaatctcaacgaattagattaatctttgattctaaatttccttaaagagaaaacgattctttgatattgcaacgatagaagaagattgtaataatgactattttaaaatatttttgattttctataatttttatgttaaattttagaataatataataataataaaaatgaaaatttaaattttagagaccataaactaaaatgttaataaaattaatttttatttaaaattatataattaatattatattatcaaaaaataatagttaattgagatggtaagagtaaaattggaattttatttttgttgtgagatcgtgagtatgaaaataacaacaattaattatttgtgtattaaattgtatgattttattatttcgtgtatttactttccaaccaaaaacaattgagtattaaacgtccaaataaaaattaattgaggtttgttttggttttttttcccatctatttataataaaatagaccaattttaaatttatcgaaccgaactgggcataaatgtaacaacgagttttaaaaggcggggctatatagtgaaattaatatactttgggtacagaattcggatgttttctttttataggccctttaatgaaatgattgtataaaagtaaaacccttaatcggatcctccagcaattttccctccaaaccagaaaaccctccaaatctcaccggtcggagattccttctcttccgactgataatggcgtcttcttcatcaacctctaccggtgacggatacaatgaaccatgggtggagaaatacaggccgagcaaagtagtcgatatcgttggaaacgaagacgccgtctccagacttcaagtcattgctcgcgacggcaacatgcctaatcttatcctttccgtaagattttactcttctgttgacactctttgatttaaaccctcctcgaatttgctaaaaagttttaggtttgatgaaaacttgatcaattagggcattttgggtttgtttactgtgtagatttcatgataaagcttagattttgagggtttttaatcaatttctattgtctgccaaagttaatgaaggtttgatttttagaaaatctctgtgtttagtattacttgtggagatttgatatatgattttgtgttgtttggttgtatatccttagggtcctcctggaacaggtaaaaccacaagcattttggctcttgctcatgagctccttggcacgaattacaaggaggctgttctggagttgaatgcatctgatgataggtatgtgatgccaatcttttacctatgggatgttgttctatcttcaatcgttgtttggttagacatcttcaatgttctgttatgtttgtaggggtattgatgttgtaaggaacaaaattaagatgtttgcgcagaagaaagtaacacttcctccagggcgtcataaggttgttatcctagatgaagctgacaggttagtgacttttacttgagtattccttctcaagttgaattgttccagttaagtgtttttttttctgactttctgttttcggtttctaaaaaactagtatgacatctggagcacaacaagcattgaggagaacgattgaaatctattcgaactctacgcggtttgcacttgcttgtaatacatcagccaagattattgagcccattcagagtagatgtgccttagttcgattctctagattatctgatcagcagatactaggccgtctcttggtggtggttgcagcagagaaagtacggatttgccacttttctttcattcgacatgtttacttactgcaattttgaaaattttctaattgcttatgttttcaatctctcaaggttccgtatgtgcctgaaggccttgaggcgataatctttacagctgatggtgacatgaggcaagctctgaacaacttgcaagccacattcagcgggttttcgtttgtcaaccaagaaaacgtcttcaaggtttgaaacaaaaccttaattcactttggcttataaaacacattggtttcatatcatcaatcaaagatctcttcacttaggtctgtgaccagcctcacccgcttcatgtcaagaacattgttcgcaatgtgttggaaagtaagtttgacatcgcctgtgacggcttaaagcagctctatgatttgggctactctccaaccgacattatcacaacgcttttccgtataataaagaattacgatatggctgagtatctgaaacttgagttcatgaaggtatacatctgattctccttgacagctcaaaacatccaaactttcgtctaacaccaatgcttttcttcaggaaactggatttgcgcatatgagaatctgtgatggagttggatcttatcttcagctatgtggtcttctggctaagttatccattgttcgtgaaacagcgaaagcaccttaagttaggtaacttccactcatctctagtgatgaactggtggccggtctatgtttaaaccaagttggttaaatctcgttgtttgagaattcggatagatgttggaacttccatgctgtattgctctgttttctagatttgaattgcttgtgaatgtttctgaatattaagcttaatcctaaccagtttggtataccaacacatttttttatataataccatgctatttgtttaaatcacataaatgaaaaaaacaatacacagattattttacacattacaaccactctatatagtctacgcaagtgcgagagatgaatcgtaatttttgtaggtaaaatgttgaacctatttgtgtaattcgataacactatatgagtaaggcatgacattgtgaaatggtgtaaactcttggtctgttacattgactttatattatgaataaacacacttgtgaccaaaaaaaagaaaaaagaactgggaacaagaaacgaaataaagttatatttattgaaccaaaactataaaatacgtttggttaaaaaccaaatctactacagtaaccataatgatgacacgtctgaaatcttcttctgtagctcgtgtgtgttaacctaacattgaaatacacaaaacaacgtatcagagtcatcttcatgaagcttacagacacgataacaactaaatacacaccatgtaacataaggactctgttgcgaaaaatatcagagtaaagcaacatgattcacctcagactcctcctacctcgaggacaaactgttttaagaaagcatattgagaaagcttttgtccaatctcccatcatgcaacatatttgtcaccaagctaatggttgaagcatctccaacaaacccagaactcctcatttctttgatgagttctgctgatgcggctctgtcacaatctctaaggtttgctctgataagcgtattatatgtaccactatttggaagagtaccatcttctttcatttttctgaacaggtcatctgcttcctgtagtaggcgtttactacacaatcctgagatcattgtattgtatgttacaacatcaggcttaatgctgaggctacaaaataaatcccacgcttctcccaccttgccagccttgcacatcccttcaatcatagtattatatataaaaatattaagttccatttcactcttttgcagatacttgaatatgaccaatgctgtatctagcttcccataactacaaagtccatgcaacaaaatgctgtatgtcataatatctgtaggcacacgattagaaaccatctgtttgaataccatttgggcagaatcacagtcgccagcttgaaaaaacccttggataatagtggtgtaagtgactgtgttgccaactaatcccctttgagacatctcgcggaagagttccacaccatcctcaacccttttacacttacaaaatccatttataagcgtattataagtctgtatatttggaagacagtccttgctaaccatgaacttaaacatctgcttggcctcgtctaggcgattgtgcatgcaaaacccattgatcaataaattgtaagtgatagtatctggatctatagacctttggatcatctcctcgtgcaatttttcagcctctacaagcttcccctctttaaaaaacgcatcgatcaatgcattgaaagtaacaacattggggttgattttcttctcaagcatattactcagtagtcgagaggcatcactccatcttccgtaattacaaaggcaattaatgagggaattgtaggtgacaacattaggtctaattcctttggtttccatttcagtgaataagtcaacagcaacttccacatgtctatatttgcagagactatcgatgattgtgttgaagatcacaacattagcctttattctcgcagcttccatcttgttgagcagatttaaagccaaatcaatatcacctctcttacataatccgtttactacggtaccataagtaaccagatctggttgacatcctctttgaaccatttgatcaactaaagccactgcttctgaagctttgttgtgaagaaaaagtccatgaattagagttgtgaatgtaaaggtatcaggtttatatcccatttcgaccatttgatcaaccaaagctacggcatcagaaatcctcttactgtgacagtagccattgagcagcgaagaaagcgtgacaatatcgggctcatagccgagtttcatcatcttggcaagaacagctaaagcaagagagagctgagagcgtcggcaaaagcagttgatgaaaatactgtatgtgtaaagatcatgtgaaattcccaaagtttgcatctgctcgccgagagagatgacaagttcaaacttgttcatcttagcaacggcactcaacagtttattgaattcaacaatggaaggaaatggacgagacttgaccatgtcaccgaacagatcaaccgcatcatctaccttaataatatcacttagcctatttctcaatatctctctgtaatcaccactagcactagcaaaagatcgttcccagcaaccggaaccgcaaagattgaagaaagaaggaacagttggaggattacctatcccctggagattccaatgaacaaacaatcttttggccgtcaatgaaatcgatctctgcatcttatcgatttggcttcagctgattcaggagacttcaatctcagtctcactctctctctctctggaaatcgcaaaaccctacacggagggatgagatatgcaaaccggtggggttctggtttagaacttattacctaaccggtttattttgtgagaaaatcttttgcattgatctcaatcagtagtactaagtacagtctcaaaccggatttacaagcaagagataagaattgtggaaaaaattggtgatggctgttattttactctacttctgtttccatatacaactagtcttgaaaaactgaactgactgatctcaatgcattatctttgaagcttaatcctaaccaatttggtatatcaacacattgttttttatataataccatgctatttgtttaaatcacataaataaaaaaaacaatacacagattattttacacattacaaccactctatatagtctccgcaagtacgactgtacgagagatgaatcgtaatttttgttggtaaaatgtcgagcctatttgtgtaattcgataacactatatgagaaggcatgacaaatgatttcacaacgaagaaaacccgaatcagaggctagagtctcgaattgggaaagagacctctccttaccacctgagcttactgctaacatcagcatgtccataccgaacacaatgttagaagaaatgtcgttaatctttggttcctcgggcgtaaccacctcgactattatcacttttcctttctcgggaagacttttccaataattttttaggatctttacacaatcttcgtcagtccaatcatgtagtatccactgtcaaagtgtcaatcattaaccatttcattttctacttactttcatgaagatggcatctccttttggaatttctttaaacatatctcctgaaacatgctccactcctatatgtaatattgagcaagagtaatatgataattttaagagcggtaactttttaattttaattatcacttagtggccgtgtacctttattaaaaggagcatgggctaaaaccgatgctagatcgaaattgatgcctttaatatgaggatacttggaagtcacttgacctatgattgttccaattcctcctcccacatccaccaaagtatttacatcttcgaatcctttgtaaacttctaaaaccttcttcataatcaatgtggaagcttccgacattgcccggttaaacatttcagcgaattgttcgttcgaaccaatgagttcgaaaaacctcatgccatgagcagaggtgaatgcatcttttccttctaatatcatgtctttgagatgttccctagtaaaaataaattagaatcagttttagttaacgttacgtgtatatatgtagaacattttgtgaataatgaactaggatcgtaccaaggcttcatacagacttccccttggagtaccatgaacaaagtggcgagagagcccaagccatctccgcggttcaagaaaaacgtgcaaaccggttcagctgcatagaccctctcggtctttctacttccaatgttatctccggtttctaccgtacggtacttcaagattgagtggctggctaacaaaactagcatccggtccagcaatactggtgcctccggattggtgggcttggttgggagaccaagagcgatctcagaaggcgagagccacacgccgtcatctacagaagtgatcatgtcgataacgccaagctccaaagcagttttgagaaccatggggaaggtcatggcatgcaaaatcctctccgcttgcaagctcaccgtatcttcgtgataacgttgttcttctttgattagatccggtttaggaatgatggttaaggaatgttgaagatggttctccattgttgttgtttggttggaaaatcgagaaagataggtaataaaggtatagatggtattcatactttgtcattttttatactcagaaacctcaccaacattatgcctaatatttgatagctaaatatataaattaattaaaatatgggcacgtatttttcatttataaaattaatattcgtgtatatttaaaatgatcatctaatatagattggtgtacaagaatatgtagagatttgttttcacttttattgtgtgttcattagtacaactttcctaattgaatgtgaatgtgaatgttagtcatactcattcagtgtgaatggtctaaaattgttggtacttatccatcaacactccattttaagacggtgtgaatttatatgctttgatggattcattgatgcaactatttttgttttggttggtttgaggacgcttttaaggtaataagcgataaaattatagattgtatacaactccggtagaatgaaactgaactaaactagagaagaatatgaaattgtttctgaatcgattatgacctattttatttggttaattatattttgttttaaaggaatcgaaacaaagttgaatatgatattggtagctactgaatcattatgtgttgtttctatgtttgagtagtttctcaattgggtttggagttttctttgtttaaatagttaacactctactaacgggttaactttactttagtgatttcagttcaagaagaacgcttaatttggtctctgtttaattatttttccgcttaatttaagaaaaacaaattttgtctaagctatactcgtttctcacaaattcggtgtataacttttcatattgattcaatcctaaagtgttacatcgatataccattcgactgtgatattgtgctcatttaattttaatcacaacttaagaaacacattcaataatgtatgcaaagtaggtatggaatcgaaatcaacatttaagaaaatggagacataggtttggaccgtttggtatgagttagtgaatgttcaacaaacaatcaggttttaatatgatatcagtgcgtccacgtgtagaaagcatttcaattaacagtcagtctcctataacccttttggtgagcttgacactttctaaatctgtcttgagaatctgtgatggagttggatcatatcttcatccccatctttgctgtattatttatgttttctagatttagaatgcttgtggatgtttccgaatattatcttctctttttttctttttctttttctgaatattatctttgaatctttagtccttagtcttaaatacgttggataacttttgcagtgcctatacttttttttttttgttcaacttgcagtgcctcttaaatatcgacatttatgtcgtccatatgggcgcctgtttttaaccttagaaagcatagatttagagaatatgcactacataaccaaattctactattatataatatatatatatacaaaataatggacatgaatttccaacgggattaacaaatatcatgttacttttgctattgctgatagtacgtgcttgtttaaagcatatacgaaaacactcggaacaaatgaacagcgccaataaacaaacaatagttcatacaagaaagaaaaatcattacaaatgaaaaaggtcaaggttagtctccactctccacccaaaaaaaactaaaccacccgtagtttttgttggtcaatgttgaacctatatgagaaggcaagacatatatgatttcacaatcgaagaaaaccagaatctcaggcaaagtctcgatctaagaaaaaaaaaaccgagcattgcgtagcaaacacaatgttacaagaagagtcgctcatctttggttccatcggcctaatcatgtagtatctatatataaaatgtccttttatattttcaatgcatcatttttaataaaacaaaaccatttatctataatctttcagcttatttaataggagaaaaaaaaaatcataaatgtacttaaaggtataagataaacttaaaacacttttaaatgtgtgtgaaaaaatctgaaacaaggcttttatgaaatgaagatagtatttgttattgattaaacttttccatgaatgaaatatatatgagtttactttcatgaagatggcatctgcttttggaattgttgtgaacatatcctctgaaacatgcttcactcctatatataaccgatttttagtagatttgattgttcttgacagctcaaagcatcctaactttcgtctaataccaatgcttttcttcaggaaactggatttgcgcatatgagatctgtgtttgacagtgtgttcctccagcaaatttagacagaaaagagctggtcaaaccggtttaaaatattaccaccaaaataaaatccacgttacaaatgtcactgggaataagaatccaaatcaagttatttttttgaaccaaaaggaactagaaactgctagcaatcattcaaaacaagaattataaaatacgtttggttaaaaaccaaatctactacagtaaaaccataataatgacacgtctgagatcttgttctgatgctcacaaattgatctcgtgtgtgttaacctaacaatgaattacacaaagcaaagtatcagtcatcttcatgaagcttacacacacgacagcaaccaaatacacacatgtagcttgagaagtaaacagagtaaggcaacataaagacttgattcacctcacgatcctcttctctcgaggataaactgttttaagaaagcatcttgagaaagcttttgtccaatctcccatcatgcaacatattagtgaccaagccaatggttgaagcatctccaacaaacctgcaactcctcatttctctgatgagttcagctgatgctgctttgtcaccatctctcagatgtgccctgataagcgtattatatgtaccactatctggaagaggcccttcttctttcatttctctaaacaaggcatctgcttcttcctttaaacctttcctacaaaatcctgacatcattgttgtgtaggttacaacattaggcttcactcctttaaggctgaggctacaaaatagatcccacccatcttccaccttccctgccttgcacatcccttcaatcataatattatatgtgtaaatatcaggttccattttactcctttgcagatactcaaacaccaccaatgctgtctctaccttcccattattacaaagcccatctaataaaatgctgtatgtcataatatcgggaagcacaccatcagaaaccatctgtttgaaaactatttgggcattatcacactctctagcttgaaaaaatccatggataagagtggtgtaagtgactgtgttgccaaccaatcctctttgagacatctcgcggaagagttccataccttcgtctactctcttagccttacaaaatccctttataagagtattgtaagtcactacgtttgggaaacagtccttgctaatcatcaactcaaacatgtgcttggcctcgtctaaacgatcgtgcatacaaaacccattgatcagtgaactataagtgaaaatatcaggatctatagaccttttgatcatctcgtcgtacaatttctcagcctctacaagcttcccctccttcacaaatgcatcaatcaatgcgctgaaagtgactacatttggattgattttcctctcaatcatatcactgagtagtcgagaagcatcactccatcttccgtaattacaaaggcatcttatgagggagttgtaggtaacaacatttggtctaattcctttgttatccatttcagtgaacagattgagtgcatcattcacgtttttgtagttgcaaagagcatcaatgatagtgttgtagatcacaacaccaggctctattttcccttgttccatcttctttaacaaactcaaagccaaatcaatatcacctctcttacataatccatttactacaataccataagtaaccagatctggttgacaacctttcacaaccatccggtcaactaaagccactgcttctgaagctctgttgtggcgaaaaagtccatgaattagagtgttgaatgtgaatgaatcgggctgatatcccatttccaccatctgaccaacaagagatacggcatctgaaatcctattcccgtgacagaaaccattgagcagagagttaagcgtgacaatatcgggctcatagccgagtttcatcatcttggcaagaacagctaaagcaagagagagctgagagcgtcggcagaaacagttgatgagaatactgtatgtgtaaagattatgtgaaattcccaaattttgcatctgctcgccgagagagatgacaagatcgaacttgttcatcttagcaatggcactcaacagtttactgaactcaacaatcgaagggaaaggacgagacttgaccatgtcaccgaacagattaaccgcatcatctagcttcaaatcatttagcctatttatcgatatttttctgtaatcatatctaacaccagagaaatctcgtacccagaaactgcaatggctaaaggaaggaggagcagttccacatttaccttttccgagaagactccgatgaacaaatctgtttcccgtcgatgaaatcgcaaacaatctcctcatcttcagctgattggggtttcttccaaaatcactgattcagaatcgtaaactctctgtaaacttgtataaaccctaaatgatgaaccttttgcagacagagagagtaaaggtttgaacttttggttctaccaaaccaaacagagagagagactcacataggctgagagagtgagagtgatattcatccagtttcgcaccaccgttggatcatttgaccggtcaagatttcatcttatcatttttatcaccggtttggtttataatcacataatgtatttttttttggtttagttctaaattgaaaggccagcattagcaaataaatatgaaaaaaacaaagaagattatcaagttttgctattttggttccatatttgtctaactatatttccttcatttttttttttattgctgagatgtccctttctaattaaggtgaaaccgcgtggaccttaccaatttatatcttggattgtaaagatctatatctgtttggttccacttgtatatgatacaatgatacaatacaagtttggtcattatcattttttctaatcatatgtcaacaaaaccaaagtatgcattcattttgcaaaatatacacatctatttgtatcacctcccaaacatttctcccattatacggacttggacaagtattcatacctctgcaaaagtcttattgataaatgaatgtgaaagtacatacaattggtttagaacattaaacacgagtttggtttggacacatggctttcatatactccttagtgataaattatggttaattataaccatctttgaagtttattctaatattttatttattaatttcattgatatggtttcaaacgtcaaggaatattaaaccttttacgaaaaaatttcgggtggatcatataatatcttcccttcaatcctcaaagttctcgaactctaccaatacctacaaggctacaaaaatttatacaccattgaaatatgctgcaacgaagtccatttaaggcctgatgataaattccttggagatcgacaataatatccaagcgattgttagtgagattatagagttagtctttgttggattcaatagtttgttccacaatgtaaaagtcgactattctaaagaagcccttggcaacttattaaatcttataaatagttaaatatcgagaccgtagaaccttttgctatatatagtttttcgtcagaaaaaaaaagtcttcatgctagagaaaaaaaagtttaacttataaataccatgctataattaaaacaaaataacacgtactacaaatagtactagcttatattttctctcttttttaataattaattttctaaaaaaatacatatcttaagaaaatattattaaaattaattatgaatatattattttttgtgttttatatttttttataattaaaaatcaataatatttaattatttatcttgaaatttgatattcatcaataatatctaattaatattgcaaaaaaatctagaaatccatcttttaaaaacacttttttgtataaaaaaaaataaaaaaataaaaccctttttgtaaaaaattcaattaagaaaaaataaaaggagtatatgttttatcttctctttttactttaacaaaataccttgtttttttgttgttttcaagttatatattttgtaatcttgtcgcaggtctgagttgttttttgcactcagaaaagaaacttgtactaaaacctaggagaggaggagctggcaccaccgcctaactcgccattgacacaacaccaaaaactcttctttactttttgttattctacacacatcgataaagattaagaacataattaatagaattccataaataattagatgcactaacttttcaacatcaattcaacggtttaaattcgtgaaaaagcgtttttattttattttaatggttacaactttgtagtttttaccctaaatctctctctgattactgatactctgtctcaatctcttctttcttctaatcctttatttcttgtaagctacttctcctgaatttcgtatttgatccgtttaatccaagtttcgattttatataacaaccacatagacagagagagagagagagagaaacagagtaatggcgaacagagatgtggagagagtagggaagaaaaacagaggagctaataacaattatttctacgaggagtcttctggtgaaactcattggacttcatggctgattccggcgattgtagtggcaaatctcgctgtctttatcgctgttatgttcgttaatgattgtcctaagaaaatcaccggacctaacaaagagtgtgttgctagattcctcggaagattctcgtttcaaccacttaaagagaatcctctctttggtccttcttcttcaacgtaagtattactttaaagttggagattcatgtttcatcttctgggtatctccaaagtctcaaactttttgggagtccaattcgcaattgaatttgatcactattgtctgttcttatggaaattgagctcaaagttttcatttttctgcagtaattaagattacccaattagtgccttactgataacgtcaatgaatttgtagttgaagctcgagattctagaatttgttaatctaagttactggcaaacaagtttgatcttttgggtacctaaaacgtctcaattttttttgttttcaacaaactgaaaaagtctcaatttttgtgttttcaacttggcaattgaatttgatctttattgtctgttagtggcttggaacatgagctcaaacttgtagggtttctcaaagtttttatttttctcctggaattatgtatttagcttggtttggaattatgatttgtaaatttcattggcaattattgtagtgatggtgtttgtgattgatttggttttactcggatatgtacttgtatcagattggagaaaatgggagcattggaatggaggaaagtagtacatgaacatcaaggatggagacttctctcttgtatgtggcttcacgctggtatcattcatcttcttacaaacatgttgagtttgatcttcattggtatccgccttgagcagcaatttggcttcagtaagtcttacctttacgtgtacaagaattattgttcagtcaagttttagactctctttgtttaatcgccaagtgaaacatttgatctttatcgcgggaatgttactgtgcagtaagagtcgggttgatatacttaatatcgggtctcggtggaagcatactttcgtcgcttttccttcaagaaagtatctctgttggtgcttcgggtgctctctttggacttcttggagcaatgttatctgaacttcttaccaattggactatctatgccaacaaggtacttatgcccttttcgctatacgcgccttaaccggaacttaggattaacggcttcttttggcaggcggctgctctgatcacacttctgttcatcatcgcaatcaacttagcattaggcatgcttcctcgggttgacaactttgcacacattggagggtttttaaccggattctgcctcgggtttgtcctccttgtccgacctcagtacggttgggaagcttcccgcaccaacacttcgcgaaccaaacgaaagtatagcatgtaccagtacgtgctgtttgtagtttcagtggtgctacttgtggttgggctaacggttgcattagtgatgcttttcaaaggagagaatgggaacaaacattgcaaatggtgtcattaccttagctgtttcccaacttctaaatggacctgctaatcatcatcatcatcatcataatcatatagtaaaagcttttatatgtgttcttgttaacatttaatctctttgatctctctagcctttgattatttatatatgtgtacattaccaaattcgtcttgtgtaaaaggggatagaaataaaagagtgtattatttttacatttgaacaccatatttctcaaactgtctttaagtacataaatagtaaacaattttattaatgtaaaacataagctgtaattggaaataaattcctttaatttggttatagtacacactttatagtatccatcttaggtcttgtagattattattcttcctttgcttcaaattcttctttctctagatctctttcttcttgagtttaacatgatagccatttggaaattgcaatccaggagttcgaagtatatttcctccactagtttcttcccatctgatgaaatccaagaaacaaaattacaaaatcaagaaccattagttgtcttaacttaacagatgaaaaaggagtagtttcaaactgtattttgtgactgagctatgaaggaaaactgcagtttgaagtttgaactttgctgaagtcagctccgatacacaaccgcattccatcaccaaacgccatgaaattccatcaccacacgccatcaatacaatatataataccaagatatgcaatcatgcatacatcagcttcatgcaatatatgcataatttttaggagatttcagatgtcacaagatcgaattgaacatatattttcaacagtgtgaaatacagttatacggttagggtctgatttttgtttttggtaccacgtgggttttacaagtttttatgatattacaaataaattaataatgcatcacacttcatttattgtgaatgggtgacttttaagaaaacaatgaccaaacaccacccaataaccttcctgcactgtgtcatttaggccttaatggtgcagtggataaggataaagtacgggacatagacaatgcctttaatcatccaccattcacaaatgataataccttgtatacatgcgatgtaacttcaaatatagggatgattgtgtgctttgcggatcaaaacaagaactttaaaacctctcggtaaaaagtacaaattaatggttactctaaacggaaaggcacaggagatttgttatttatatgatgttctcaaacaaagaaaagctactcacacaaatcacatgttgccaactttaagctaaagacccaactcttttctttacgtgtaacagaaaagtggcgcaatgaccttcaatggcttagctcttgacttctcgatggtttgagtttgatctcttcagcgccctgtcatggtttagcattgcgcttacgctctcaaccacgaaaacgatctgtaaagaaaagcagaaacccgtatgcgggttttagtcaagataacccaaaactacaacattctttgatcaataactgatgatctcatcatcctctgcttgatatcatcaaattttgtactatatgagtatcaactcccaactactgaatagaataatgaattttgaaatggatccaggcctatattttacctgaaagcacgcgtagccgatagcgtttccaaagtagaaatttgcatttccggttccctgtcatgaaaaaatcaaaggtagttgtgatcattagaacattttgttgcaactgctgtgaagagttgggttatggatttgagtagaagcttacccgccatatccagagattgtgcatcacagggctgaggagagagatcccgagatatccacagaagaggaagaacgagaacttcatatctatgtgaaacagaagcagagtttatatgcaaaggctaaacaatgctaagaggatgtgaagtatttgcttttacctaataactcattgacaaacaatgcccataagctcaagtataacgccgaatctccgacctattgagagtaaatcaaatgatgaaagcattgttaacatttatgaatataattcctcaaagaagaaaagataacttcaagttcacagtgaattcaactacttactgaaggataagatttaagaatcgaggagatcgctaagtatatgaaagccaggaaacatggccgatgtttcaaccttatggctaagggcagtaacatgaacagaatatttacgtgtaaaactatcagaaaaaagtttctgaagaagtcgaatacttctgcaaagaagtacctgaaaacgagatttaaaacgaacagtaaatagtcttttcataaaagaagggatcccttattcatcacccaatgatatcaccatattaatttattttacttaccaaaagactccaatgtttggtgaaagatcttcaatactaagaatgaaaccatacgtcctacaataggaggcaaagacaaacaaacatcaaatcgcctaaacactacgttgcaagttcttaataaataattatatgatttggaatataagttatagatataatatggctaacggaaactaatcctatagcggttatgaataagatttctaagttagaggctacctcttgaacatctcctcaagcccaccatatttattcagtgataaggcacataaaatcaacacatagagtgaccacagaagtacccagaacaagaagtgtgcgactgttttccataagaaaggaaggtgcgtagtctgtttcaacttggcttgtttagaaacagtagaggttgaactctcctcattttctacacttctggtctgaaggaacaattttataggaggagcatccaaaccatatcccaatagaaagattatctgtgggaaatgcacgagcagttagaatttgtttaatttgagaaacgtgaaaaacataaaataagaaatgatacatactggaattgtcagagtagcaggataaagagataaatgtgtggcaatgactaagccaaatgctgccagaggaactcgtcctgcatgggtagaaaacatcagttataaaatttcaagaaactattgaacaaacaatatgcaagtatcatcatcttcttacgtgtaactgctccaaaaagcgccaatatgacagccaggttttcgatgggagaagttgataagcccacacaagaaactatcgtgaaaggattccacaaatacacaagagcagcaatatcaccacaaggtaggatcactgaggagacaacgaaaaaggagagatcaatatttgccttcaagtaaatagttacaagaaaagagtagaaataagatagatgatacacaaaattcaacaactgacttcaatctacctttatcccttgatgacttaagaaaaccaagtagtctcgcattcagtccataagccatctggagtttctgaccaatagctcgaagaagcattgcacttaatatatctgcaataacaaaaaccaagctgtatccaagagaatgttggtagcaacgacatgactataaagctcttgatgaatagtaaatcattcaaagatcatctcttttccaaattcacatctcacaatctaatcctacctaagattttaagctagctcaaatctgagaagaaagaaaaaacatgtgatcacagaaatgaagggacactgaaaagtacctgcacaagaggtgacttggttgccctttaatcctgcaaacacacaaattgtcttccaataaaactcaagtgggaaaaaatcatgttttcatatgattcaagctcaataaatcacaaatcctaatatcaaaatcgattagtcactacctttgaactgtgagaggtccaagaaccgagagcagcaatggtgagccatgatacatagatcctgctcaaatatgtacaacttcagcttctaatagcctaagaatccaaatttacagaggatcaaatcttaagatagacctgcatatggtgacatcgatgcctgcttcaaccaataaccttcagcaactgaaaatgttcatacaaaacgaagaaatgtgagctgaattcgagatcttagagagctaatgagggagtgagaaagagagaggagatacggcggcgaatgctggtgagaggggtagagacctccggacgggaagagagattgagatttcccgggaaggagatcaagatcaatcggaaagcaatggaagataaagcccaaatccagaatcggcttagctgcttcattttctgctcctccgccatttctccgtcgtcttttcttcttctctctctccggcgagtgaagagagacgactcagatgaaacgacgacgtatttgatatgatcttgttaaggtttggttccggtttgattttttcggtttatgatccatttataattcggtttgattaatgtaactctatatcggttcggttcggtttttgtttgatgcatttcggtttcgtgtttgtgtgataaacatttttccaatgtaaaatatcatatgaagaataatcatatatttacttttttatcttgttgtaattttgaagagaacactaaatacatatattatgcttcgttaaatacttatgtgcttattaactttttatgtttacttaattacgttggtacgttgtgtgaactgctctctcctgcttcgttctttgctttcttctttacttcctctttccttgcttcttcttcttcctttattgcttcatctctagctttcttcctttcctttgcatcaacaaccgcttttcgcattatgtctagggcagtttttgatttctcaaagacatcatcccccatcttgtctacctcgtcaagatctcgaagaaaattaggatctgaatttgtacttcgtataactcccacgcgatatgcaacatgtttagctgtgttgatgatttcctccatttgtgaaaggatcgggtttgtcacggctttaaacgcttcgtctcccaaatctgtgttagtggctttcatgtaagctgtatagaaatagtctacattcgtccttgctttcttggctttggtgtttatctctgtataaatagattgcatcttaagaaccaaaaacaaaaaagagttattgagttttttatataatacgaataagagctagctagagagaattgtgatgatgcacatcctatatatatacacacgtttaacaacttgattagcaagttcaataactatcgcaaaagtgctttattcgctcataagtcataatcaacctcccaatttttttttaacaaagtatagtttatgtgtacacgcttaattaagccaccctcccaagcttagtgtttttttcttactttttattcatcaaactcaaaggaaatgaatgatctaattcaaaactaattatacaaatggaattccacaatgcacaatgaatggttaacgtgggagggaattatgtacctttatatcgtttaagaacaatccttttaagatacaattattttcttatttgcatttggtttagctttcatgcaaagtttattttctttttttggataacgacttttatgcaaagttctctattaatatagctcttatcctgttatatcatctgtatattgtagcatgatttcttacagagcacatgataacaatccaaaataaatatatgtgtatatttgtgctaagtgtatctatatataattatatattattcattaatatatatgttaatatctacttttatgtgtatagtttagattttgtacatagattcagatttgatttttagtctagtgattaactagattatgttcatactattttagtgtttcctagaaaatcattacaacccaaatacttatctaaacatcttaagatagagttttaagatgttaaacctaaaaggtcctagtgttaatgaatgaaaaatatcaattattagggaaaagatactagaaattatatacatcttgaattaatcattaccattagattaaaatgtatttctaaatagtttccaaatatttaccctatttcttattcttatttatcagtaaaattagacaacattttgatacaaaaagaaacacattttgcccatctttattaataggcttattaaaaaaaggtttattaaaaagcccattatatttgctagtaaagcccattagttttgaaattttgtaagctctttatgtttgtgaaatcttgcttatttgtttcatagctattctttggttgcgaattttgttgaaccttaacctagtgtggaagcaatgccggaacctctaattttttgttaacgcaattcaagaaactctaggaaggccagaaactctaatttcttgtgaatgcaattttacacaagtttcaataaaaaaaaattgatgcttagtttcgatttctggtatgttccatgaatattgggttttttttagacgttataaaatgtaaaacttcaaaaaacattgacatacgacaattgaataaattgaattagtattggggaagtattttgcgtagaaaaatggtacatgtaaattattggtataataaaacaattataaaaagatttaaggggatgcgtaagaaaatcataaacaatcattcttactaatatagagaaggaattagtaaatatatttcacaaaactggcaatatttattaatgacagataaatttagtaccctaaatagttatttggactttgtacaatgatcatttgtttttttactgcgaatgtgtcatagtctaaaaaaaaacaatgtcattttttggtgggtgtattaaaaaaagtcgttgttggctttcccaatcagaagtcattgatgtccgtacacacccaacactctcttctttcttcctctctcccaacggtcatatttctccgacaattcacaaacggtcaccaattttctaccgtttgattttaaagatccaacggctcagatagattcagatccctcgtgtaccactcactctgcccaactctaaaaaacaattactgtaaaaagaaaagtcgccaacttcaattctcgaagacccaacaagaaaacaaactctaaaaagttgcctccactatggtatttgtagaagctgtatagtatctcttaacccctgtagagagttagagagagagagagagagagagaaaccaaaagtgagtgagagaaacagatagaagtgagagtgagagtgagagagagagtgaagaaagtaacaatctttgagagtttttggatcttgatcttgtgtttcagtaatctcctagtgattgtctgatctgggttcttgttgattttgggtttctggatgttctgagagatttttcttgatttggcaaaaccagaatggcaaaccggaatggtgaaccgggtttacagcaactctcaagtctgtttatccagcaacttcgaggtcgttcttcagtagtctctgttcgtgatgatgtgaattcgttggtcgtcattatcatctaaatgagattttgttgttttttataaagtttaaggaatccgatgattgttttatggtagattgatttgatttagtttagttcgataattctttcattctttatttgattatatagattcgttggttcttttggggcaggggattcaaattcatttcattcttcaattttttcatataggattcactttgatttcactaaaaccaaaaaaaaaagattcatcggattccatttttttaattgtttgagcaaacacacacacacttgtagaccatctcttgaattgggttaggtagattttgtagaggatgttggcaggttgttcgagttcatcattgttgtcgcctactcgaagattgaggagtgaagcagtagcagcaacatcagcaacagtatcagcgcattttcccatgaacacacagagattggacttaccatgcagtagtagcttctctcgcaaggaaactccttctagcagaccacttggaagaagcatctctcttgacaacagcaacaacaacaacaacaaaccgatcgagcgcaagacgaagaccagtggttgttcgcttaaacagaacataaagcttccacctttggcaacaacaagaggaaatggagaagggttttcttggaacaacgacaacaacaacagagggaagagtttgaagagattagctgaggaggacgagtcttgtttgagcagagcgaagaggacaaaatgcgaaaacgaaggtggtttctggtttgagcatttcactggccaggattcttcttcaccagcattacctttttctttgacttgttcaggtgatgatgaggaaaaggtttgctttgtgccaagtgaagtcatttctcagcctttaccaaactgggttgattcggtgattacggagctagctggtataggcgataaggacgttgagagtagccttcctgcagcagttaaggaagcatctggaggatcatctacaagcgcatcatccgagagtcgtagcttaagccatagagtaccagaacctacaaatggctcaaggaatccgtactcacaccgcggtgcaacagaggaaaggaccaccggaaacatcaacaacaacaacaacaggaacgatttgcagagggatttcgagcttgtcaatttgcttacgggatgcttagacgcgatcagatcaagaaacatagcagcgattaaccatttcattgcaagaaccggtgatcttgcttctcctagaggaagaacaccaatgactcgcctcatagcttactacattgaagctttggctctaagagtggcgcgtatgtggcctcacatcttccacatcgcaccccctcgtgaattcgatagaactgtcgaagatgaatcaggaaatgcattgaggttcttgaatcaagtaaccccaattccaaagttcattcatttcacagccaacgagatgttactcagagcatttgaagggaaagagagagttcacattattgacttcgacatcaagcaaggtttacagtggcctagcttcttccaaagcttagcttcgagaataaatccaccacaccatgtacgaatcactgggatcggagaatcgaaacttgagctaaacgaaaccggagatcgcctccacggatttgcagaggcgatgaatcttcaattcgagtttcatcctgtagttgatagactcgaagacgttagactatggatgcttcacgtcaaagaaggtgaatcagtagctgtaaactgtgtcatgcagatgcacaagacactctacgatggaaccggagcagcaattagggattttttgggtttaatcagaagcacaaacccaatagctctcgttcttgcggagcaagaagcagaacacaactcagagcaacttgagacacgagtttgtaactcgctaaagtactattcagctatgtttgatgcaattcacacgaatcttgctacagatagcttaatgagagtcaaagttgaggagatgttgtttgggagagagatcaggaacattgttgcgtgtgaaggaagtcatagacaagagaggcatgtgggttttcgtcattggaggaggatgttggagcagttagggtttcggagtcttggagtctcggagagagaggttttgcagagtaagatgttgcttaggatgtacggatctgataatgaagggtttttcaatgtggagaggagcgatgaagacaacggcggtgaaggcggacgcggcggtggagttactttacggtggtcggagcagccactttatacgatctcggcttggactaccggagggaattaaagtttgaagaaaaaaaaaaaaaaaaattatacatttagggttttaaagacttttagaaaaaggggaaaatgtttttttttttatcaaagaaaatagggaaaatattgattttattctttcattcattatttgggagcgggtaggttatttttataaaaaaatgtaagaattaaaaaaaattattttgtattagttactttggagtcttttacatgtaacttggaggcttttgaatgttttgctatcaataatgaaactgaagtattatttttctttacagtatttattgcaaatatagaaagtttagtgacatatttgttttattaattttggtaagaaaaatattctattatattgaagacaacaaatattatgtttgaaaaaaaaaatcaccactgtgaattgtgaaatgtgaatgttgatatgggccttgtatgaggtcggcccattatattccagtaattctcattctctactctttggtttgtggaattagtcttttcaaactttgtatcattcatggctagttttcgcattgatgaattttttttttttaataagactagtcaagtcattttcgccagcgttttgaagtaagttaattagaaatatcacttatttattagtattatactacagaaaatagccatcatgcttaagaattgttgaagacaatgaccaattttccataattttgctatgtttataactcaatcaacatcattttcaaaaactagttcataatgtaatttaattattgaaaatatataacaaaaaaatctatgaaatatatctatagtagaaattttttttaatctaattatatatttttttaaataaacgtttatatatatggatacgaacttttcttaaaacaaattaaagagatctgttatccgcgatgttattttgatgtaaaccacatttggattccacccgcatatttctcaacttctcgtctctttagagtgcttaagcgatttctaatgtttttagcaattaacttgacaatcttctctgttgtcgaaaattgctcttcgtgccttctgtcatttctttcctttaatggatcgcattctgaaatacaaacctgaaaataatttttttagttttgtcatgatctttgctcccaaacttcttcatcacatctagccacttctccaagaatttgtataagagaatttcacaaaccagtttttcgcattggaataacaaatgttccgtgtctccaacaggtgtttgcaaaatacatagcttgtctctgcattttgttttccatttaaccatatattctttctcgtgtcgcaactctgtttttcataatcagtcatgtgacaaagctatacctctttgttaaatatatgtaaaatatattgttatgactatctataacaatcacttgacaacggtgtatattacatcgtatacatatatatatatatatagactgctaatgacttcaaaccaatcactgttcacagattttgtttaatattcttatgtagatataaacctaattagtagttcccctagctagtatctatatattcgaatgattttctttttgtaatttagacgcacggaagtatttgtcgactagtagtgtatttcaaatcaatcaccattaacagattttatttagaatttgttttgacgtgaaaattaaatcaaattcgtaaaatatctcttaagcaaaaaaaaaaaagtttgctaaaatcctaacctcaaaaaggtacaatttatttttataatttaatgataaaagggtaccaatttgaacgtagttttatgctataagaaacaaacaacaaaggacaagttgcacgaagtttgtctgctacgtacttcttctatgttccgccgataatgtcataatcattcatttttattttttatttgcttatgtattttacagttgttgtgatgtttaattctgatatttgtcgtctaaactcgagtcttatctcatatgggtcactttcggtaatcagattgtttcgactagtgatattttttctgcctataatttaccaattggtgcatgaaaaggtttaaaccatacaatgaggttggtcggaaagtagttcactattgagtggtaaccacattccaaattatttttgtggtcactaggttaatccaaaaaacaaagaaaataaaatcaattgttagaagttcgtataaactgtaatcaactgtatttatattaaaaaaaaatattatatatttatttgttaaagaaatatgaataaatgttgtccaaagaaaatagatacataaaattaaatctgaaagatggagaatcaaatcaattgttatatagctagagtcattatcagccaagaatagacacataataattaatggagatagagatttttacgtgttcgaaacttccaatacacacaaggactcgaactaactatacgaaactcattttcgtgctgaataattataaacatatacttaaaccaaaagctcatacatacaatttcgtcaaaagtatcctaactaaaactaattaagacactcttcttcttctttttttgacaagaacatcaatcagacaatcaacaccattatcattttcagttaaaattttgaatttcgtaggcttacaaatattcttatctttagggtaagttggattattttatcttgggttgggtcggctaaaacatgatatttaatcatggaatttaatagagtacctagtacctaacctacctacgtgtagcctatccaaatactgataaagactgtatctgtatatattgtatagttaattagacgagcatggtatcataatacaaggattcaaaagaattgcacatgacatcactatataaatagtggattccaacttaatttccaatcatatttgagcaattttaattattatttgttcagtttttttcatggttgtggttggttgcttattcattccgtaacctttcggcagccaaaaatatagcatcagaagaaaattttaaatattatgattctttacacttcgcaattttattgtcttcttttcttttgtggtcaacaatgacatggatggctgatccgaaccaaatttcctaaaacaaatctggaaagtttatacaaagctgaactactttttttttttaacagaacctgtactattgttttaaaaaaaaataaaattacacaagctgaagtataatcattagactactatttttggttttgaatttccactattatgtaaaaataataatattattttaaaatagtgataatatgtaatcaccattataaatttgtctcaaattaccaatttatctgtctaaatttatatgaaatcaatacaataatttaactagtatcgtattcagtttgagtcggtttactctattttgaatatcaaaacaaattttattacaaaatattcatgatctaggtttatttttctttttggtttattattagcaattataccctttattaattaatattcacgtatacctatgatatatttatgtaatcaataagaaatgtaataaaatgtaacaatgtaaatacaattctatatacaatacattttgcatgttactagtaaacaaaacctatattgataaaatggtaaagtaatatgccatgaacttttagaaaacattaaccaaataataaaaaaggattattaaacggatcaattgattattttcgttcaaatctagcagcactagtttgttggtgcttttgaactaccaccaacctcactcaaataaacccttagaaaattggacgactcaaagtagattccagatgataataatattattttttggaatttggatactatgggtctaatttctaaatccgcgtcgtatttttgcatcgtcatggtcaagtccatattacacgtccacaacacgtacattcacacgtgccatgttttccacttctcacctttcacacgtggcccatatcatgtacgcgtagttaggtcgtattattagtactgtatttttattcagcctctatttttcactcaatacttctattttcaactggtcgtcatgccgagaaaacaattgtcctatgatgatctgacaagttatcacataatcactggtcgacagaatgtgggaaataaaaattcattggtcgacagatgaaaaaatatctggttgacaaaagcaaaaattgaataaagtaatagtaacctttacaagatatttatttattttgctaagaatccctgcaagatatttttgcataaattaaaattatagcaaatattcagcctttagtcgaacgaacattcgattttccttatgacacgatgaattctcactattgagtattttctttctattctatcgtatacacatctctttattgtttgtttatatcgtcttcataatagtagtattttatgtgcggtgacgtaaggtttaattaatgctttatttcattgtttgtaatggatgtggaatatttgtagttgaaataattgcaactttcggtgactaccaagggatggcgttgtttatttatagacattccctaggtcaaattgacacccatttttatacatggtccggtgttatgataaacttttgtccgtgattagaaccaaagagagaacgaatacaaatcgtaaataacaccaacaaatatgccagctaatagcacaatgtagagtttgtctttgtgtgctgacacttagtgcttttgcttggattcataaacattatcattggacgtacgaagatgttgtatacattattttagaaagttcgaaaaaactaacaaccaattcgcaaacctttacacgtttttgttatgtgttacatagatctagtattgactaatgaacgtttgttctaatgttgttatggtttaaggaagaaaaaaaagttttcaaaaacaaaaaacaaatacattatatatgttcaaatcgaatttttgattttttacttgtaccaatattgttttatgctagagttagagttttagtaatgtgatcactctatttgacttgtctcttattctctcaataccttaaataaatctacttgtattcatctcttcttgaccaagtctcttagtatttaaaaaaaaaaaaaaatgtctcttagtattcataaatatatattgtagttctatataaatttatgtatctcaatctttatgattatgagaaactttcctattaattccaattctctgaaaccatcatctcgacattttagacttttagtggtacatcgtaagaaaaaatgaaaataacttaatacacgcgttggccgttgatcatataagacttatacgcatttgttactgtacttaccataccttcttttgttttttttattcagcagatctgagatatcttaagttgagcaatgttttgtaaaaatgttacatgtataattttagaaaaaattaaaaattacaatataaatattaattatttttgtatgtaagaaaattatgaaaatttaaaactatatagaatatataaatgttttaaaaaatattaccaaaatttacaaagagttgttattgtgagaaatatgaatagttgtagtgttgtagacttctcacagctcatatattacatgcatttggatgttgaaagagctgaagactgatatttgaaatgaaaaacagaatctaatatttaagttttattttgtaacgcatggaaaaaattcttgtgaagatgatatggtacaaatattttattatatatacacgtttttaagatagtaacatggaaaatcatgtgaggtttataaggcaaaaaattccattatattatacgttacaaaaagaagtttaagataactattttattcatttttttaaagaaaatatcgtaatattttctatttcacttgctatgttggcttttaatataaattctatattagttaagatagaaagtaataaaaactcaaatatattattgaatgatatatgaataaattgaattggaattgattcatattcagaaaaagaaatatctgataattttttaatatatattaaaattctcaaaaatactatatttttatgattgaattaaaaaaaggagatatccctaagatttactttaggacacatttacaaaaacagttattatttttcttatgtacaaattacaaacaaaaaaaaaatgttcaaatgcttagtcacttcatcattatttggataaatacgaatggttatatacttgtcttattgttatatctaattcttacaactcacatatacaaacatttggatgtcgaaaacaaatctacggctaataatttccaaatttaagataaaatagataaaagaaaatccaaaatccaacagattgttttcatactacaacaaatacaagaaacaaaaaaatacatggttttgataaaactgcaacgatttttcacatataattagccaaccaaaaaataaaataaaagttgaagtatattttattgacttagttaattaattaaataaatccctgagtttgaagcaatatatatataatacacatatcccctcccatttgcgtcagcgtccataaatcagaatccttacaagaccatttgtgtctgtctccaccaaacccttcttttctccatttttcttttttgctttgtttctgtgctacgatttgtcaaaaaaaagaaacccaaatcaaaagcttcgaaatttcataagatttctttgtttttctgaagatccaaggcacacaaaaaaacagctttttttgtttcttcaatcaaggattttccagggttttgataaccccatgggttcagggttctctctgtttcaaaagaatttatcgtcttgttatggagatcgagatctgttgcagcctggtttaggagatttgcctgaaagttgtgtggctttgattctccagaatttggatcccgttgagatctgtagattctccaagctaaacacggcttttcatggcgcttcttgggctgatttcgtttgggaatcgaaacttcctccagattataaattgattctcgagaaaatccttggtagtttccctgataatttgcgtaaaagagacatctttacttttctctctcgagttaattccttcgacgagggcaacaaggttcgtctccttttagatttctttggcttcaagaaatttttttagggttcttcagaaaaaaaaaattggggatttgttttgttaaatggttcacatgaacggttttaggaaatgatttcataatatgcaaaattttcctgtgaattagagaagaaacttaatgtttttgatgttttctgcagaaagcttgggtagataaacgaacaggtgggctctgtttatgcacatcagccaagggcttatccataaccggaattgatgatcggagatactggagtcatattccgtctgatgattctcggtgagattgtgtttctcttctgttgcttacccaaatcagattgtgtttgttaagtttgggtgtacaaagttagttgagttaaggttgtagtggatacaaatcctaactttaatctaatgttgtgtgatgctataattctttatgtttgctatgattgaaaaaatgacatattgttcattgtattggatacaatcatacgaatcctaacttttaaccgatgttttgcgttaccatgattcttaatttgacgatatcctctttgttgattcctgcagatttgcttcagtagcttatgttcaacagatctggtggtttcaagttgatggagaaattgatttcccatttccagctggaacctacagtgtttacttcaggcttcagctaggcaaaccaggcaagcggtttggttggaaggttgttgacaccgaacaggttcatggctggaacattaaacctgttcgttttcaactctcgactgaagatggtcaacattcttcatctcaatgtatgttaaccgaagcaggaaactggagtcattaccatgctggagactttgtggtcggtaaatcgaaaagttcatcgacgaagattaagttctcgatgactcagattgattgcacgcatactaaaggcgggttatgtgtagattctgtagttgtgtatccgagctcgtgtaaggaccggttgatgcagatttaagttgcaaaccggagtttgggtgtagtttagaggtttaaaaaagctgttttttttttttaaagtggttttaaaaccttttgtagaatctttgagggggtaattagaaaactcagtgtaaagagaaaaagagggtaattactaattagggttgttgttttattgtttaggtcaaatgtaaactttaagtttgaagttattaaagagttcttgagttacaattttttctgttggaggtttgtgtgtgaagtgaaacgcaacggttaatacagaccggagagataaaccacttgaaatgataaacatatgttaattgcagtttgtgctgagtaaacctattcaagacactttgacgtaactaaacaaaataaaaccaaatcgtaccggagaagagaactcaatcagagtaaaccggtcggttattaaaactggaaatgataagatgatatcttgaccgtcaaagcgagatctctccatcttcaggttaagcaacgacgaactgtgttcattttagagtttgttaaaagatccagagaagtatcacaattggaaagaagatgagtttggcgaagagatttgttcacctgaggaaagcttctccatcgttttgccttcgaggtatctatttctctggtttgagttatgatggctacagagagaaattgagtagaaatgcgttactccatttgaagttagatgaagctgttgatctgttcggtgaaatggtcaaatctcgcccctttccttccattgttgagttcagtaaattgttgagtgctattgctaagatgaagaagttcgatcttgtcatctccttcggggagaagatggagattttaggagtttcacataatctctatacttacaatattatgattaactgtttatgccgccgctctcaactctcatttgctttagcaattcttggcaagatgatgaaacttggctatgggcccagcattgttaccctgaactcgcttctcaatggtttctgtcacgggaataggatatccgaggctgttgctttggttgatcagatggtggaaatgggatatcaacctgataccgtcacatttacaactttggttcatgggctttttcaacacaacaaagcttccgaagctgtggctttagttgaacggatggttgtgaaaggttgtcaaccagatctggttacttatggtgcggtaattaatggattatgtaagagaggtgaacctgatttggctttaaatctgctcaacaagatggagaaagggaaaatagaggctgatgttgtgatctacagcacagtcatagatagtctctgcaaatatagacatgtggatgatgcactcaatctgttcactgaaatggataacaaaggtattagaccagatgtttttacctacagctccctcataagttgcctttgtaattacggaagatggagtgatgcttctcgactactcagtgatatgcttgagaggaaaatcaatccaaatgtagtcactttcaactcattgatcgatgcgtttgcgaaggaggggaagcttatagaggctgagaaattgtttgatgagatgatccaaaggtctatagatcctaatattgtcacttacaattcattgatcaacgggttttgtatgcatgatcgtctagatgaggcccagcagatttttactttgatggttagcaaagattgtctgccagacgtagtaacttataatacacttataaatggattttgtaaggctaagaaagtggtggatggtatggaacttttccgggacatgtctcgaagaggattggttggcaacacagtcacttacaccactcttatccatggattttttcaagctagtgattgtgataatgcccaaatggttttcaaacagatggtttctgatggtgtgcatcccaatattatgacatacaacactctgttagatggactttgtaaaaatgggaagctagagaaagcaatggttgtattcgagtatctgcaaaagagtaaaatggaacctgatatttacacatataatattatgagtgaagggatgtgcaaggcagggaaggtggaagatgggtgggatctattttgtagcctcagccttaaaggagtgaaacctgatgttatagcctacaatacaatgatctcaggattctgtaagaaaggtttaaaggaggaagcatataccttgttcataaagatgaaagaagacgggcctcttccagatagtggtacatataatacgcttatcagggcacatctgagagatggtgacaaagcagcatcagctgaactcatcaaagaaatgaggagttgcaggtttgctggcgatgcttcaacttatggcttggtcacagatatgttgcatgatgggagattggacaaaggatttttggaagtgctttcttaaggtcgatcagcttttcatgttacttttatattggttatttctaaacgcagtcattatgttctcatgttacatgtgtatgtagatttgaatagcagtagctattgtgtataagcttcttgaacatgactgaagttgtttgtcatttacctgctaggttgcaaacatgagttgatctaaacgctcattgatgcaagttcaaggttaattcccggccgggatttgtatttttgtatgttcattgcatttgcacacggaaacatacaagaagacagggatattgtgggtttagtttcattttagaaggttacatatgtgtttccttagctgacagatactatattgcagcaaatttggtgacattccaaagaaaatatgacaaagaatctgtcagttttcggagtaattagtcaatgtttgtctcatttctatgttgttcttgatctacacaaaagaatcaactttcatggatagaagaaagtctttcaaaataatcacggaagtcgggaagaaagagatctagtacagtaactcatcctcggaaattccggtcactggaaaaagtttgggattggtacaatgccttctgaaactttcttcaaagactgaaagttccgagattgggttgctatgttggatctctgtcttctcaacttcatgtgatcattttatacctcacaagcattgagaaatatgaaagatatatacttactattttcttctgttttcatgaaagttattggtttttgtgttgactaagaacattgaggcaaccattgcctgatattaaagacagatagattcttttttctccttttttgaccgaacacgcttcagaagttttagtagcagcaacaacggaggattctttttgatgtagctgacaactttgtttcttttagtattgagctctttcgtttatgtctttgttttcttattgatgggtttttgatggtacagttctcctccctttccttccactattgattgatttcagtatacatacggttgctgttctgtgtaagcttcatgaagatgactaatattgtgcatttgtgtatttcattgtcaggttaacacaagatcagtggtgagcatcataagaagctcttcccttcatgaagatctcagacttggtttgacatatgattattgttctacagtagatttgttttttaaccacagttggttctgtttcttgtacacaaactttttgcatctgtttctagtagtaatataaatgaaacatgtaaaccagctttagttcggtaaaaattagtgaatgacactatttttggacaccttttagtttggtaacaatctaaaagtcgaagcgaggttctaagtaagttggtagcattgatgtcttcatgtagtgttttagatctcatccttaatggtttaatttaggttcaattcacggggcacatagttcatcgatttgttgattaactaactagggtgaaaatgctaccaaaacacagctctggtggtttgatcatagtgctctcgatgtttttttttcccctgaaagtcaatctccggtttatctataaaagagaaaaaagttatgaccggtttaagaaaaccagctgtaaccgaatcgacattgaaccaactgctctcgattatagggtttactggattctgcgattttgctgttagtgtagtagtctcaactcattgcatggggaagccattttcgaagcaaccaagaagatgatgagatctgttgcggttattggcaagaaatgtcttcaccggcacactgtgttacttaaaggtaatcctcgaactactctttgttgggaacgatcttttgctggtgcgagttctgatgattgcagagagaacttgagtagaaaagtgttacaggatttgaagttagatgatgcgattggtttgttcggtgacatggtcaagtctcgtccatttccttcgattgttgagttcagtaaattgttgagtgccattgctaagatgaacaagttcgatcttgtcatctctctcggcgagcagatgcaaaatttgggaatttcacataatctttacacatacagtattttcatcaactatttctgccgacgctctcaactctcacttgctttagcaattcttggcaagatgatgaaacttggctatgggcccagcattgttaccctgaactcgcttctcaatggtttctgtcacgggaataggatatccgaggctgttgctttggttgatcagatggtggaaatgggatatcaacccgataccgtcacatttacaactttggttcatgggctttttcaacacaacaaagcttccgaagctgtggctttagttgaacggatggttgtgaaaggttgtcaaccagatctggttacttatggtgcggtaattaatggattatgtaagagaggtgaacctgatttggctttaaatctgctcaacaagatggagaaagggaaaatagaggctgatgttgtgatctacaacacaatcattgatggtctttgcaaatacaaacatatggatgatgcattcgacctattcaacaaaatggaaactaaaggtattaaacctgatgtttttacctacaaccccctcattagctgcctctgtaactacggaagatggagtgatgcctctcgactactgagtgatatgcttgagaagaatatcaaccctgatttagtctttttcaacgcattgatcgatgcgtttgtgaaggaggggaagcttgtagaggctgagaaattgtacgacgagatggtcaaaaggtccatagatcctagttttgtatgcacgatcgtctagacgaggccaagcagatgtttgagttcatggttagcaagcattgttttccagatgtagtggcttataatacgcttataaagggattttgcaagtataaaagggtagaagagggtatggaagtcttccgtgagatgtctcaaagaggattggttggcaacacagtcacctacaccactcttatccatggattttttcaagctagagattgtgataacgcccaaatggttttcaaacagatggtttctgatggtgtgcatcccgatattatgacatacaacattttattagatgggctttgtaataatgggaatgtagagacagcattggtggtgtttgagtatatgcaaaagagagatatgaaacttgatatcgtcacatatactactatgattgaagcattgtgcaaggcagggaaggtggaagatgggtgggatctattttgtagcctcagccttaaaggagtgaagcctaatgttgtaacctacacaacaatgatgtcaggattttgtaggaaaggtttaaaggaagaagcagatgccttgtttgtagaaatgaaagaagatgggcctcttccaaatagcggtacctataatacgctgattagggcacgccttagagatggtgacgaagcagcatcagctgaactcatcaaagaaatgaggagttgcggatttgctggagatgcttcaacctttggcttggtcactaatatgttgcatgatgggagattggataaaagctttctggacatgctttcctaaatcagtttcatcatccgctagaaaagtggtttaatagatcaaacatctttcctttaaagcatgaatagactctttgtattgcttgtattacttctcaatgaagttaggtgaggttacgttttcatgttaaagttgttgtttgcaagttgtttcatggacaggactggtactactctttgtcaattccttgataggttgcaaacacaagatcagtgatgatgaaagtcttcaatatgcttattcttagatatattgtctgataatgtaaaaagagaaacaacttgggaagaaaaagaaagcaactttatttgaaacaagatcaaagagatcatctatgtacaagctcaaagctcaaaattggaagaaaaattgaaaagataaatgcattttttacttgaaagcaaaaaaacatcttatttgattcttcagaaagttttcagattccctttggagccacgccgacggagttcaatgtctctgcatttcgaggcctttgcaaaaacaaaacaaaaatgttagatttcagatttctattttcttctttccttgaaaagtgtatgaagaaaggtcattgaacttaacaatgttcctcgggatagctcgtttgagcatcattaattaagcagagacaaaaaaaaaataggtcactgaacttacgtggtgaatgggttaggtcgagtgggatcagataagattgccttagatttatcttgaatctgacctactttacgtaaccaagacttgttgataaatttgtcagcagaggaaacacagttttctggatcatcgacttccgcgacagccgctcttctattctttcttgtactgattgccggtgcatgcataagctgttgcttgaggctatgcccggccattagtaccgctaaaccaacaaaacctcctattatagccactggtgcaaactctcccattatggagaacctatttgaaaaatccattgatatcaaaaactttgttgaaatgctcataactaagtacagaaattcaaaccatatatattagtatctcttacttgttatatgtttgtttggcgccatcggcgactgtggttgcaaaacgacgagagccaccaaattgatttccgaccggtcgcaattggctctatagagaaagacaaggaaattattgaaaaggtaatcaacatttacatttcaatagacaaggaaaaaaaaaaacttacggtgattctgaaagccatctcggtgaaaattaatttgctgaggatttaacaagcttgaagagaaagatttgattatatttaaaccaaaaaaaagataagaagagaaagattgattatatacacagtgaggatgagactatttaggatctttgtaactatgaatggagaaaatttcaaatgacatcttataaatagacatacagaaattaaaccttaaccattgattgaatttttttttttttaataaatttggctaacaatgtttaaacaccacaaaagaaaaaaaaagaagaattttcttcctctcgatttagattttttttttgtgaggaaaaataatattcaccctataaattgtataggtcagttagaggaacatataatgagataaggaaaaatatgaaatcttttgtttaacaaacaagagatgaacaaattgaggaggaatgacaaccattgttactttcaaccatttgcgtcatatgttttcgataaaataaaaagaagaagtaatgatatgttaagtagatcgttgtattacaaatgtagttaaaaaaaaactgtgaaaaagaattcacataatctctagtattttaataaacagtttctggtttatgcatttttcactaaatgatgaaacttggttttatttttaagccgagcaaatataatagtcacacttagacttattacagtgctgatggatgttatgaagagaatttccgatactttatctttggctcatcaaattgtggaaatacgaaataagcctataatgttgtggacatgatctcaaacattagtctttaccaaaatcattcagctcagagtctacttggagaaagcattgcattaccttttctaataactatcggaattctactttgttgcattttctagtttttgcaattagtaaattaatcaaaactttaaaatttatttggtgatacactagatttgtgagctaatgtatatatcatattattgtttaaagaaactatcaatgtttattatatcccttatacgtctcataaaaaaaacagtatgagagatacacatctgatgagtaattaagtaataataagacaaagacatagtaggagcgaaacaacaatcatttgctctttagtaatttagacatatatatcctcgttttcattcttcttgttgcatatcttcgaacattttttcatgcatgagtcatacttttccacatcgcctgttgtcatcgctaatacccaaaacaagaagtaaaaaaaaaaacgttttagtaagatccaaaaaattatagtttcttacagttttttatatcaaatagtcatataaataatattcagttttcgtgtttgaaaatatggtttgcttgttccttcaccttttactaaaatatatatatatagatagatataaatatagttgataaaatatatatatagtttgctagattcacaacaacaacttgtaatatcaatggtttaggacaaaaacattcgtatgatccaattaacatttaaactgttcaactaataaaaaaaaaaaaaatcattttgcaaagtattaagctaatctatatgactatatacgtagataaatccttagttaataatactaagaagatccaaacttacttgagctttttccatggtgaaagcacttctcgaaagaacagccaatcatgcaatatgttgatgatttttcttttgattttggtgaaggagaaggagattttgaaccactatcatcaaaatcagatgaaggagaaggggaaggagaatgatgatgatgatgatgatgatgacgagcctgaaccaaaatgttctccattcccattgttaccatcatcaccaccattaacaaggctacaatttttgtgttcatcattttttttctttactcagagatttatctttaataactcaacaagtattttttgtgaattgtgaatgttgatgttgattgcttggttggttatgtgtatttatataggaagatgtgtgtataagtttgtatagaaggtgacaataattattatggtaaaatgtcacatatagaataaaatttaggtgatattccacataatagaattatattctcatagatatggtttactattatctaatgaggtactagatatatttttaatttaattatttattgtgataatttgggaagcatatactgtatgatgatttttatttcctagataagttactcaatcatgtagctttaatagtttgtagatattcatcaaaataacatgattttgagttgttgtatgaacatataaaataaaattcttaaatttttagtttttgcatttccaaaacagttagaagtaaatcaatctttaattaattgtagtgtgattgttggtagatattatgattttctttgcaagatgagttattccaatcatgtatttcgaataaattctatagatttgttatgaaaatagcataataataagtatttttttcattctaaacctaacatataattcttaaaaatctagatgggataaaccacataaagtttcattgcccacaggagggcgtagaattttggtgtgtaaaagggataatcatctatgaggccccttcatataaaacttcacaactcacaagtcgacctcttctaaaactagtcatgtgaccactaaaagaatttttaacttgccatgagtaaacttcttctaaacaacaaatccttaacgatatatcattacgtaaaacatgcatgggctttttctttttcttccggtaacaaatcaaaaattaaattagtccatattttcacattatcatccaaaggtaaatttgataattttcttcatacctacttcgtctcattttccaaaagagatcaaagttaatatttaataaaaaaaagtagagctaataattttacataagtaaagaaaaacaaagttttaaaaatacggaggtgctccaacatcttctcgaattaatagttatactaattcattaaaatttgttgttgtaattaatgtaatccaaattttgaagacaacttaaagtctttctctttctctcttctttacaaatcaacccagagatttggatttgatttcatacaatagagaagagaagagatgcttaatgtgacaactctctaggttgataacattgttctcattacgttactatatatatgagagactacttacttagacctaatgcaatggactaatgagattctcatgaggctactttttgggcttctttgtggtctctactaatctccactatctttacaatttctaaacaaatttttttctttcacatctatttacgacaaattaaaaaaaatatattctttaagaaaattaaaattatttattttttcccaacagttcaatttttattgcttcgtaataacgatacaacttctttggtttttaacactaatgcatatatttatattttcaaaatattttaatatatgttataaattaacatttaatttacctctgcataacatgaacataattctagttattgtttaaagaaactatcaatgtttattatatcctttatatatatttattaatgattacgtctcataaaaaaatattatgagagatatacatctgatgagtaagtaataagacaaaggcatagtagatgcgaaacaacaatcatttgctctttagtaatttagacatatatgtcatcgctttccttcttcttgttgcatatcttcgaacattttttcatgcataagtcatacttttccacatcgcctgttctcatcgcgaattcccaaaacaagaagtaaaaaaaaaaagaacgttttagttagatccaaaaatttatagtctcttatagttttttatatcaaatagacatatataaacataaataatattcagttttcgtgtttgaaaatatagtttgcttgttccttcaccttttaacaatatatatatgtagtttgctagattcacaacaacaacttgtaatatcaatggtttagtacaaaaacattcgtatgatccaattaacatttaaactgttcaactaataaaaaaaaagccattttgcatagtactaagctaatctatatgactatatacgtagataaatccttagttaatatactaagcagatccaaacttacttgagctttttccatggtgaaagcacttctcaaaagaacagccaatcatgcaatatgttgatgacttttcttttgattttggtgaaggagaaggagattttgaaccactatcatcaaaatcagatgaaggaaaaggggaaggagaatgatgatgacgacgatttgcctgaaccaaaatgttctccattcccattgttaccatcatcaccaccattaacaaggctacaatttttgtgttcaccattttttttttttcttttctgagagatttatctttaataactgaacaagtattttttgtgaattgtgaatgttgatgttgattgcttggttgattatgtgtatttatataggaagatgtgtgtgtaagtttgtatagaaggtgacaagaattattgaggtaaaatgtcacatatagaataaaatttaggtgatattccacataatagaattatattctcatagatatggtttactattatctaatgaggtactagatatatttttaatttaattatttattgtgataatttgggaagcatatactgtatgatgatttttatttcctagataagttactcaatcatgtagctttaatagtttatagatattcatcaaaataacatgattttgagttgttgtatgaacatatatataaaataaaattcttaaatttttagtttttgcatttccaaaacagttagaagtaaatcaatttttaattaattgtagtgtgattgttggtagatattatgatttatttgcaagatgagttattccaataatttatttcgaataaattctgtagatttgttatcaaattagcataataataagtttttttcttctttctaaacctaacacataattcttaaaaatctatatgggataaatcacacaaaggttcaattggccacaggagggcgtcgaattttggtgtgtaaaagggatagtcatctttgaggccccttcatataagcttcacaactcgacctcttctaaaactagtcatgcgaccactaagaattttcaacttgccatgagtaagtttcttctaaacaacacttcaacaaatccttaacgatatatcgtcacgtaaaatatgcatgggcttgttcgttttcttccggtaacaaatcaaaaactaaatattccatgtttttcacaataccatccaaaagttaatttgataatcttcttatcaatacctacttcgttttatttttcaaaagagataatcaaaattattatttagcaaaaaaaataaaaatagagctagtaattttaaataacaaagtttttaaaatacggaaatgctccggtatcttctcgaattaagattcatattacttcattaaaatttgttgctgtaattaatgaaattttgatatgaattaacaaatacatgaaaaaatgatctttcttataagaaagtttttgtagtatcttttattataatacaaaagttttgaaaacaaaattttatcaaatcccaaataaattttgattttgacataaggcgtacattaatattgattttgacaaaaggcgtaaaaaaaataaaaaaaaaataaataaataaattatattaacttcccatcaggcatcagaaatatagatcaaacattgagggtattattgtaacttcacacaaacctcgtcaagatcgaaaccaaacccacacgaactacaaaagaccccatcagagagattccgattcagatgtccgaactgtgagagtcgtcgtcgtcgtcgtaactcagtccgagttgacacaatcttccacttcacgcaagatacaaccatggaattgcttgacatgaactcaatggctgcctcaatcggcgtctccgtcgccgttctccgtttcctcctctgtttcgtcgcaacgataccaatctcatttttatggcgattcatcccgagtcgactcggtaaacacatatactcagctgcttctggagctttcctctcttatctctcctttggcttctcctcaaatcttcacttccttgtcccaatgacgattggttacgcttcaatggcgatttatcgacccttgtctggattcattactttcttcctaggcttcgcttatctcattggctggtaaagcttaaaactttatgctatatagtctctaaagcttgctccttttaatcgattttgtgattttgtatatgtagtcatgtgttttatatgagtggtgatgcttggaaagaaggaggaattgattctactggtactcttttttctctcgatttgatggtttattattggtttatgttcttagaagagtgtgaagttagtaggaactattggaggctgaatcttgattgtgattataggagctttgatggtattaacactgaaagtgatttcgtgttcgataaactacaacgatggaatgttgaaagaagaaggtctacgtgaggctcagaagaagaaccgtttgattcagatgccttctcttattgagtactttggttattgcctctgttgtggaagccatttcgctggcccggttttcgaaatgaaagattatctcgaatggactgaagagaaaggagtaagtgtttttctctctcgttcttcggtctatgtacttgtcgaaaaagtgaggttcttgattgtcttgtgtgtgggtttcagatttgggctgtttctgaaaaaggaaagagaccatcgccttatggagcaatgattcgagctgtgtttcaagctgcgatttgtatggctctctatctctatttagtacctcagtttccgttaactcggttcactgaaccagtgtaccaagaatggggattcttgaagagatttggttaccaatacatggcgggtttcacggctcgttggaagtattactttatatggtctatctcagaggcttctattattatctctggtttgggtttcagtggttggactgatgaaactcagacaaaggctaaatgggaccgcgctaagaatgtcgatattttgggggttgagcttgccaagagtgcggttcagattccgcttttctggaacatacaagtcagcacatggctccgtcactgtgagtaatgatgcttatgaggagatcctagagattgccatatcttataagtcttttaaccgtttcttcttattgatgcagacgtatatgagagaattgtgaagcccgggaagaaagcgggtttcttccaattgctagctacgcaaaccgtcagtgctgtctggcatgtgagtgctccttcccttctttgctatactctcagctaagatttggtttgagaagtcttgaaaagtcgcggttctttattgtttacggtgataaaggaatcatttttacatgtccgcactgcgaattctgcagaaagattcaatctttgtgtgctaaagaaagtaattaaaacctctacttgtgtttttatttgcagggactgtatcctggatacattatattctttgtgcaatcagcattgatgatcgatggttcgaaaggtacgatactagccttcatctttcatttaatgttctgttttgattcagtttcagtaaataagtaatctaaaaacttctccctttgtattaaacagctatttaccggtggcaacaagcaatacctccgaaaatggcaatgctgagaaatgttttggttctcatcaatttcctctacacagtagtggttctcaattactcatccgtcggtttcatggtaactaaaaactcttccctccgtttttttcaacggtgttttcatttcaaaaaactctcatttttgtgtgtaatttttcaggttttaagcttgcacgaaacactagtcgccttcaagagtgtatattacattggaacagttatacctatcgctgtgcttcttctcagctacttagttcctgtgaagcctgttagaccaaagaccagaaaagaagaataatgttgtctttttaaaaaatcaacaacattttggttcttttctttttttccacttggaccgttttatgtaaaacaagagaaatcaagatttgaggttttattcttcttctccttcccaattttcgaaaatgattttattttttctgatatatatctaagctagtccaaagtcaactcgaaaatgaacaaaaaggattaaaaagttcatatattttttggttgaaagaggtcaagtttattcgaatctgaatttcttttaacggaacaacaagtgtgacaaaacaagattcttctccggcacagtgttgttctttgtttaatctaaaagacattttttgggaaattaataatattatcatcttaagattacatttaggagacatgatatcgatttagggaaatccgaatctcggaaagagtgattagggtaataaacagaagctttaggagaaaataattaaggttaaaaagttattaatctttgtgtaaacagatgccagaaagaaaaacgttatgattaagaaacattagcgagacgatgagtggaccatacattaatatgtaatcaagtcacatcaaatatatggtcgggaacttactttattcatagtgttcttgtaacaaaaaaacaattctattttatagaatagtttcgattatatggttcacttaattatttgacatgttttaaccaatttgaatgcaataaaaaaaccgtatggtacaaatacgataaggcgctagatgctcgtctaccgactagtgagcacttaacgcgtattagtacattaattagttttgtttaatcaaattataaatcctatctacacacctgaatgatatgtataatataacaattagcatcaattcgatatcgttaaaagtattcctgaagatctaacatttggtttactaaagtaaattcaagagtgattaactgcatggaaaagtttgaatgagatatgaacaaccaaagaagaaaagagaggccgtgtcggccatatgcaccacttttttacttttttagtcaacaaagccataacaacaacaaaaaactaggttacttcatgttgacaaaataaataattaattcaaagttttctgctcgttcaaagtccatgctaaatcgactttcggctattcttggagctcggaaaaattctgacatttatctttcatgttgtaacttgtaagacgtaagaaaaaggaactggaatttataatttctgaataatttcttcgtacgtaaaaaagacaaaaggtacaaaaacgactctagagcaaccaacatgtctcgctcatttgaaaaactagatagaataacaagctaagttatagatgcatggtgaatgcaatttatctccccctccaatagtttgtattttgtattggaaacaatattgtccaactttaatgcttttgttgttttgttattccatatagatatattccattatttaacaatttgtcgtatgacatacaattcataataactgacagtccaaattgatactaatctactaattttgtttatgttacgaagaaacccgtgaatctctatagacagacaaactagcaaaccccacttggccacaagctcttagcaaactaaaaattaaatcacatattgtggaatattagttagatttattatcttgtaaaaagttattatttctttattatttttaatatacttcgatatagtagattcaatgtattagtcacagattagatgtcataatttatttcttgtatttaaaagagaaacaactttaagcgtactatgacttcgatcttagaatttagggaagtacggagacaaataaaattcgctacaaattgtcaccttttcatgtcgacttcaccaatattcacattcaacaaataaatcaaccagaataaaattatattgactctaaaacaatctcgtacatcataaagcacaacttacactgtaatcaaagtacctagaataggttattctactggttgaacctcttaaacataagagagttttttttggaaaaatagtctatgaataaagaacctatattatgtacaatgatttgatttccagtaaaaaaggatatatatatatagcaaagatcttaaacttttgttttgtctcctacctatgaagataattggccgctatgagtcttttagaattataaatttaatggaccctagcgatatcgagaaagatatgatcaataaaacacaaatgtataaatattgcgctttccttatcaatcttctgaacaataatactataatagtcgtgtgtgttcctctcttttttcgtttgttaaaaagttgaattatactgaaaaactgataaggcttggcatcaaaagagcttaagagccaaaagaggagttaaaaaaaaacgatttattttgaaagtgtttcccatcttacatttattttaaccctattctatttttttttttttattgttttccgtttttctttttcatgaaagctcagattttaaaacttgtgtattgtttacttattaattcccttaatttaacaacttaacaattcaatcataaccaccggtcaaccgtttatattaatcaacccgccttttacattagtgttactgtatataaccgttttcttttcaaccaccgaaaacttctgttttaaagaaattgtgttcaccactagctagctagcaccatatatactgtatctatcttttgtgaaattaataagacgttatatagctttgacaaagatttaagcttatagagaagacaaaaaaaaaaggacttttcgatgattcaatgccaaaatcagagtcaattgttgagacatgtcaaatttaagtagtgattttttttacatcatgacactgctttagcgtcagatacgatgacctgagcattatatgcatatttaagtatcgatattttttaatatcgtgacgctctcacctgtatatcagtgtgtgtgagagtgtatgttcaaaaatctagttactctataagtatgattcaactcaaacacacacacacacacacacatatatatatatatatatatattgccattctatacttacaataagtttattttctaagccagaacggattttgtttgtcagaattcatacaatacaaacaagagtataatacaattttctatcatcagatcatagtggttatcagcaaaaaagttgttacaaattagagaaaccttacttatttatgactttatatgcttaaacatatatactacaaaacttttatcaacacaaacaatgaaagagaaaacaattcaactacttcaaacttcactaaatagtaaatactcaaattaaatcccactaaattaaaatcgtgctttatctctggtaactgtcctgcttcccaaaacaaaaaaaaaaaactatgttcatgcatttcccttctgaaattgtacagtatgtatagaaatagttgcaaatttcataattaatttatcatgagtatagatctggtagaaatagttgcaaatttcataattaatttatcatgagtatagatctggaactatatatacacacaaaaaaaaaaaacaatgtcacttaaaaacaccttgattcatcaatctggaagaacaagcagtataataaaagtagtttttagtatcaatttttgatctttagagataaataataaggattatattcatgaagttgttcatatcatcaaatcataagagacatcacaagaaaaaatgagtagatagactaattaataaaaaccctaatcaaaaaattcaagaacgcaccagagccctaattcaagaacactccaaaaaaaatgtgactaaaattgtttgaaaagatctctcttcttgaataaaaaaaagtgaaaatcattacgattatatatttaacaaatcatctctaacaatcataggataaagaaacaaagatgactagcataaacgtgaacaaaggatccaaaaaagatattaaactgctttcaatcgatcaatagctccacaagctctctccatcagaattctctggcgaatcatctgacggtggagatcccatccacggtggagccaccatcatccctttggccatatccgctagcaaaccaggcatgttcaatagctcttcttcatccacaaaccccatagttgaagattccgccgtatcataaactttatcttccttcttttgacctaccttcacggccgctccagccgcacccctagtcgcagcagccgcagctgcagcgcatctgatatgagctgcggaagaggaaaggggaatggggtaagatcccagggaatccgggaagttcaagagagtgtctccacctttaagagctaacgccgccacgtcatatgcggcagcagccatctccggcgtcggataagtcccaagccagacacgtgtagtctttttaggctctcggatttcagacacccattttccactccgacaacgaattccccgataaaccggattctttttccggcgagagatgtcggtgtcagtggccattaaagtattaatatcattaccacttgcagtagaagaaggagccgcaaaacaaacagtagtagtagtagtagtgatagtatcaagtggacaagggttttcacacgtggcagagtcagagaggctgtcaccgcacgtgggaactggcacaatagtaactgacgatgaagtagaagattggattatagctttaggttcagtgataggattgttagggtcagccatatatgtataattaatatacttgtatatagtatatatgtcaacttatgtgtttatttgttatatataagtagatatagggagagagatatggatagaaatagattagggttttatgtgatcagaaattaaggttgttaaatatgagatgagagtgcgtggttattgcgtggggtttcccaaaagtgtgttttgtttgtgtttgtgtttggtggggatttttttttgtaatagctgtaagaaagtaatacaattttaatttatttttgtttaaactttttattgatttcagacctttttttgtgtagtcaattaaaatggatacagacatatgtatgtgacaggcgattttcttctcttcacatctaaagccaatagattttcatagaaaacatgagaacaatgtaacattttcatgttcgaattagtttgcagatacaatcaagattcagccaaaatgaaatacaatggtacaaataccatcatggttatattgcatgtaattcaaacacatggcattagataagaaaatgaattgaaggcaagatacaaaatacatgggtctggtctggataaatctgaatccaaatatttaggtttaggcccaatagcccaatatttatttgggcatatatatctttcgcgagggttcgttggccctattgtcccggccggtgtaatgttacattagccgttaatacacacacatatgaatatcttcccattaattattgactaggtgtttctgcagtttaaaccatccattttagtttaactcaataaccaagagagccactgactcttacctctatacagtgacctcacctcacaaatcatcctctgctgaactttgtttttttttcattcaaccagtagagttaattaaccatgtttggatatagtgttattcttttcttaaggatatatagggtaattactttgtatattttatacaagaaataaacattacaatataaagagctacaacggttaaagattaaagaattaaaatttgtgaagcagacgcgcaaatgactagtgtttaactcaacttaacagtattaactattaagcatttactccaacaaaatatgattgggctcttgtcccgaccccgccatatatgctttctataactcatctcattttgtcatatatacatgattatcttattattattagatgaattgcaggatatcgatcgatttctctaaaattgttgtcacttaatttcagtggaaataagaaacttacagaaagtaataacacttaacattaaaataaacagaagatagttttgacatttttgaaaacgttttgacaaatattaaaggctaaaacagtaaaacatatatatatgtgattcaagtttttattacaacacattcattactgaacaaaaatattaagaaattcaacgaaacttaaatgaaatatatgagacgttcatgcacatcacatctttttcataggtattttcgtatacactagagtatatatatagggttgcaaatatggtagatcaattctaacgttttacgacttcatgtagcttttaattttttcagatgttatattaaatagatttcgtaacccaatcatctgttggtgacggtaagttcacaatatatactactagttaaaatgccaactaatttccttttagtttctgaattcatttttcttaataaagacgattacatgagaattaggaaaagaaatgagtgcctacggaaccatcatacactacagctagttaaagcggatcaaagaagtaagattaccatgagagtgaatctcggagccacaaagaaagagtatataataagaacccttcaaactctcaagtcttaaactgaatattcacagctagtttaataaaagaaatgttacccccacgctaaccccacgtgatattcgcagctagtttaattaagaaggcaacgtggataaaattcacccaatccaaaaaacgcattaaaattcaatttcacgaggaaaatatatataagggctccaccattttttttttaacttttattgtacttgtctcatattgttccatgatatttttaaattcttatgtaaacattatttcttgttgatacaaaatcaaaataaaaataatggatcaaatatttctgtgattattaatgttaattttcaattttccaataaataaagtgatgtataaaacatcaaattcaaactcgtaaagactaatcgtgtaacaataacagaaacttaaaatatttctagtttattgtcaataattttccaagtttgtttgaaaagcattttacattcagttctatgatatattacagagtatataacacagaaaaatgtttgctgaaaatcaataattatttttcacttcaaaaaatagtgtgatttattgatttacaattttaaatcactatcaaacatataaaacattattaacaaacagctaatataaaaaaaaggatgtttaaatattgccagcttcttgtatacagcctatggaggcagcgaaacaatgttcttcacaattcccttcggctttccgtctcaggggtctttcgtttgattgatcgtgaggttcgcaacgtcatctcgtcgagaagacataggaagcgttggcgggagcttatggtgctttggatccgttagctcttcccaaatcttttaaagctctattgtaaccttgtttttatttctttttggcttggttagtcttctttagtactcttttatattacctaatctcatttttatgatatttacaagtttagcaaaaaaatatattgccagcatggcaatgatccacaactaaaagtgaatcagtttagtatgtattacgcgcgttcgattcgttctttgtggttcccaccaaccaacgcctatatatctcttctcacttcactcttctacttcactaccacaaaacagagcaacacacaacacaaagcttcatttcaattctgtttcgagaaccctttgaggtaatttaagcttttcttcttatacattttcaccattgtgaagtgtcttctttgatattttgaattctctgtcttatattgcattttactctgttaattttttaacagagttataaagaataaagaaactttcatctttttgttttttacttttacttgacattttactctgtttcagcagaaccagatcggagatggaaaacgacgatatcaccgtggcggagatgaagccaaagaagcgtgctggacggaggattttcaaggagacacgtcacccaatctacagaggcgtgcggcgtagggacggcgacaaatgggtatgcgaagtccgtgaaccgattcatcagcgtcgagtctggctcggaacttatccgacggcagatatggccgcacgtgctcacgacgtggcggttcttgctctgcgcgggagatccgcgtgtttgaatttctccgattctgcttggaggttgccggtgccggcatccactgatccggacacgatcaggcgcacggcggccgaagcagcggagatgttcaggccgccggagtttagtacaggaattacggttttaccctcagccagtgagtttgacacgtcggatgaaggagtcgctggaatgatgatgaggctcgcggaggagccgttgatgtcgccgccaagatcgtacattgatatgaatacgagtgtgtacgtggacgaagaaatgtgttacgaagatttgtcactttggagttactaaaatacgtatgtgttaaaaaaccaaagatcgtatgtgtatgtatgcataataaatgggcttaatgatgggcatagatatgataggtccagcctatatgttaaatgtgttttattttttggtttatctagtttcctaggtatttaccaaattgtattagtataagttttattaagaaataatcaaaaatgttgttgccatttgagacaatcttacctaatatacatcccaaaaaaaaaaaaactttgaaaccctctctctcgaagtcaataactcatgagacaaaacaacaactcaaataacatctttggttcagattccattcgaagaacactcaatagtgggctttgaaatctcaattgggctaaataaaaggtctaaattgaaaggcccataattcacaagaagacgagagttttgtccttttcttgtttttgtttcttaattactgagaaaatatggattctctatccctgtctcttccatcgggttctttctgattgtttctttgctattttcagctttcctgagctgtgttggagaattcaatatttttctcagataaataaaatggcaaatccgaaaagaaaacacttataaataataaagctgttttatttccagacaataatgggatgtatgtaacccatattatgttgaccagagttgtatgtactataccatgctcacaaaaacaagacgtatcgtattcgtactatcgtgtcaagaaaaatcatattttttttcataaccggaaaaatcccattattggttaagatctttttttttttccagtagtagctataaagtttaattaagaatttaagatcgatagatcatgcagtaaaatcatatgatatcaccatgaatcggtcgagatgcatgtagtagaatcatacaatgtaattttcttggttagaaaatattctgagtatattttatttgtaataaacggaaaaagaatcccgccacattagtttatctaacatgcgaaagtctcattccaaagtttacaaaaaaaaattgatgttttttttactttctcttcctcttttgttgttgccagtgactatgatccaatggtcacaaacggatcactataccaacgacaaacgtggtcttatttaagtattcgactcacggatatgatctttttgattaagtataactttcacggaaaaatccatttgcagaaagcttatccctataaagcgacttttaaaatattagctagctttccatgcatataaaaactttaatcttcgacaacaaaaaaaaaaactttaatctcttttttgctttcttattaagatttcatatatgtaaagacagtatatgacaatgtaagttttctgccttcacgcaaccacgttgcgagtaaccaacttaaaagacaaaatatttgaagggaaatgcccttaattaagtggactagatatgaactaatcgaaattaatccgatactcttcaagtttccctcgtatataaaatcaaatacatttgtacttttcttattttggtagggtcaaatacattgttactaatactatagtatttgttttctttcaagtaatgacgatgtgtaatactaatactatatttaaaactttttaataagtgaaaacaacttctttgattattcatttttcatcggcggacaaattattaaagcgaagttccttgtctcgtgcggctatttggcaaactcgttaaagcaatccttttagttttatgtatcgcagaagtaggaccatgcatgaagttaacttttattgccaatggcacgacccggttgcctattttacatgagaggattggctaaaagttacaacgatatttcaaaaaaattaactgacacaaacatttttctatctccctaatgtatagcagtactctgcattctgcaaaactcgttaatgtagatttcttactggagatattcgatccatatctgcaaattcaagttgtttccatttttaaattgtgacatagtctatgtataaacacattacaaaaatgatgtccttatctatgtgaatataaaaatgccatgcatatatatagtcagagagagtggtatttgatagggattagggaacaataccatacgatgagtcagaaacagatacatacatcattattttaatagtgcaaccagaatcttaatctcattattacaagttgtgataaaaagaaaaaaatattgaaactaaaaaaaaggtacttcctacaacatcagaacatgagattctagtggaaaattataggtcgctttacaaaaagcggacccttggttttttttttttttgttttacttccacaattttcgaagtataaatttacttacttttcaatcttggtttaaattttgtttcgtagttaatacaagtactgtttgtctttctttcatgaatcagtgtaaacggtaaatgattcaaaaatgcttgaaattcggtattgattaacgcaccttagaagttgacaaattaggcaaaaaaataaaggaatcaaagaataataatacaacgaataatgaataccaattgtcgattcatgttgatgggttgatcaggttccaatgcaaaaaggaaagaaagcagcgtagaaattacgcatcttaatttgtattgtgacttttctcaagtaagatatgaatgaaatcaagattgaatttgtctaaatcttttccgattctaatgtttacgattgttagtcttctaagttaaccactttgaaagaaaattagtgttgaagttaaattttttggtaatgtatgaatgtatgatcccgtttggtgaagtgatatgtttgaaacaaaatttagatatgaaagcaaagatttcttgtattacaaacggttacattacttgttgagaactagagtttttactttgtagctttcatgatgatgtgttatattgtagttgccgtgttacaattaacaaatccagactcgtgcatgaattgtagtaaatgaaaaaaaatgattatcaaaaacgtccaatagcttaattatttttaacgtaaaccaaacgttttaatgcatgcaactttaaatgcgaacaaagaaacgtataattttgagttaagaataatatattgcacacaaaatgatgagtttacagttgtacccctctttgactgctgtcgtcacacttcgacctttgtacgattctttgaagacttcaggagaaagctgtaaatgagagatcacgaatcaacacaaaccttattttcaaattgttaacttaacatatagtagtaatgaattaatcgacgaaatttttattctaaacatgcttggatttgaaaagcaactgttaatttttgttcaatcataggtgaagaaaatttattatatccttatttttagtagtctagtgtctagtcaggtgatgtgagcctacataatgggtcatcaagttgtcaaactcaataatagtttttctcacaattttatttatttatttctggcattataaatagttttattaactagactaccccaaatgtttacagtttataaggttaataagaaaatttactgggacatttttaagtctagtttattctactacatgtttttcaaaacaaatactcattttgttttaatttaattatcattttagcacttaaatttaatctcacaataattatcgtttttagttttttaatgcaaatgtttaataaaaatgtgagtattaatgtcttgaccaataatttttttagaaactatattgaacaagggtaaagtagaaaatttaattgtttttttttattttcactgcaaaaaatcttaaacgacaaataattttaaacaaaactattttaataactaaccactaaactaactatataactgttttacaaacgaaagcgtgaacttcacgtaaacaaaaattcaatttcacgccgccgacaaaaaaccttaaacgacaactaattttaaatagaaggagtatattttagtaataattatatgttaaactgttttaataaataaccactaaactaactatgtaactgttttacaaacgaaagcgtgaacttcacgtaaacaagaatctaatttcacgtcgccgacaagaaaaactgatttcacttatatatcttgatttattaatggacattcacatactctcaaataagattctagatcttataaattttaatctatttttgtctcaattaatttagttatttatcacatttcgcctcttataaaattatatgataattgtctaagcagctaactaattgtaattgtttttcaaacaaaaaatatattttaattacacataatttttttatcgaacaaaaatatattttaacgaaatataaatgtttcgaatcaaagataacaaatttatagcctcaactatacgtaaaacaaaattttattttacatatcatactttgattgatactaacacaaacttcacaaataaattcgtataattatgtaattttagattatttagagattataactagtatttagaaaaatcgcaaaatcatataagaaaagaaatggaatttgtttttggttcaaattatatttttttttcccgctattcatattatagttatgaaccaaaaatcaagctagaaataaaaaccactaggattttttttttttgctaagatgaaaatttagttatacacttatttttatttatttaaatattacattaaactaataaaaagtattaattattctaataactttttgtcagttttaaaattaggccaaaagtaaaaaactaatacagctaatataatatacttaaggaaggatatttcaactttttcttttcttcccagtttcagagtttatacaaataaggtaaaattcgcagaaacagaaaatcataaagtaattaaaataatacaaccgaggaagtaaaaagatttccaaaaggtaaaaggtgtactcgtaaagtaggtaaatagaggtacaggtcaaggggtagtttcggtatttacactctttcttcttcttttttttttttttttggtgtctcacattccaaagtccccattggacttagagaagagtttttttttcgttttctctgctttctcactttttcccgtttcctttgggaatacaaacggcggcttctcaaaagcctccgatttcgatttttttttcctctctttttttttgttctttctttagagtctcttcttcaacttcttctccggcatcttccgtcggagctaaggatcagaagtttttgtctgtgcactgtttcaattggatcattacatagtgaggattctctgttcgacgaaacgagtaagtaactacattgttgttcttcctcaattctcttctggtttttctttcgtttttttttttaaaacctttttcggtaattttctttttatctctttgaaacaatttgagttctttttttttttgattgatcactgtgtctgattccttatcacggttcttttgtttaaatttgatcgatcgttgtctttgaactccgattttgtttctatgaactttgtttactttggatgattgtgaaaagttaagtactttggtttatgcatgttcttatgagaaatcgatttctttcgtttagagatcatcttaaggcggcgaatgtttttgcactaagggtttgtgtgagtcctttagaagaacatttggaaaatttgtccttttttttttttggtcagtgaatttttttttttttaatccatgaatagtgtatgttcaaagattgaacctttttgtgtgtatgttctgcagttttttttctttcttctttttctgaacatgtattctcttatttttttgggttcatgctagattctattagtaaattcaatttcgaatctataacttgtttttgataggccagtcacagaggaagattgtggtaacacttttgtcccttaacaaaagtgtctgtttctctttggtcaattttttgatcagagagagtttgctttggtttttgtgttctggtcaatgaaatgctaaagattggtttttgtttcatattctgctgcacattagatttgatgatagagggtacagatagaaactgatcttttcgacgatttatccgtgagttttagctctgttttatgttacagaagtaagtgttaattttcaataatgtgtgttcaaagtttgaactattttgtgtgttcgtcaaatatttttgagctagaatcttcttccctgaacatgttctctcttttctttggatatatgctagattctaagtggccactcacagagatagtttgtgaagttgtctgtttctcagtggttagtattggtcagagcgagttttttggttttgtctgtctaaatgctaaatattggttttgtttcatattctgcacattggaattggtcactaaaacttgcttataaaaactgatgtttttacttacgtatctaaattttccttactgatggttttttttcttgtaggaaactcttcaacatggaagacgattgtgaggagcttcaggttcccgtgggaactctaacctcgataggttttagcatttcaaacaacaatgatcgagtaagtgttgtccttatttattcttcttgatttgtttatgagtagatggagcaaatatttaatgtaatggtactttattataggataaaatgtctgtgctagaggttgaagcaccgaatcaggtgactgattctcggctaggattaccgaatccggattctgtctgcagaacctgtggcagcaaagatcgaaaagtttgcgaaggtatcataaagaatctggttttggcaaatattgttccaatcttttagctcattttatgattagttccctgagtttgctacttttctctctgttttagggcatttcggggttataaacttcgcgtactcgataataaacccgtatttcctcaaggaggtagctgcgttgttaaacaaaatctgtccggggtgtaaatacattcgaaaaaagcagtttcaggttcactagtctttccaaatcctttgttggtttgtgtgttttggaactacatatactaatgtcatttttgcttgatatagattaccgaagaccagcctgagagatgtagatactgcactgtaagaatatatgattgcaactaattttctcagtttaaaactttgttccaacactaattttcggtttttgttgttgttatatatcagttgaataccggttatcctctaatgaagtttagggtaactactaaagaagtcttcaggcgatccggaatcgttgttgaagtaaacgaagagagtctgatgaaactcaagaaacggggagtgttaacattgcctcctgactattggagttttttgccgcaagactctaatatcgacgagagctgtttgaaaccaacaaggcgaataataacgcatgcacaggtatagaagagtgaaatgtaccatctccatgacttcttactatatatagttttctgaaaatttcacctttttgcaggtttatgctctgttattagggattgatcagaggctcatcaagaaggatatccctatgttcaactctcttggtctgacatcttttcctgttacaccaaatggttaccgtgtaaccgaaatagttcatcagttcaacggagctcggctaatatttgtaagctaaaaacgcttgtttatataatttgttatcatatactatggtatttctcttatcttttcgagtttctgtcacatttttgaaggatgaacggactcggatctacaagaaactagtcggctttgagggaaacacacttgaattgagttctcgtgtgatggaatgcatgcaatattccagagtaagttagtggttcctgatagatttaaactcttctttctgttctgtgaaggttagtagtatttcttgttttttgcacagctcttttcggaaactgtgtcttcgagtaaagattccgcaaatccgtaccagaagaagtctgatacaccaaaactttgcggtctaaggttcatgaaagacgtgctgctcggtaaaagaagtgatcatacattccggacagtagttgttggtgatccgtccttgaagctcaacgagattggcatacccgagagtatcgcaaaaaggcttcaagtatcagagcatctcaaccagtgcaataaagaaaggcttgtcacttcctttgtccccacactgttggacaataaagagatgcatgtgagaagaggagatagattggtggctattcaagtcaatgacctccaaaccggagacaaaatattccggagtttaatggatggagacactgtgctgatgaacagaccgccttcgattcatcagcattcgcttattgcaatgacagttagaatcctcccaacgacttctgttgtctccttgaacccgatctgctgtttgccgttccgtggtgattttgatggagattgtctccacggttacgttcctcagtccattcaagcaaaggtcgagcttgatgagcttgttgctttggataagcagcttatcaacagacagaatggtcggaacttgctttctttaggacaagatagcttgacggcggcttatctggtcaatgttgagaagaactgttatcttaatcgagctcagatgcagcagcttcaaatgtattgcccatttcagcttcctccgcctgcaattatcaaagcttctccttcgagcactgagcctcaatggacgggaatgcagctattcggaatgctgtttcctcccgggtttgactacacttatcctctgaataatgtagttgtgagtaacggcgagcttttgtctttctctgaaggatctgcttggctcagagatggagaagggaatttcatcgagagattgctcaaacacgacaaagggaaagttcttgatatcatctattccgctcaagaaatgctatctcagtggttgctgatgcgcggtttgagtgtgtccttggcggatttgtacctttcctctgatctgcagtctcgaaaaaacttgactgaagagatatcatacgggttgcgggaagctgagcaagtttgcaacaagcaacagctaatggttgaatcttggagagatttccttgcagttaatggggaggataaggaagaggattcagtatcggatttggcccgattctgctatgagagacaaaaatccgctacattaagcgaacttgcagtcagtgcttttaaggatgcttacagagatgttcaggcactagcatataggtatggtgatcaatccaactcttttttgatcatgtcgaaagccggcagcaaagggaatatcgggaagctggttcagcacagcatgtgtatcggtctgcagaattcagcagtttctttgtcctttgggtttccgcgtgaactgacttgcgctgcttggaatgacccgaacagtccacttcgtggcgcaaagggaaaagacagtaccactactgagtcatatgttccttatggagtcattgagaactcgtttctaacgggtctgaatccattggaatcttttgttcattcagttacaagtcgtgacagttcattcagtggtaatgctgatctcccggggacactgagcagaagattaatgttcttcatgcgggacatatacgctgcttatgatggcactgtgagaaattctttcggaaaccagttagtccagtttacttatgagactgatggtcccgttgaagatatcacaggtgaggcacttggctcactttctgcttgtgcattatctgaggcagcttacagcgcgctggaccagccaatcagccttcttgaaacttcgccgcttctgaatcttaaggtcttcctcttcttattcttcgcttcttgatttattgaatcatttccacttaagtcgtttgcatttctctaactagattttatctctttctacagaatgtattggagtgtggatcaaagaaaggtcaacgagaacagacaatgtctttgtatttgtctgaatacctttcaaagaaaaagcacgggttcgaatacgggtcacttgagatcaagaaccacttggagaaacttagtttctcagagatcgtttcaacatctatgataatgttggtaacttttaactgtctatatgaatctttttggttaagggcttctcttaacaaatgtttattgtcttcttggttcatagattctctccaagttctaacacgaaagtaccgttaagcccgtgggtttgccattttcatatctctgaggtataaactcatacccatataaagccacaaacatatatatatatgtgtacagattctaatgaacctcttctttaatttcacagaaagtactgaagcggaaacaactgagcgcagaatccgttgtttcatctttaaacgagcagtacaagagcaggaacagagaactgaagcttgatatagttgacttagatatacaaaacacgtaagaacattcttgaatttgtagcagacatgttttgtttcgcttttatgtctattagaaactgatttgttatacatttatgtgttgtggattagaaaccactgctcttcagacgatcaggcaatgaaggatgataacgtttgcatcacggtgactgtagttgaagcctcaaagcactcggttttggaactggatgctattcgtctcgttttgatcccttttcttcttgactctcctgtcaaaggtaaaaccggatgaaaaataaagacgagcaagctgaacagatcgttgttttgttattatcgttcttatgagttctatcatctgtttttgcaggtgatcaagggatcaaaaaggtgaatattttgtggactgaccgaccaaaagcgccaaaaaggaatgggaatcatttggcgggtgagctgtacttgaaggttacaatgtatggagatcggggcaaaagaaactgttggaccgctcttttagaaacctgccttcccatcatggatatgattgactggggccgaagccatcctgataatatccgacaatgctgctcagtttatggaatagatgctggacgcagcattttcgtagcagtcagtatcggtttctttaacattttcttggtctctctcgcagcttctaaagtttgaagttttttttttgtgaccgcagaatttggagtccgcggtgtcagatactggtaaggagatactaagagagcatctgcttctcgtagctgatagtctctctgttacgggagagtttgtggcattaaacgccaaaggttggagtaaacaaagacaggtcgagtccacgcctgcaccttttactcaagcatgcttctcagtatgtaacaaaatcccatttcttttggttatacaaagcttatataggatttcatttgatacttagtgcttgcttaatctctgcagagcccaagtcaatgctttctcaaagctgctaaggaaggtgtcagagacgatcttcaagggtctatcgacgctttagcttggggaaaagttcctggtttcggaactggagatcagttcgaaatcatcatttcgccaaaggtaaattaactttacatcttttgatccgtttagaccacataacttcagtggtctaatttgtgtctttatgcatgccatcaggttcacgggtttactacaccggtagatgtgtatgaccttttgagtagtacaaagacgatgcgtagaacaaactctgcgcctaaatcagacaaagccacggtccagccttttggcttgctacattccgcattcctgaaagatatcaaggtactcgatgggaaagggattcctatgtcactgcttagaacgatctttacatggaaaaacatcgagttgctttcccagtcattgaaacgcattctccacaggtaagattctactgttcaaaaaaccgtaaagattctttcttccttttggctgatgcaaattacaatggcttaatctttgttagttacgagatcaatgaactgttgaatgagagggacgaaggacttgtgaagatggttctgcagttgcaccccaacagtgttgagaaaattggaccaggcgtcaaaggaatccgggtaaatcaaggctcatatgtttcagaatccttaaagacataaagatcctgaccatgtttcttttataggtcgctaaatcgaagcacggagattcttgttgcttcgaggttgtaagaatagacgggacattcgaagacttctcataccacaagtgtgtcttgggagcaacaaagataattgccccaaagaaaatgaacttctacaagtcaaagtatcttaaaaatggtacactcgagtccggtggtttctccgaaaacccgtgaacagccaagtaagagtaaaaaaaaagactggctcttctgcggtataatatcgaacaatgtatgaagttgtgtgtaattttgtttaaaaagtgattagatagatataggggaaaagccttttggctttgctctaagcttctttttgctcctttcactatgtaataccttttgccttccacctaaaggcttaaaggttaattacttagtggaagcagcaacgagaagctggcaaaggaggcttctgttctgtttctgtttctgtatgtaaaccatgcaaattccggtttgactatgaaatatccggttatgtttctgttctttaccttgtttatatccgtcttcatgcaattgcaaatgatccttattacatcttcggttttccttatgagaagtgaaacttagttctcttggttatgctctgttttttcctggtttagatcggttctcaatagcatacagtttgttctttctcttaaccggtttagattagttttcttgcaatttgcttatgattcttataagtaaccaaagcctttaagtaatactaatctaaatatctccacatattatcttcaaatgtattgatcagagaaaatccccaacactatcatcacccctcaagaaaatacaggaaacattttcgaaggttaatgctcttatagctgcagtaagttcactcatattgtactaaaatcatttgttactttgttttaaagctttttttgccaaggtaacaaatttgtaggtaaaaactctctttaatacctaaacatctcatttattaatgatattatattcatagcaaaaaacactaatctcaatcaccatttcagcaattgacttaattataacttttttatgtttggttctaaacaactttaaacaatattatgatgatatacactaattctatatattgttttaaaaaaaattctagatatttcatgtagcttctacagagttgcatgtcatagtgtactactcaatactttcttacacaggtccacaaatgcacttgcttttgttatgatacttttatataaaatattaattaaacgagtttttttttttgtttgtttatctctgtctagaaagtgaagttacacatgtcgtgaatacatatcgccactagcttaagcattttcttttcttcgcgatcggagaaccttagcaaatcaaaagataagatttaaatgttctaaccactaagaagtaaccccgtagtgatggacattgtgaatgggtgattcttgaatgcaacagctattcggttacctaaacaactaaaatatagtattctttattttgtgtacttctattaaatcaggagaatatctgactgacaccatacataatcatataactgcagataaaatatcggtttttttttgttaaagtgtcgttaagttacttttggttctatagtttgatcaagtgagtatttaaacactactaagtaagttactattggtactagataaaattttggaaatatgtatgtgctgccaattaaattatctgtctcagtggagtgttgcaaatctacaaagtactattgggtattaattagtacacaatagtactttgtagatttacacgtattcatttatttttaacaccagtaattttttttggttacatacttagatgcaacacactaattgaaaaagaaacatgcaaaatacacatgtaatagcaccatgacgaaagtagcatatatgcatcaatagctataatacatgtataaattgataaggaaacaaaagaaatgattggcctagcaaatttaacgagtatcaactttggtcatattttgaaaaacgagtatcacgtgaaatcacggttgtgaatattttaggtaacttatactaaaagcattgtattgtaggtggccaaatatgtgtatataattttctctttattcttggtaactttttttgtccaaccctatttttcattataattttgtccacattctcatcatactaaattactaacgcacatacgcaataagaaaaaaatgtctgccagattattaaatattccactttccaactaaaattgtgtcgctatcttttgtaattatgtaaaaataaaataaaaaaaaacaacgatacaaattgtatacctacacatatgacatgtccattacaataccaataaactgaaggcaaattgaatacgattccatgactttcatttattatacatataaaattagggaagttgtaaataatttaggatttttctcaaaaacaaataatatttcgggttatgtgcttaattagatcatgtgtaattagaacacgtataatatcactatcggaataacgttataaattagtagctatcaacttattatacacataaaattaaggaggttgtaaataatttaggatgtttcataagaataaaataatatttcggatcatgtgcgtaattagatcatgtgtaattctataacaacacgtataatatccctatcataataacgctacatgagtagttttctttattaatatgcagccgtcttaaataatttattcctctttgaccccaaaacttacacattaaccaaaaaacaccccatagaagttttatagaatcacgcaaaaacccccttttacaaaaacgtgccaatttgaggacttaaagcatccacgatttgattgatatttcctcaatgattgggtccgagagtaaatgcgattgataaatgatcacattactcgcgataagagtctgcgatctactataagcaaactagtcgtcttttgattctcctcttcttcacctttttaccaatttcctcgcttacaagattcaaagggtttgtgattgagagaagctttaaaaaacccatctttggtgtttgattctctgtttatttaattcataaaggaaggctcttttttttttgtttatttcaggctcattacgttgatggtcatctaaatctcaagaagacaaagttgcgatttttgcaactgggtttctctcttcaggtactgagtttttgttgttgattgtgagaataaaaaggaaagtagacaaaagaagagaatctaggtttttgattgaactccattttagaaaaagttgaaaactttttggcgtttttcatttgtttttcaagttgtggaattttctgaattggcaaaaaaacaattttgtgactactaaagcaacttgtcttggctgcttctttttatcaatcatatatcattgactccactaagatctagtatttatataatattttgtgtaggccttattaccttcatgctaagctcgtgtcttctgatctatttgtaattattttaatctattttttttcagagatttaatctgtataagaagatctcaagatcagcttttgtgtattgaagaagaactaggaagaacgaggatagatacaggtattatttttatatatcaagatctctgcttttggcttatttgtttatcatctttttcacttgaaatgcacgagttttaaagtataaataagctttgtgttcttgttcttgaggctttgtgttgtgtgaagtagaaataagctgaatttggatttgatttgatttggtattaaattgtcctcactggttttgcgtgattatatcatctatgcacatggcttgtagcgctgacttgcttataagtatttttataaaacgtgttgcgttcttgttttggcttctataattgtagttttagaattgtgcttgagcactaatcagattcacagcaattcaaaaatccatttagaggtataattccttttagatgctctttgatcttttcgtgcttgagtcagtttgtacttttgtccttgactctttctaaaacaggttttgtgttaatcccttgaatctgctttatcgcttatgtctcttgaaatctatctatgttgctctctttgtgactgtctgatcattagttgcaaaatgtgaaattgtctgtgtaatgatcaggtcgagttttatgaaatgttgttagcttccattgagtaaggcttattgtggattggtggattgaaatcttcatgtaactataagtattgaggagctttgaatgtggatttaaaactgttctggagtgtcattgactttggatactattattatgtatttgtattaaattcatattatgtatgccacagacccattctctatttccttcaacaagttgacagagagcaaaatctttatatacgtgatatcaaagtgttctaatttccacattcttctcacttctcaggctttaatctaaactttgctctctgctttctgcgattaaaagatggtggcttttgggaaatacttgcagcggaaacaaatcgaagaatggagtgggtatgcatttgcttacgacatctcggttctagccatatcttttgatcatctgatttttttttcctaatgaagttttgataattcccttgtagctattatatcaattacaaattgatgaagaagaaagtgaagcaatatgctgaacaaatccaaggcggatctcaacatcctcgccatgttctcaaagatttctcgaggatgctcgatactcaggtatgttatagataattgtcgagatgatcttgtttgagtattatcctcactgaattgttattttctgtgcatctccgaggttatatatggctacatacgagtaatctcagtccagtgtttgtcattgtttctcttaattagataagacatttaagaaataaaccattctgatgatcagatggaactcctctaaaatgttgttcgagatattgaaagtgaatcattgtttgcagattgagacaactgtccttttcatgttggaacaacaagggttgctttcagggcgattagccaaattgagggaatctcatgatgctatacttgagcagcctgacatatcaagaattttcgagctacgtgaagcatacagagatgttggacgagaccttcttcagctcctgaaattcgttgagttgaacgccattggtctgcgcaagatacttaagaaattcgacaaaaggtttggatatagattcgctgattattacgtgaagacccgcgctaatcacccttactctcagcttcaacaagtttttaagcatgtggtaaatgaatttttcttaccaccctttcactggtttcatctgtaggctcttcttgttaggaatcttaaatgttctgtgtatggaatttgtagggtgttggagctgttgttggagcaatttcccgcaatcttcatgagcttcaagaaaatgaaggaagcttttattcaatttatgaccaacccgttcttccggctcaggtactacatttcaaatatatcaaatcagaatcctctatacaggctttgtaaatcctaatcttttcctcaaaactccacaggatccagtggttgaggcaataaataacgcggtggacaagttaaccttctcgacgaatttcctcaacttcttggcacaacatgctcttatcatgcaagatgatttggtgactccttcagaggatacaatcgatgagcggtcttaccattttaattcgttactcctgaatctaggaaacacatttttgtacatggtcaacacttatatcatcgtccctacagcggatgactattcgatgagccttggagctgcagcaacggtttgtggtgttgtcatcggatctatggctgtggctcaagtattttcatcggtttatttcagcgcatggtccaacaaatcttacttcaaacctcttgtgtttagcagcatcgcactctttatcggaaatttgatgtatgcgttggcatatgatgccaattccatagcgcttcttttactcggccgtgtctgttgtgggtgagttaaaagttcaatcattttcctatatatcgtgtcaaagaggaaaccttttcctcaactgatttcaaccctttaaatttgcaggttgggatcagcaagagctgttaaccggagatatatcagcgattgtgtgcctttgagaatccgaatgcaggcatcggcgggttttgtgagtgcaagtgctcttggaatggcttgtggccctgcgcttgccggtttactccaaatcaaattcaagttttacaagtttacatttaaccaatctactttgccgggatgggttatggctgtggcttggctgttctatttggtatggctatgcatttcattcagagagccgttgcgtgacacagaggatggagaaaaaaacaatcgaaatgaaacaacatcaggtcattattaatagtaaaagctgtttttcttttctgtctgtaacaattattaacgagtattgaatggattcttggttgatgcagcgacagatagagtagaaagtagcagagtcgaggaaggtcttcgattgccgttgctgatcacttcaggaatcaagccagaagatgaagaggaatgcgatgaaagtgaagaatccccagaagattctcacaaacctgcaaattctttcatagaagcataccgactccttactccatctgttaaggtatcattcatcacttttcttaaacatctgttaagacattgatgaattc

SEQ ID NO: 32 - DNA, 100867 bp, Arabidopsis thaliana
gaattccgttaaaattattgaccacgtgtatggtcataaacaaattatgaattcatgattcgatcaatattacgacctactacatatgatatgatgttgtaattaaccacattctcttgctttttatctcattaaaatttatttattttaattcattattttataccaccactattttccacgttctatggatgatcatagtggagccacgcatgaacatggcaaaaatagaaatatgcacatggcaatatatatacactatctacgtatgtgtcaatcagggcaatccaactttgttgtggtataaactctaagctcgaacagatccgaagatattctttcgttctctgacctgattaatgatcacgaagctaaaattgattatcttttatttttgtttataaattattagttatccttaatctgaaatcattttaacaaaaattttactgaatttaatcataaaaataggcttatgtataagctaacacatattttccaatgtccattattatttaatggtggaattcgatgtttaacgatatgattcaagttataaaaaaaccgaattaagtatctatttgtttctataataaaattctgaaatccaacatctctaaactatatactgcattatataataaacagatcatatttatttgaatagagtagctaagattaggcatactagttcaaatgtttgatggacatccgatccagttagtccgggccttcaatatttgggctcaaatgggccgaaactatattgggtcgtatatgaaaagttgaaatatctccaaactgaattttggatgggaaaaagcgggaagtcgagagagtaccttatttctaattttctataacgagggtagggcccaccaagaccatatagcgtaaagcaaaatcaaaatcaaacaattaggaaaaaaacataattttctcttttttcgaaattcgaaccgtaattagccttttgtttttcttggaatctaaaagaaataaaagagaggaaaaaaaggaggaacagtgagcaaaatcgtgcgactgggaaaaatttcgaatttttttctcttccggcgagggattcaaacttccgcctccaatttctcgccgtgaatctgagttttttttttccgtagcatttcaataggagcagtcttcattctccgtcgtctacactatagagaggtttatctacaagcttcttcttctccttatggcgttttaggttcgtatcgttttttttttttttggccttcgtctctgtgttacaaaagcgttgttggcttcttagggtttttgactggatctgcgtgattttggtggaatatagagctgattttatgggttgatttggtcgacattgtggatatttgctaagcgagatgttgaaatgtttgaacaaacttcatcattgtttacaatttaaagcaaattttggctgtttatctctttaattggggaactagtcttatctgaaattgaaagcatttgataggtattttaccatatgaggatttggtgtagaatgatgaagtaaggtctttcatgatttaaccatggattaggaattaggaagtatatgtgaaaccaattaacattgatgctaactttgttgttggctaattggttcatttgctttagggtcttctcgctactataattctgggagtcgcgtaatctctgagttgaaatgagcagtcatctgtcacaggacgccaatatgaatggtgtctatgttcgatcagatgtgtctagcatgctgagttttgacggatcagaaagtcgcgaaagtatggatgacagtaagaaaggtaacgttatctactcccttgtttgctgtttatcttttcgaacgctaatatcctctcatttcatctaaagatcgaaacagttatctttcagaaattgagttatgacaggattattcgaatgattagcgaatatggaaaagtataattgattatcttgaatgagtcgatttctcttgctttacatggtttgttatattgcaacagagccgttgcagaaatgaaccttaaaaatcgcctctcatattaggtgtaggggaaatggttagatgttttttcttctcattctttgtctatttcttcttaatttttcccgcaggtcatcagagtttggttgagtggttaaatgagacacttccttatctgaagttaccatgggaagcttcagaggacgaactgagagcatgcttgagggatggaactgtcttgtgtagccttttaaatcagcttagtcctgggtcaatgagaatggtacttacgaattttcatgaccatttcacttacttatctgctgctagactaaccccttttttttttgtcaaaccctcctttttttgactaatcctctttggttattctatagggaggcagctttgagcctgccagtgtaaaaattgagcggtttctgactgctatggatgaaatggccctgcctaggttcgaagtttcagatatagaacaggtctgttatgttttcatggatattattcttcatttctgtggaaaaagttgatttcttaaatatggaaagacatgctggtttacatagaattatccatgtcatatagatgaagtggttgtcgtattgccacttttcctttaatgagtcgaaccaattctgtgtaggcatatgtttagattaaaattagcctcgttttaaacacttctgggtgcaacacttttctgatcatggtttttgtctgacttgctattttgatgataagcttgcatgatttctgctcccatatcttttcttctctctgtcctcttttgtgtttctctattgagttatgaatcctaataaaaagtaaaaaccagggggatatggtgccagttttacagtccctgaaggcgcttaaagccagtttttccgatggtagttatgataagaactcactagctgcgaggaggagatggagcttgccagaggaccactcagattcaagaggagatgaccgcaactttactgatggattccagtcgaaggaaggatctgagattgatatgtctgatgctaaaatttcggatttacttaaatccaacagtttacgagtaaagttttctaacatagttttagtaaattgtttccaacctcttagctattgactctgtttctgattcaaatggcatttctttggcagaatgctcctactaggtcactgtttgacatgctggataagcttctagatgagagcatgacgaagatgaatggacatgtgtctcatgtaagccaaagactgacctactcataacacccttctcttgattcatgttttctgggtttgcctagattttaattccttacttcctggaatatctcttcttattctccatcatgtttctcattgttttctcgtgtgttgttcaggctatggcatctctcttgagcgcacttgtgcaagtgattgaacaaagaatctcaaatcaagctgataacctaaagaatgtaagattacctaaggcctttctttcttgatttttctagtaatgtatatcatccttctgactaagtcataacatatgcttatgaaattggtgcagcaaaatatactctttagggtacgtgaagaaaaatacaggtcaagaataaaggtcttagaatccttggcagctgggacaacaaaggaaaacgaggtactattgtcactggttccagtgtttctcttcactttatttctgttttgcttactgaatactgattggtattgttattttctttgttgtagatcgttacgaactgtatggagcatataaaggtacttgatataatatacatctccttcatccatattttgcttttagttttgttcttgcatctggaaatgttgggttacagttggcccaaaaattttgtgcatattacctgtggaacataacctctaaaccaatcctagatttcgattatggttcagtctgagagattttatcagaaaattattgtgtgcgcgcctcaaacttaataacgcaacttcatacatcatttttcatttggcttgtttattagatttatttaacatagatatttgtggttgtgctctgtagcttgagaaaaccagaatagaagagaaagaacgatcagaagaaaaagatgttgtgagactgagaaaggaaaaagagcgcagtgatgctgagattcgccagctgaagcaggaactcaaattggtgaaagagacacatgaaaaccaatgcttggaattagaagcaaaagcacaaaaaactagagatgagttggagaagaagttaaaagatgcggagttacatgttgtagattcaagtaggaaggtgaaagaacttgagaagttgtgccaatctaaatctcaaagatgggagaaaaaagagtgcatctaccagaacttcatagacaaccattctggagccttgcaggttggctttaaagatagtattgtaaacattggttacctatggtagttatttaaatgatatagaatctgtgaattatgcaggagttgagtgctacttcgttgtctataaaacatgaagtcgtaaggacacagaggaaatactttgaggatttaaattactacggtaagattcactgctgtcacttactgtctatgattgcttggccttaatgttattcatttcagagtacatggcttcttatttataatttttctcctaggtttgaagctcaaaggagtggctgatgcagcaaaaaattaccatgttgtccttgaagaaaatcgaagactgtacaatgaagtgcaagaattgaaaggtaaaactcttttagtcaatgtcatttactaatttctatgtattgaaccattcaagaaatgacttcagttctttctcttcctatctaggaaatatcagagtctattgccggattagaccatttcttccagggcaaaacagtagacaaacaactatagaatacattggtgagactggtgaattggtggttgcgaatccctttaagcaagggaaagatacgcatcggttatttaagttcaacaaagttttcgatcaagcagcaacacaaggtttaaacctctttccctcttatgtattgttagcgttttcctctataatatatgatattcatatcctgaatctgttatcttatgtagaggaggttttcttagatactcgaccattaattcgatccattcttgatggctataatgtttgtatatttgcctatggtcagactggttctggaaaaacttatacaatggtaaattacaagcttgattttgttaacgatatgctttaaccaatgattataagtttttctaacagtttctattttgcaaacacagagtgggccaagcatcacttcaaaagaagactggggtgtcaattatagagctttgaatgacttgtttctcttaactcagagtagacaaaacactgtcatgtatgaagttggtgttcaaatggtggagatatataatgagcaagttcgtgatatactttctgatggtggttccagtcgaagatatccttttctaatctaatatagtgactaaacattttttggagtaggtacactcgtgcatttatatttgcgaccccacagagaaattggtgtggtttagtgctattaggttttactaatgttctgtggttgcgttcaatacaaaatttccttaacttgcatacattagggatttggaacaccgccttaccaaatgggctagcagtccctgatgcaagcatgcattgtgtgagatcaacagaagatgttcttgaactgatgaatattggactaatgaacagaaccgtgggtgctacagctctcaatgaaaggagcagtagatcacactggtttgtatacttcttcctgaacttgtactaccttccttaatatgttattgtctaattttaagaagaccatgttggctatcatttgcagtgttctttctgtccatgtacgaggtgtcgacgtggaaaccgattcaattttgcggggcagtttgcatttagttgaccttgctggaagtgagagggttgatcgctctgaggcaaccggagagaggctcaaggaagctcagcatatcaacaaatcattgtcagcacttggggatgtcatatttgctttagcgcacaagaaccctcatgttccttacagaaacagcaaattgactcaagtccttcaaagttctttgggtaagtatcactctctgaagaaaatagatttgtttatatgtattgcataaaattgatgtttgctttatgttgttgattcccttagctattctctcttttttcttaggtggacaggctaaaactcttatgtttgtccaagtcaatcctgatggcgattcttatgctgagacagtaagcactttgaaattcgccgaaagggtttctggtgtggagttaggtgctgccaaaagtagtaaagagggtcgagatgtaagacaactcatggaacaggtttgtattctctttctctctctatctctctcaagatttaattttggctattgaaagttaaagagcacaaaggtattcgtatattgatattgcttgatataacaggtatcgaacttgaaggatgtaattgctaagaaagatgaagagctacaaaattttcagaaggtaaaaggtaataatgcaacatccctgaaacgtggattaagcaatttaaggttggtggggcctacatcacctagaagacattctattggagcgtcaccaaacgctcgacgaggaaaggcctctggtttatttggaagaggaacctcagatgttgacaactgctctgaatatagcagcaagcattcggattctggttcacaacaatcatcagacgaacgtaaacatcaaaaagattatcaccaaccatctaaatttgctggtgcggcgaaaggaatcgattttgatgatgaagatgttgaactcgtaggtcttgcagatgcagattctgaggacagattgagtgatatctctgatagttgtctttcaatgggaacagaaactgatggatccataagcagtgcagtagagttgactctattccctgaaactgctaagcctcttgaactaatagaacgacctgaagcacgcatgacttctgagaaactcgagaaatcagtgaaaatggggaaaaccgagccaaaagacaggttagtattctcgactatcacacattaagagaataatctgaaggcatttacagattcttatgtttgttttgttttcggattttaaaagcagaactaatattccatcgaagattccaaagcagaccttgaaaccaccaggccaaaccagaccgtctcgtctgtcaattgccactagctcctcctctaaggctttaacaggtaatggctctatacatcaactctttgacttgtgtcctaaaaaccaaatctgtctgcctctaattacactcatagcaggctctaatcacagcttacttagatttctatgaaagatctcatataaagtagatgcttgtttctactcagtagaaatctcccgtagatctttagtgccaatttgctcataagccatctcttgatttgccacaggtgctaaaaggccaacaattagcacttcatcttcagcgaaaccactcaatagaaggcggtgaagacacaagattcatctcgagggctggaagaagaagatttgtgatggatttgatctgatgttgtttggtagctaattgtgtaactaagcatatgatgtccttttgttcttctttcttaacataattcaaacaaacaccttaactaagttttcatatgtcttactattaacttaaccctgtccacttaacctgtgaggttctctatgattctaaatttctaatcacctaatgttacgcacgaaaatcgttggattattgtaaatacaattttgcctaatgaaggtaataatttcaacaaggaagaatagggaaacttgagcaaaccagaattatggattaactggaaccaatcaagaccaattgattcttttattttctttttgctgattcttatggcactatcatggttgcccaattttgacatcaatagcttaaaactgtaaagagcaaaatcaatgagatgtgttatagcatttcatataggtacacatgaatctctcaaatgcatttactttgactaactgttcttattttatgtatacattaattaatacattacacacaaactggaattgtaatgtttacataattttgattcatattccatgagtaaacttacaaaaaatatataacaagacaaggatcccaaatccatgaataaagctgcacgcttctcataacaagacaatggatcctaatccatgagtaaaacttcaaacttacgaaaacaagaccatttccttaatcatacgtgaatcttcaaacttttatgttgtgtgtttctatttttctatcagagacggtagaaatttgaaaccttcagtgattcaaatttcaaagttgttttcacttatagagacatcagaacaagttaaaattgaccatcacataacatatctcatttcaacagtgaaataaataagcacgacaaataaaaaaaaattaacaagtggaaacatcagaatcgaaatcgatcaagcaagaagcaaaatggcattgaatcttccattatttcattcatcctccaaatgatgatcctgcaaagcaaacacactaagctaatcagagagggttaatctagactctgtatcttaaatttgacttggacaattcgatagcaaacttctccgaaacccaaaatgaaagagcataaactgaaaagaaaaaaaatgagacgaggacatacctcactcttctgcagatcctccaatattgcaaatgcttttcgtaattctttcttactgcataagccggccagcatacagtggaaagtgatgtaatctggagccacaccacaagaaatcatctcattgagaaggtcttgagcggcatcgagatcacccacttgacaaaacccatgaatcaaagtagtgtaagtaactgtattagcaactattcctcttcgatgcatctcacagaaaatctccattccattgtcaacccttttagccttacaatagccattgattagggtgctaaaagtgactacatccggagagcagcccttgctagccatcgaatctaacatgcgctttgcatcatctacacgatcctgcttgcaaaatccatcgatcattgagttatatgtgattgtggtaggaaatatactccaacgaagcatctccttgtatatttcttcagcctcggagacctttctttctttgacaaatgcattgatcaatgcactgaaagtaacaatatcaggattgatttgcttttcaatcatatgacgcaacaattggtcggcatcactccatctaccagagtgacaaaaagagtctatcatacaattgtaagtgagaacattgggaaaaatacctttctcatgcatttcagtgaaaaggttttgagcattgatgtggttcccgtccttgcaaaggcgatcaacgatggcagtagagattacaacatcggctttgatgtggctttgccccatcttcctaagcagattcaaagccgagacaaccaatcttacacaatccatttacaattgttccgtaagtaaccgcgttaggttgatgaccttcttctaccatccgatcaacaagagctagcgcttcaagaactcgaccctcacgacaaagactgttcatcagtgtgttgaaggtgacaacattgggtctacatccagtttcaaccatataatcaaagaaagctacggcctcagaaatcctacctgattttttgtttgaacattgggtctacatccagtttcaacattgggtctacatccagtttcgcctgattttttgtttttcttctcgatatctctcttttctttttttcacacttctcgatctctctaaccataaaggagtgtacattcaaacagtgtgagctctgagaccgagtgagcgtagtaaaacataatcagaaaactaccggttccattaattggtcggtacattgaccggttaagattaatctagccggaccgggactttaactctggttttgccatctaaataacgtttttttcttttcctataacatctacttaaattttgacattagttaagttggagctattgaagtcaatatcgttcttctttctaaattttagtgatttttttttaagataaattttagtgaaactaaataacctatttttctcctacggaacaaattattgggctctgtaacgagtttcgcttcatactaaaccgtacaagaatctgccaaatatatattcaattcttaatcaaatcttctaaatatagtattgttaaatataaaatatttagtgtataagtgggataataatttgaaccaacctattatattttctatgaataaaatttataaacggatggacatctataagatccgatagtattttgttccacccaacagtattttgttccatccgcttaatgcattaaacgtaaaatatgaaaataaactaaacaaatatgtcgtgagcaattacaagtctcttgtaaaccaacgtttggttcccaagactcaaatcaaacagtgacacacaatggtttcttctcttagtatgatgtgagatctaaccatatcatcgaacaaatcagtggcatcatcttaaattttgagataatgaaacccacttgtcaatttcaaactctctccttctaatgttccttggccctttgatgaaagtatacatgtcttgacggaaagaagatgaatcaatctcgtgctgatcaatcaggtagaagcagtagcagattccgatttcaaaaccctagccaacatttttgttgttgtttcgcctgtttttgtttttttgttctcttatcgatcttactctaactctaagcgagtgatgaccgatgatgaaggaatcccagaaaaccggtaattttaaatttgaatcataaaaccggttcgatctcaacgattccgaaaccggtttgattggtccagtggacttgtcacaacgtcgtaaacaaatactattttccttatccgaaccggttcgtaccaatttcctgatgaaatcaaatcaattacacaataatcaaattttggaagataaggaaaaaagaaaaggagcgtgcaaaaaaaagtcacagtcgcgagataaaatccgaagctagcgaaaagcttcgatttccagcgatcctagtgttggattctacgattttagggtttaaatcttgagatgtgttcgttatcaatgcaattctcgctcttgcaatcaccaccatctcgtccttgtccgtcttttttagccaaccatgaacctaaactctctactacttcctcctctgtgaccttccccttgaagacgaacacttggaagtgtagcggaactgggaatttgttggttttgagagttaaagcttatggttcttcttctgattcctctgcagattcctccacgcctcccaatggcactcgggtaaatttgcatttgagcttgaaattccattggttcagcattcgaaattgatattagccctaatcacaatcgatcactggttttaagcagcagcccaaaagcagaagggatattctactggagtatgttcagaatgtgaagccagagttcatggagatgttcgttaaacgtgcccctaaacatgtaactttactctgcttcattttctcaaaagaaccatttagagttagagcttatgattgattctatcttgtttcttaggtggttgaagcaatgagacaaactgtgacgaatatgattggaacgctgccaccgcagtttttcgccgttactgtcacctctgtgagtgctttatgtaagcgatacgttttcaacaagttgtgtactgtgtttgttacttggatttatttgttgaattgagcattatatattgctttaggttgctgagaaccttgcacagctgatgatgagcgtgttgatgactggatatatgtttagaaacgctcaatatcgtcttgaattgcaacaaagtttggagcaggttgctcttcctgaaccacgtgatcaaaaggtgatcattttcagttttataacttctgttttttgcttggcctgtaaacgtgtacatgccgatgacttctgcttcttctttgcttcccgctgataagccttgtgttaagatactgtaggagcattgtaattaccccatgtagctgcgttgatagctcagcaactataggttagtcagttagctagagcgcagtatagttttggcagaacgagttgggatattctggattggtctcgtatattggtttgggtcgtggttgagagttagacttctcctgattatcaatcatcttttgtgttatagttctttggttaattgaatatataaggggtttaccggtttgaaacctattagactttctttctctctctctttgtagatatgcgtgtgtttgatatatcaggctatatgtgacactggttttctatttctgattaagccaggggggtgatgaagactatgcaccaggaactcaaaagaatgtttctggggaagtgatcaggtggaataacgtatctggccctgagaaaattgatgcaaaaaagtatatcgagcttctggaagcagagatcgaagaactcaaccgtcaagtggggagaaaatcagcgaatcagcagaatgaaatcttggagtatctaaaatctctcgaacctcaaaatctcaaggcatgatgattcatatgttgttattaatttctcttgatcaaatttgtattccaatgtttattatcaattggaatgctttgaatctgtaggagcttacaagcactgcaggcgaagatgttgccgtagccatgaatacatttgtcaagaggcttctagctgtgtcagaccctaaccaaatgaaggttctctaataataacttctttagctgaaacttgctctgagttgtgtgttgtttatacagtgtgattgtgaattgactgatatcaatgttttggtggttacacagacgaatgtgacagagacaagcgcagcggaccttgcaaaattgttgtattggttaatggtagttggatatagcattcgcaatatcgaggttcggtttgatatggaacgcgtgcttggtactcaaccgaagcttgcagagctgcctcctggtgaaattatttgagcactgtaatgaataaaagcgggggcttttttttacccgaagaactcagatttcatttgtcaagtaatttttattgtaaaattgatggaactcactttgaagagaagacggtattggctgtttgcaattagatcacagattttgattcagactcataaatggcaactatgatcattaggcttgcataatgaaatgtatggtctgatcaacaaaggaaaagaacaattgagaatcagaggaagaagctctgcttcacttacgagattcccaaattgcagacaaagcttcaattatgatcgttaggcttgcataatgcataatgaaatgtacggtctgatcaacaaaggaaaagataaactgaaaattagaggaagaagctctccgtctcttatgagcttctctactcaattcatgggttctgtgaagatctagctatttctatggatcaaattgtgaactatcatgtattctgattttaccgtatatttattcgattttgtgaaatgtcaactttgtatatccatgtcttgatgtattcatcctcatgcggaggattatacaggcttaaattttatatcaagattgagaaaatttgaacacatgagacttatgaatcgacagcaaaaaaattaggggaaaaaagaagatggatggtatatggtacaaaaaatccaatttcttctcatctgtcaatccatacaattgtgtgttttgacaaaactattcaaactaaaaatttcaaaaccaacaaagaaaactgaaaacacactaacaaaaaaaaacaaaattttagatcctatgagacaagaacataacacatcatacttcacacaaccaatataaagtcatctttacattcctacacccagaagtattgacacataagctgtcatgaccgcaataaaaaatctcccaaatgatttgtttcctgcaagacaagtaaaaaagtcaaactgtttagtaatttactctatatagtctcttcttcataacccgaattgtataacaaaacggttatatacgtatattaatgatatataatatgcatgcttaattaccttttataacgttaatagaagatgacccgctaaaccctgacgcggtttgcggccgcttaaaaagcgggggagacggcaataatggtgaaaaaagtggtgaagaaggtggtggaggtgatggatatggtggaggcggtgaagacaaagcggtagcttcgtacctcaagaggcatttaggagtaaagatctgagcccaacgagactggttgcaacattccaacatttcttggaccgcaagtttcaaacacgttgtgcagtttcttggatcaagatcaggactacactgagccattgaatctatatcaaacgaaccctcgaactgtttcacacgttcttgatcctccacgaaatacggtgttgatgatagcgatggggaagaagtcgcattgatgataagctcatccattttatcggacagtgtttgtgggaagcgatccaagttaggagcataactcaaagagtatctaatgatgtaaggtctttcgtctacgagggagaaaaaggatgaatccgagtaacgtaccatacactcttcatagaatatgaaagcttctttttggtaagtgcagtttcttgagatttctagggttgcggtttgaacacagtctgaacaagatgtttctgagatgtctcctctacagaggaacatgccacggactgtgtcggggctaatacccgccgtggcattggaataggatccgagagaggaacggaggcggagagaggagagtacggtttcgcggtttgtctcgtatgtgctggtttgtgtaaagttgtcggagaattggttgcagaaggtgctcatgtggatatggtcagattcggatatggttaggttagtagagaagagaagagataaaagagaaagaaagcaaaagagagaagagagactttggatcattgttgccattatttgttcttcttgtttatgaattatgagtgaaagatgatatttatagtagacagatttgtaaaaagatgcattatatatactctttaaataggaaaaatattttattactattaggtgattgttgaggccatgttgttttataaaatattaactttgtgattctgcaatattgaaaaccagatgaaatacttgtttaggaataatacagaattattgaagctggacacgtttgttatattattgtctgaagcagaacataagacttgtacggatcaagacccttttttaatggggttaagaagactctgattagtcttacaatttggaaggcatgttttgttgaatctagagaaaattattaggatattagttacagttggagatacatagaaatcaagatatgtttagatccttggttcagtcaattgttaaagtctcaacgtgaaatgaagtacgaaactagattttcaaaattttaaaataaatttatgaggaattcggataaagtttttccagtttgcctaattaacacttttaagatttgtttttaacaaataatttcgtgaaattttcttattatatacacttctaagttctacccgtaataggcttccatagttaacctatcttacattttcacgagacattgccatacattaacccaaagtattgaaatgtacgtaacatataaatacacaaatgtctgtatttttgtttccctaggttttgaatctacatacacgagaacacaacacatcgcacatcacccaaattctgagaacagaaatataaattagtagccacaatccttaaaccatcactacatttgatcataaaaccattaatagtaacaccaaacctgtcatgattgcaattaccgttctcccaaaaatttcatttcctgtaaaaccaaaaaaaatagccaaaacatatgttttagttgtttattcttgataactgtattgtagacagatagggttacggtgaaccagaaatgtaaattaaatgatatatactgttaatgactcactttttgtaacaccaagactcgttacgttcggttgcaaagcggagatttcatacgtgatgagacatttagtatagaagatccgagcaaactgagcatggctgcaacaccccgagagtctttggaccgcgagtctcaagcagacggtgcagtttcttggatcaagatcaggactacactggaccattgcatgtaaatcataggaaccttccaattgagtcacatgttgttgatcatccacaaaatatggaactggtaacgacgaagacaaggatgctctaaggataagtgcgtctaatttttcaagaagtgtttgactgaaaaattgcggagaatccaaagaatttcccgtggagaatctagcggtactaggtacatcctctacgagcgtgaaaaaagaaacgttcgagtaccgaactatacactcgttagagattaccaaagctgatttacgataaaagcaggatttatagatttctaacgttgtggcattgacacagtctgaacaagatgttctgtttaggtctcctctgcaaaggaacatgccatagattgtatttgggctaagcccggccgtggcgttggaatagcttccgatggaagaacggttgcgaagtgtagagaggaccgtgtcacgatttgaaagataagagctagttcgagtgacgttgtcgaattgggtgcaatcaataagcatttgagaagcttgggacatggctcggagagagaatgagaagaagcaaaacaaagcgacggcaaagtgtgtattgattcccgtcatttttttgtgttctttcttgattattatgacttatagaaagaacaaaacagagcatatagatttataaaagagaaaaacattgtctctctttaaaaataaaatagttcaaaatgtccaaatataatgttgatgactaattcaaaggttgaatccattattcttgtatataagacgttgattatctttacataacatgaagcctaaggtaaaagataaagttgataatttagttttgtgaaaactaatgtacacaagacttattcgtacaattgtttattaaatagttgtgggtaaggaagaaattctccaaagtgtgtaattattcttatcatttttgtgtgttccttcttcattattatagcttatgagaaagaacaaaacagatcacatcgatttatataaagaactaaataacaaacagagcacatagatgtatattttttaatccattcaaaccagtgatgtccacatataacgaggtagaccaattcaaaagtaaaaaattatatatataatatataaatgtttttttgaatttcattattttgtagaaattataacattgatcatcttagtaggttctttatttcttgaatgcaaaacatgaagttgacacattggtttctgaagcaatatctgcaatcttggaagatagatagaaagctagatgggttgatcataccctagtcatattctttagataagatgaagcagccaggcaaaagataaagttgacagattggttttgtgaaagattctgaagcaaaaaccaagacttgttcctaccaattatattttggtttctcatttatgaaagataagtcacccggtgagaacatattaattattattattttctttctttggacacaattaatttaattaaatatataaactattatattaggaataatacaaaattatttaagctgggcagtgtacatgtttttggtattattgtctgaagcaaaacataagacttgtttaggaagacccttttttatgggtttaagaagactctgattagttttacaattaggaaggcatgttttgatgcagagaagattatgaggatattagttagtagttacagttggagataacatagaaaacaagatatgtttagatccttgaatcgatctctgtcttccaaactctgtcccctattcttgattcttgatttgacttacaatttcacgatagaccatcatatatatatattagtattatgatcacatctattttcttaagactgataacaacgttttcaaaatggcatcaatgatttaacagcgttcttagcttgaaatttagtaatttagattacctcaattgcgctaccaccaaattaaggcatgattcgttgtgatcatcgtataccacccaaagacttatgagcacgttcaatgcaatttttctctctcccctatgattccataattaactatgcttaaatatacgaaggaatgagtactgcgagataatcccactaatataggagaacacatgatgctatatctccattcaatctttgaccaagtcaacgtcggtttactctggttatgatcttaccatcacccaaatggagagaacacaaatataaatcagtagttacaatctttattacatcactagacttgatcataaacccattagtaaacctatcatgattgcaataaacgttctcccaaatatatcatctcctgtaaaaccgaaaaaaaggagcaattcaaagccatatatatcacataagttccatagggtggggaaaggaaaaaacggacattatatactgtgactaaccttttgttgtaacgccaagactcgttaggtttggttgcaaagcagagatgtcatacctcagaagacatttaggaaagtggatccgagcccaacgagattggctgcaacattcggagaatttttcgaccacaagtcccaagcacacggtgcagctgcttggatcaagatcaggactacactgagccattgcctctaaatcatacgaaccttccacttgagtcacatgttctttatcttccacaaaatatggaaccggtgacgaaaaagatgagggggctttgaggataagctcgtctaattttccaggaagtgtttgattgtaaaattgcggataactcaaagaatcattctgagagtaactaaaggtggcaggtgaatcttctacgagtgaaaagaaagaattatccgagtaccgaaccatacactcgtcagagaacatgaaagatgtgtcatgagattcacaggatttatccatttctaacgttgcggaatggacacagtttgaacaagatgttttgcttatgtttcctatgcacaggaacatgccatagactgtgtttgggcttagaccggccgtggcattgaagtaatagcttccgagggaggaatgattacgaagagtggagaggacggtgttgcggtttgattgataagtgtcgggaaattggttgcaatcagttagattttgagaaggttgggacatggctccaagagagaataggaagaagcaaaacagggaaacatcaatgattcttgtcatttttgttatgactaatgagaaaggacaaaacgtaacatagatttatataattaaataatacctttgtttattttatttcattcagatccgtaatgtccacacataaacgtggtagacgagttcagaggaagaatctatatataactattgttgtttttagttgaatatatttcatatttcttgtatatatataaaacgttgaatatctttgcaggttcgatgaagcaaaaagtcaaaagataaagttgtccattggttttgtgaaagatctaaacccaagcacaagacttgttcatacattttagtttttttgagaactgaagatattctgaggtttagaaccacatgaatctttttttttttttttggactatagacaaaagaaaatccaacgggtaagaaaagattaatttataatttaaaaaaaaaatatattagtagggaagtcattaatgagagatataggtgtttggttttaaccttttttccgtcagcaaggtgttttaggtattttgagttttagatttgacatttttatgtaaagttgcaattttatggaaaagataacaaataaaaacctttaaagtaaaaatatggacatgcatcaaactccatttcttcttaactttctaatcaatccatataaacatcagaatcaaacctaattttttttgggggaaaatattaacattttttatgatcataaatcataaaaatataatacacatcacacagattaaacgttattttttatttcacaaatcatttatttaaattaatccataaatcatcacatttggtcccaaatccacaagtgcaaacaccttaatgtcacgtcgacccgttttcattaagctggcattgtaaaagcaatccacgcaaatattttcctgccacaaacgaaaaaacacaaattagagtaaaccctccttatcaatagtatgtgaactattaggaataaatatttgattaaaagttctaaacaatacatacaacaatcatatatctcttttcaagaaaaccacggattaagtgctcagcgggggcggtggttgcgaaagaggaggcggcaattgaggcggcagagacagaggaggcgaagatgtcggagatataggaggcagagacgatggagacggcgctggtgatggcaaaacaaaggttctatatctcaaaatacatttaggagtaaaaatcagagccgaacttggtacaccgcaacaagttgaaactgttgcatacgcaaatctgaggcaaatggtacagtttgatggatcaagatcaggactacactgaatcattgacactaaatcatatgaaccctctaactgagtcacacgttcttgatcctccacaaaatacggtatcaaagttgacggagagacgttaggaatcagttggtctaatttattggatagggtttggttaaaccggtttgagtttggagcagaacgaagagagtaacgaacgatgactggtttactttcaaattcagagaagaaggaaacatttgagtatcgaaccatacactcgtcgtagtatatgaaagctcttttgttaagagtacagtttgtagcgatctcgattgctgcggtttgaacacagtctgagcaagatgttgtgttgatgtctcctctacagaggaacatgccatagactgtgtcggggctgagaccgattgtggcgtttaaatagtgtacgagcgaggaagtcaagctgagagtggtgagtaggatgttgcggtttgtttcgtaggagctggtttgtgtgaagctgtcgacgctgcagaaagtgtgcatgtgttgaggttgggacatggtttggtgagataacaaggaaaagaagaagtaaaacagaggagcagtgagtatgattcttgccattttgttctgtattgttcgacgaaacagaggagatagagaatttatagtggaatgaaaagagcttttctttgttgattttttcaaaatagtgtctaaataaggatatggtaataccaattcagaggaagaatatgtaaaactagtgtatttttttctcatatatgataattatgttattagtaagacaaaatcataaagtcgacgcagatcagagtttaatgtttatcttaagcaaaacagaaacttagtcctacaatttgtgtcaaaaacctttagggtgtatgaaaggattttctctttatatcactatatcattgatatggctctaaagggcctttatatagctttacaagctgacctaattccgaaaagactcatgcgttatatgccttaataacaaatataagtaaaaaaatataagcaagatacggtaatgtatatatagatatcctctttcaagttggagagtgaagatcacaaacgtcaaaattgaaaagaaattgttcaaaatgtttgcgtccaagaccctaatgacgggttcggtcgtacatgggcattggcaattgttcggtttataacttcatcacgaatgaaatgagtcaatttcaatatatttgacaccctaaagaattttggaagacggagaaaaaattgcttcagagacatggtaacgaataggagaataatgaaacaatgataggcttgaagtgctaggattgttacttaagcaacaagaagtaacataagtaacttggacaggagcttgcgttgactgcaatttagatgatgtaggagcagcaagtgcaccataattaaccaatatactatactcagattctgaatatatatatgatgaggacaatggaaatttagaaaaaaaaatcaattatgtcttgcatgcatctccttaattaatctttctttcttgtacgttttttacaaactaaagaataaattaaattggtttgtataaaaaacaatttaaggataaagtgatccggatttttaccatccgactaattagtaaaagaggatctatatatttacataatgattaatattttttaggtcatcatacaatcataattttttttttgttaaaacatcataatatttttaatagttttttccgcggacaatgcggaatgagttcttattagacaagaaaataacatatcacacgtcacacacaatcgcagaatacaaagtttaaaaaatcttcattatcattggattgaatcacagacccacaagtgctaacaccgaagttgtcattgctgtgatgaaaattctcctcaatatttcgtttcctacaataagaaaatccaaacacataaacattttagttcctcagtcgattatcttcatgatagttggatttttagatcatgggcgagtttatagttctcatagacaaataaagtttgattactacacaaacagctgcggtgtcttggcgggaagaaattaaaacattatcttttgacgtaacttgtaaaaaaaaaaagattagagtcgagggcatatattatgctcacctttcataacgttaatagacgatgagccgcttggtgattgagaagttggcaaaccggttgtgtcatacttcaaaaaacatttagaaagatagaactgagcaaaacgagcattggtacaacagcctgagagacctttgaccacaagtctcaaacagacgccgcaatttgctggatcaagatcaggactacactgaaccaccgtgtctaatgtatacgagccctctaattcatttacacgtgatatatccttcacgtaataaggcgtagaagcagacaaagaagactttgatgctatgaggataattagttgctctaccttattggataacgtttgttggaaagaactaaaaagagaagtaggaaaagtggcgagagagtatttagcgacgtaaggcccgtctagttctacgagcgtgaagaaggaaacattggagtatcgaaccatacactcctcgtagaatattagagcagtttttctggaagtgcagttattatttttagtgatttctagggttgcggttttgacacagtccgaacatgatgttttggtgaggtctcctcggcagagaaacatgccatagactgtgtcggggctaagaccgattgtggcattggaataggttccaagggaggaacggtcacggagagaagaaagtagggtttcacggtttgctttgtatgagctggtttgtgtgaagttgtcggataatctgtcgtcgcagaaagtggccatgtgttgaggttgggacatggtttggtgagaaaagagagagaataagaagaagaagcaaaacaaaggagcagtgaatctgatgaaagttgccattttttggtactttcgtgtttatgaaggtagattaaaactgagcagaaacctagccatttatatagggaaagatcttctcctattttttaattcattcaaacatgtaacgtcctaatatatataccaattcagagggagaagatatatatataatatgtgttgttgtttcagaattgaacaatcagatgatttcatcaataacaagttgaatctataaatctgaacaacaaacatcatcttttaatgttacttgttcttgaaactatgaaaaaatcataaagttgacttgatattattagctttgtaagcgtatgaaacaaaacatggacttgttatatccaattttaattcgaaaacaaagatttgatgcaaagaagaaaatttctagggtcaaagtcgtgcctgttcacaaacagcacgaactatcatttggaagaattgtggtatttacaaaaaagtattaccataatcatattccaaaacttaaataaaataattataaattcatttagttgaagatccttaaacctaatataatttcaaattaaaacacttcagaaatataatttcaaaacaattcagaaaatcttttttttttttcattttagaacgtaaagtcgaaaggatatggatatatataggtaagcctaatccatataaactgcctcaagttccacgacgtggatcatacaattcccgtttaacttaatttgatcaatagttttcccattttcacattttacgcatactgatattttatctaacgacttttgataaataatatgttgagcgtttattattggatttgttttatgtagtaacgaatgaggaaactttggctatctctagagaactaaaaggtatattaattgttgtagattttttttttttttttgtaaagttcagttggagagtggaagaaaattcaacgagtaatttagctaagttgtgaatgttaaaacgttatgataatttaatttattcaagctagtttatgaacaaattcagaaaatgattataataaaaaaaataaccgccgaaatttggattgcttcagatgaccctagtcagatttttgtacaatattttatcctagtcctagtcaatcctttctattttaatacagtttttttgccagttttagtaatttaataattttgtgaagtggtttgaatagtattacatgaaatagtattattttggactctttccatctttttttttgtttatttcttttattagtaagcaaatgggaataaatttttataaactgaaaattcttccaaaaagagtaattcaaagtgggaataataaaataattttaaaatttcaaataagaaatcgacaaccatgtaaacgataattataagatagcttgtattccattttttcaaaaaaaaaaaaaactagaattgttgacaataacaacctttaaatactttaaatgggatcacttagacacattataataagtaatactctaccaatatagaggagaaattcaaagtaacaataaaaccaaattaacaaccttttttcttgttagttacatacatgaatgataacacatcaacaatattaactcaaaccaatagattacatgtacgatcaacatatattccacttgtaaactgatattctcctaagaaccatttaatgcttttgcgttttttattcttagtttgacttacaatttcagaatagatgtaaactacaatcatatcaaatacaatcatacaaaaaaattcaaagaataataacaatttctttcaagtctaacaattacaaagacggaaccaatagatttgatgtaccatgtttcgaaaatgctactatagaggttgaaattgtgatttcttggtatatttgatcgatataccactgctattttaaatgaatgttgaaattaggtgtgatatgcgttgttagttactagataacagtggacgaaaaaaaaactttaaaggaaaaaatggatatgtatcgactccaatcttcttttattgatcaattatccatcaattatccatgcatgatacatacatcagaatcaacacatataattaactttgtttttttaggaaccatattaacatttttagtgatcttggatcctgtgagaacgtacacatcacacaaattgaaggaatacaaattattacgaatcatcaatatttatgatccatgaaatatgatcaaagatccacaagtgcaaacaccaaagctgtcattgtaacaacaattctcccaaatattacatttcctgtcataaaaataataataataaatatttagagccggccctcaataatatagtttaattagctatcataataaaatattacacactatgctgattaaatatgataaaagaactatagaaatatgctgacctttaagaacgttaaaggaaaacgatccgctaggatttggaacgttctgtggcggcgtgaaaaccagcggcggcgatggcgtctgtggtaaagaagaaggtggcgatgatttaggcggtggagatcgaggaggcggagccgatggagatggcggtggagataacaaaacagaggtttgaaacctcaaaagacatttaggagtaaagatcttggcgtaacttggcaaaccgcaacaagttgaaattctaaagaacgcaactcgaagacaaacggtgcagttgaatatatcaagatcaggactacactgaaccattgtgtctaaatcataagaaccctctgattgtgtcacacgttcttgatcctccacgaaatatggaaccaaagaggacgaagatacgttgaatatcaattcgctgaatttttcagtaagtgtttgattgaaccgagtcgggtttggagcagagcgaagagagtaaatagtgatgcttggtacgatttccaattcagaggagaaggaaacatttgagtatcgaaccatacactcgtcgtagtatatgacggctcttttgttaagagtacaatttgaggcgatctcggttgttgcggtttggacacagtctacgcaagatgctgtggtgatgtctcctctacagaggaacattccatggactgtgtcagggctaagaccttctgtggcgtttgaatagtgtccgagagaggaagactcgcggagagaggcgagtagggtgtcgcggttggtttcgtatgaactggtttgtgtaaagttgttggtaggattgcagacagtaaatatgtggtcaggttgagacatggtttggtgagataacaaagagaagaaaaagaagtaaaacagagggatagtgagggtaattatgattcttgccattttgttctttgttttttttttgacaaaacagaggagataggaatttatagtagaaagaaaactttttttctttttgttgatttattcaaaatgatgtcggaataacgatggtattaccaattcgaagaaagaatatgtaagacttatattgttttcatccatgatagctatatctttaccaagacaaaatcataaagttgacacaatttggtttttgtgtttcttaatcaaaacagagacttagtcctaaaacttggaagaaagagtttgatgcagagaaagtaaagaaattactgcagagtcatggcggcgaacgggagaagaatgtaaccttgaacaggataggcttgaagtgctggacttgtgccttgaacagcaagatttgtaccaaacatcataggagcaaaaccagtgctaggaaagaacaacccgggaggagttgtagcagctgatggaggacttgtggcaccattaaaggtgaagtgacgggaagcagatgagctactggttgctccacatgcagtgcatccatgtgctgggggagaaacagttggtggtgaaaaagcagcgtttggccttgagcctatggtagaagcaggagcagcaggaaacggcccacctgcacaagagattagtcaatgttacagagagatataaaagagaaaaatgttatatatgtataaaagatttaacttattagttagttaattacctttgtctccttgcttgtaatcttcccaccttagttcttcatggcttttgtgtagataaggtttggaagcagatatggaaatataaatgttgcctttgctagtggggaaactccaaccagatgagttatccccttcatgtgttggcgcataaccaggattcatactaccttgttcagtggggcgactccattcatgagatgcaaaaggataggatccagtattggtattgctgctaaatgcaggggacagtgaaaaaggcgtgctcggcaacacagaagcatctccattgaaaccgaaatgttgaggacctgcaccgattgaaccaccaccaaaatttggtgggtttgatctaaataggttggaggaagatccaggcaggtaaccaacaccaaatccgggaaaagaactgttcaatggagatccaggcaggtaaccaacaccagtagtcgatgggttttgtccgagaaggttggaagaggattgtccgaaaaagttggaagaagagggtgctggcagggaaccaaaagcagagttgaacagcgaagaaccactcgacggagatggtgggacgcaaccaaatggggggaatgtggaagtgctagatgcactagcttggacaggagcttgcattggcccaaaaggtgaaaacaaactcgctggagttgcaccaaaaatttcagtactagtggaggaggaagctactggcgagataccaacatcaggtctggcaaaagcaacattgttcccaaacggtgaaccaaaagcaggcttgccacaattatgcgctggcccaaagctaggagatggggaatttcttgatgcactagcttggaagggaaaaccagttatctcgaatctaggtgttgaaccgaacatacttagaccgaaagcttgtgttggttgaccaaaagcttgggttggaccacaagctggggttggtgccgaactaactgatgtaacagcaggagcgaatccgagtagtgaagaactgtgaaatggagatgaagttgaggatgaggaagtggcagatgcactagatgatgtagcaaatctatcgatccataatctaggtgatgaggcaggagattgcgctggaccagaactaacggatgtgatggcagcaggagcggatccgaaactgaatggtgaagaactgtgaagtggagatgaagttgaggatgtggaagtggcagacgcaccggaaccagaagtagctaggagaatgcgaggctcaccaaatgtaggagatggcgctggtcccgaactaacgggtgtgatggcagcatgagcggatccgaagctgaatggtgaagaaaaaatttgaactggagatgatgttgaggtagaaactgtagcaccagaatcatgtccaagagcttgaactggagatgatgttgaagttgaaacaacagcagcagaatcaagttcaagaggtggaactggtccatcattaaccggcactgaagtgatggatgagccaatcacattgctctgttcggattctggagtattaagtaggtctggattggtaaactggtaacagttactgcactctggctcagaaaaatcaatcttcattcttcttttgatctttcaaactgttaaccacacaaaaataagaaaggacgcaaatttgttttggattagaggataactttcagaaactaattcgtattgcagaaactaagtaacaaaaaccctaaatccagatccgttaagatagtaatttccactcaaatttgggggttatacatcagaaagtaacgatttttattcagtaatcagtacaaatgagtaattgcaggatcattgaatcgatagttccaaccgataacagagcactgttctcgaatccacagaggaaacagtatgtagaaagcgtggaaaagaagcaacaaaagaaccctaattacaaagagaaaacatgatctaacccaaatcaagcaaaacaaagacatagaagatcaagagatactgatcggcaattcacaattgttgcaagtattaaaatcgcccaaaatcgtcagagtttaataaaaattgaacctttatcaaagtaggaagcagggcaccgaccaagtgattgaaggagaagcttacggagacaacaacaatggtgcggtttccgagtctgatgatgaaatcaaagttagggttagtgtgaagaagaagaaaaaagagttaactttgtggtttcaatttataggaaacgatttcttcaatttgcctgcgtcgctctaacgcttcctctaagattgttttttccttgctgattttttcttgtggcgttgttttaacgctagccggacgttttaggcaatctaatggaaatctcaatcaatttaaaatttaaaccagacaattatatatattttttttaacttgttaagatttttcactttaaataaatttcactaaaatgagaaaatagaaaagaaaatttgattcccaaaaaaaaaaaacaataagagcgaaaaggtatgtttatacttagaccatctccatcaataatttcttaattgagaaactgttcaatataaaaataaaatataattaaaaagtatgagagagagtagaattagtttctcaagtgagaaactttgagaaacccataagaacacttgtatatcaggtcaaatattattttattgttaaaatttaattatataactaatatttattaaaatactaatattttttttttttgagaaaccaagaaggtatctcagtgatggagatgcccttatatcataccaaacttcaacaaaaacaagtattggagtcgactgtgtgataggttcgtcctcatccaaagacatagcttgaaggactttttgatataattatgtgtttggtgtgtataggtgtggtgatgagtgcaaggatgcaagaaagcaaaaagggtatattattgaagccaaagacatgcaataccaatgcagattgtgctaagttttgcaaaggtccaatccagaactgcctatatcatacttgtgcctgcgtgccgggaaatcctcattgttgctagaaacatccccacacattagtttctaaaattcttttgcttctgattcaatatatatatatatatattttttttgtagtggcttaattatttccgcgcaaaaataaaataaaattatgttttccttgtgtgttttttttgttaattatgttttccttgttcgtctcttgattttctaattgcattcacaagacgcaaaatctctacacaactagaccgaacaacttaagctaatcagcagtattaaatatgacaattaatggaaccaagagataaaaccattaaatatgactcaaaaaaccgacttctttatgctaaagttatttattaacactcgctgagatatatttgtatgatatgtataatggctatatatatgcacataagaggaagctagagagtactatgtgatgtgtattaacgcttgaaactggagaggataaagacattagacattagtcagaattccacatactccccatcatacatagcatacaaaacagaggagagctttttggttgatttatccaaaacaatgatgtttttatatagtacattcaaaggaagaacatgtaacacgaactgttttcatccatgacagctatatttttacaaagacaatcataaatttgacacaatttttttttttttttttcttaaatcaagacaaagacttagtcctacaatttggaagacagagtttgatgcagaaagtaaagaaattactgcagaagtgcagattcatggcggtgaatgggagaagaatgaaaccttggacaagatagccttgaactgctggagagtaaagaaattactgcagactcatggcggcgaatgggagaagaatgaaaccttgaacaggataggtttgaagtgctggagttgtgccttgagcagcaagagttgttccaaacatcataggaccagaactagtggtaggaaagaacaacccgggaggagttgtggcaccattaaaggtgaagtgatcagaagcagaggagctacttgttgctccacaggctgtgcatccaaatgctggggaagaaacagcacctgtttcatggggtctctgaacactcgagcttacggcaggatatgtcgtcgagaaagatgaaaaagcgctcggaaactgggaatcgaaaccagggaaaggcgcattaggttgaccgaaaccggtagatgaaaatgttgtagcaccaccagcagcagcagggaagaaaccaaaagcaggaccagtaaagtttcctagcgttgtactaaaatttgtcctctgatgatgatcaggtacgcttggagaagcaaataatgatgtcgataccgttgatggtgaaaacacagcgtttggctttgagcctatgggagaggcatgagcagcaggaaacgacccacctgaacatgagattagtcaaaattacagagacatataaaagagaaaatatacataccaaagatttaaatgatgagatagttacctttagcttctttcttgtaatattcccaccttaattcatcatggcttttatctacataaggcttgaaagaagatatgttttgtccctcatgcgagctcggcaagagagtagtagctccattgaaaccaagaggttgaggagatgatgttttaacaccagcaaaggctgaaccaccaatagagtcgtaacttagtggatgttgcgctggcccaaaaagtgaagaaccactcgttgcagatgtaccaaaaactgatgcagtagtcgtcgatgggtttggtccaaaaaggttagaagaggaagatgcaggcgaggaaccaaaaaaaggtttagcaaaagaacattcacaccttgtaggtgctggggtgcttgaacaacaagcaaaagtagtcttggggaaatcttgggacggcccaaacagtgaagaaacactcactggtgttgtaccaaaaactactgtactagtagaggaggaggaggaggatgctggatagacagcaacatcgggtctggcccaggcccattcaacaccgcgccctgcagtagaataagcactaatactccaaggcacattttgcgctggcccagacagtgaagaactcggtggaggtggtgggacgtaaccaaatgggaggaagctaatgggtgtgggtgtggaagtactagacacaccaacagatgtggtggcagcaggagcggatccaaagctgaatgatgaagaactttgaactggagatgatgttgaggttgaaccaatagcagcagaagcatgtccaagagcttgaaatggtccggaactaaccggaactgaagtgatggatgagccaatcacattgttcggttcagattcttgagtattaagtatgcctgaatcgcgacaatggtaacagttcctgtactctggctcagaaaaatcaaccctcattcttcttttgtctttcaaactgttaacaaagaagaaaaaagaaaaacagagaatcgatacaaagctgttgaatcgatacttacaaacgaaaacagagaatcaaagtagaagataaggaaacagtatgagaaagcgtgcaaaagaagcaactcaagagccctaattgcagaaggaaaatatgatctaacccaaatcaagcaaaacaaagacagagatcagtattagaaatgtttcaagaatcacaaatcgaacctttgaaccagtaggaagcggagcaacgacggagatagtgaaagaggagcttactgaggcaaaagaaatggtgatcttctgatgaaggaaaagagcactttgaggtttcattttataaacaaacgagagatttgactttgactttgcctgcgtctctttaacgcttcctcggaagattgtttttttcattctgtttttttcttcctattcttgtggcgttgttttcaagccggaaggctctctaatcactttctctatgattaaattattttattttaaattcatgaaatctctgtcaagtttaactaaatggataatttcatgaattaggcacaagttgataagaaaaaaagtgctaggaagaaaaatggataatacaatgattttttgaaattttggccatgttttgaaaatttaaaatattttatatagaaaaactgatttttttcataaaccatattgtttagtcaaattaaattggcttagttaccaaaatagctaaagtaaatttctttttaatcaaattatctccctaaaatatttgcatatcaatggaataacacatcacacaaaatcttacaagtcattgtttcttttcaaacaaacagagactatatagaaaaatatatttgtttagtcaaattcaaaacgcttaggtactaaaatagctaacgttaatttccttctaatcaaactatctccctaaaatatttgtatatattcaatgggataaaaaatcacacaaaatttcacaagtctttgtctcttctcaaacacacggtttagacttttagtagaaagaaacatgaaaagctccttcacattcaccatcttcttcttagctcttctctttacctctggttagtcatctcttcctcatatatttgtagattcatttctaattaatgttgtgaaaataatgagtttggtgtacatgtatatgtatataggtgtggtgatgagtgcaaggatacaagaaagcacaaacgatatattgaagcctataacatgcaataccaatgcagattgtgccaagttttgcaaaggtccaatccacaactgtgtctatcatacttgtcaatgcgtacccggaaatcctcattgttgctagaaacaccccaacacattttctgattcaacatcttttatgttggaatttccaacacaaaaataaataaaactatgtttcctttggtcatctacttttttttttttttttttttgtctacttaattttgtaactgcatttacaagaagcacagtcattacaaactaaaccgagtaactcaaactcagttgcgttgaatatgacaatgaaaccaagaacaagaaagatagataatattgaaagaaacgggttctttgagtcatgaggaagaagaacaaacatttatgatgctaaagttctaaacactaatatataatatcccggtagctagattctggctgatatttatttgtatggtatgtatagtgactatatatgcacataagagggactagagattgattactttgtgatgtgtttttaaacccttgagattggagagaatgtgacattaggcatgaaagaaggaaggacttctcttgtattcatcggagtttccatttcaataagctctctgagtgaactgcatctagacaaagatatgtttctttctcctcttgagacttcagttctttgcagctcggctacacagattgagaatgcttgtaatgctgagagcttcgcgtgaaattttacctcataatgtccttctctgatacatgtcattgtcattgctggtgtgatctctttcccactctgcaacatagaatttttatatttcaagattaagggagacaagttaaaacacattttggtatcacaatgaacaaattcttacctctatgaaaagttccaaaccatgatgattgttgatgagttctggagattcaaggacaaaaaggtgacatcccatgtcccatccgctacagtcacaacctccacctgatctccatctttgcagtatcggcgtaggacacgagttttcggtatcaggcaaaccgtggtttcctgttggaactatgactttcatctcacgactcgagagtttgctgtttgaagaagagtcttgaataacaattgctgcaatctcaagtcctggatgtaaatctgagacaggccaaggaccagatgcagtgttctctgaatgttttgatagactacgagtcaatcctcgattgaaactgttctgccttggcagcttttcttgtagtagatcagatacagagttctctgtttctgaaaatatcaatcctcgtctgaaactgttttgtcttgacaggttttcatgcttgaagccacttctccttgcgcgtgcaatgtcgaaaagaacgaattcagagacagttgatgccacaagatcttcttcatatggttcttgctctaagcagatttgagttgaaacttgcatctgtcctattagtgaagattctttacctgaaacattcttattgcttctacctccaatgtagctaaacgaatagacaaaccgagattccttatcatccattcttgtactggccatatatacatcatccgggaggtctagcgagaatatgaaaacaggcatcccaagttcatattccatccttagatgagcatgtagatgaacaggtgaagacttgtttcttgagaacatttcttggcctgattctggtaacagaggatttctgtttgaaaatggattggacattttcttgatacggttaaaccagctcgttgagcttgaagtattagtagaagaagactcattgcttccctttgaagaaggcataaatgggaattgcattctagcagagagtgacttttgcaacctcggttccatgtttctctctgtaactaaaggcttagctaatcgttgttgttgttgttgttgtctcccattcgtgttcaaccgtacaccgaaaaaaccaccagaagaatattgttccactgaaaacttttcagcatctgatattttccttcttcttctctccttggatccctgattgaagaaaccatgtctctccttcgccttgtttcccggttttggaggtttcttgcacgaggagttaagcgcccgataaaacaaaaactcgtcctcttccccagcctttttagaatcgaagaaatctcgtagagtaggaagaacattttcagaactctgtgccatcttttgactgcttttgtatagattaactaatctctattaccatcagagaatgacaaaacttctgcaaaagatttgttcagggcaagaacctgtatcagtactgtaacataccaaataagctaacaaacagataatgcaaatgaatatagaaaagatcacttaccaatcacagcaaaatctaacttcaacttcttgaggaaactatcactgattatgaacttttacacaaagagaagttaaaatagcaaactctagatagagaagtcaaaaattttagcctacgctcttacagatctaaagccacacaacaaaagtgacataggaatcaagtagttgtgaatgtaatgaaagcaacagacaaaagttacataaaaaatcattttgaaagacaaaagctataattcacttgcattctaagccaatcatagaaagggtgtggaaaaagtaacaatcaaataccaattgatggtttcagagtagtgttcctcaaggatgataaaaagaaaacctttaatcatatgcatcatacaaattgatgaccgttacattaaaataggaaaagtaagtagctctctttgaacatgaacaacaattagccatgttagaacagattagaaaaaaagataaaactagcagagaaatgcaattttgcaataaaaatgttaaatacataaagctaaaactcgttctttaacgaataatataacattcatcaagctaacaaattccaaatctacaacagatgatcatgtggctccgacaaaaagcccttgggggaaataacaaatcacaatgctttcaaaggaaaatagaaatgttttttttttctctgttttctgttttcttaatgggcttttacgaaaagcttggataataaagtctttaaggcccaatttggtaaacactacatgtatagatatttataagtatgaaaatgagcatccaagggctcatagctcagtggtagagcattcgactgcagatcgagaggtcaccggttcgaacccggttgggccctttttccatttttattttgcttttttatttatttatttcggaaactccagttaagatttatttcctagaccttactgttgtcataaatcattatgattaatgttgaatctttttagaattgaaacaaaactaaatagaagactaattagattcctatgactaattaaaggtagggttgttaatttagactaattataagctatgagtattgtgtttgagtggctaagaatgaaataccgagatctgaagtatgaatccaacacaaataagaaacaagaacaaatcctgatatgcaaatctcaaatgatcattgacaattcaaagacaaagtactctcttctttacattacatactataaaacattgattacaaatcatggaatccatcaaagcaaatccacaatcacaccatttccagtttttctaaaaatcaaatctccatcaaattatgaaacttttttcttcttctgtatagcagggaaatgttcatgccagtaaccaagaacataaaaagagtctaattcgcggtagtagaccaaatgaatgcttccaataagaaataaaagagaaggaaagggtatacacgagcggaacccgaaactgaccagtgatgatgatgatgatgaacacgataggagaactctgtagtagcttctacttcagaggatgagatttgaacttatcctacaaagcccctatgggggcgtttcggtttaatgtaagaagataaatggtctttagctttcctctctcattttcctcttcgtgttttctggtatcatcatcatagcctgtttcttttgctttcaagcattgatccgtctttaagagcagcgtgtgcttcgttctcttgtcctagagctgatagagctacagcttgaagatacgatgcgatatgccaagccggagatatcacttgggcttgcattgcatcattcagcgcctcttggggcatctcattcattaggtaacacagacttcttcttgcataaacagtcggggaaaccattgtcccaccctcaatgaactgttccaaacacattcttagattagaatttaccctttctctggaaacttaaaccccaaagacaaataaacaatggcagtagaaaagatctaacctgagaatagcagtcgatggcatttgcaaattctttatgtcggaaagcaacatcacccttcttcttgaagttcagcgagtcctgcatctgattggtccacatctggaacgaaagctgaaatttttgcacagaaaaaagcaggcggaaaaagtaatcagattacaataagaaacaaggtagcccaatcccaaatacacaatgagacaattgtgattaagaaagaaacctctgttgctgcaccctcgtcatctttatagctaagcttttcaagaatctcatgtatggcagttagatctgttcttaggcatgcttctccaagtggtgaaaggggtgtcgttgaggcgctgcttggtatgcccatcagttgatgagaaggagtcttacatgaattaaccagtttctagttagtgtcggaaataatattttcgaaagcaaaaaaagataagcaaccaaaagatacaagagctggcgaaagataaatggtagtaggaaagcacctcaagatccttctgtagagggatcattgcagtaactaaagacttcgggttaggccgctcccggggctcatactgcaagcatctagaagctaaccgtattagttcagtcccgtcgtcgcttgaaaattgaccctccaagcatgagtcgatcaacatttgaatgttcctgtcccgtatgaggtccagagcctaacaaataatacacataacaagtaaagttttagccagaaagagatttgatatatactcagcaatgatccggtgaagattgatagatatagtatcttaatcataagcttacatgacttggaggaatgtgttttccactaagaagatcaagcaacagagttccataactgtacatcacactttctggtgtcacacgacctgtagaaacaaacacacaaactaatatgtcagaagaaaactagctacaatccaaataataaaaactaatatgcaagagttcaagtatatacctgttctgagatactctggaggagtgaacgccaggttggtgctataactctttccgtctctactatttttcatcagaccgaagcatgaaagtcttggatttgagtcctaaaaacacaaaacatatgatgatgtttctatattcacacattaacattgacaaacgttaaaaataatcaaacatataagcttaacttatcttgcccaaaataaaataaaaataagcttaacttacatcatcaaagagaactctataagcatttaagtcatggtagagtgcacgtcctttgccagtacaatattctaaagcttgagcaatatgtaaagctactcttagtcgcatcgcccacttcatcggttgtgactcccctaaaaaaacaaaacaacagttactacagaatcataaccatagagaagaagagtgtattagataaagtaagttacaacaataagttcaagaacttacaatggaaaagatgcttagccaaagtttcattaggcataaactcagcaacaagaagtctctcttcaccttcataacaacatccaagaagatttgccattctataattccttaattgaccaacagctttcttcctcctataaaaaaacaaagaccagagattcaaaatccaagaatccaaattaacataaaaaggtaaagactttattaagcaaattaccagaaactgacgagaatcaggccaagctttcctattaaaccttttaacagcaatacgtctttgattatccaatttccctttatacacaacatttggagctttttcaccatgctctgatactatattctctgtagcaaatcctgatgttgcgttcctcaacgtctcaattgagaattcacgaaactgaggcaaatcattcccttcacctctcctatcttcatctaaaggcaaaaaacacaaaatccacaattcaatcacagagataacaaaacaaaccctagaaagaaaaagaataaaaactcgatcgttacctaaccctgtgacaccatgattagatccttcaggatcagaaacacaacaaaatgcacataactttgaaacctcacaacccatttcagtattgttgtttctagtcaaaccataaaccctaaaccgtgtcttatttttagctgatttataaaaatcaagacttttatagtttaaacagatcaaatccgtgaagaatttcttcagaattccagatataaaaaacccagttttgttatattcttcttccacttcacgaaggagaagaacaacaacaacaccaaaaagagtcaaaatctgagaaaacgatctgtgaaaaaaaccagaatttgaaggaagaaagaatgaaggaaaaggtgagatgacaaaagaagccgctcgtgtgagagctcaaagggaaagctcaaagaacagagagattgttttctgcaactttctttatccttttgtttgggggagacaaaagcagagaactttgccagaaagttgtaaaaattaaaaattgaaactttttttgttttataaaaaaagagagaaacagcaaagcagcaggcctcaccaagtcaactcaccagtgggtcaaataaataactaagaaacaactcatttttgctatcaccaatgaccatcccatttgccattttcaataaccatttttcttctattcacagtgttttttttttagaacatttggttgtttattattagtcaacatattcaagaaaatttggttcaatgagtttaaaagttttgtcaacttgaaataagaattatttggatcaatgataaaatttagacgcgtcgcataggagtagtttacacactattaccatattacaattccatcaaatcgatctatagctggcctgtcaataaatagtatatagatatttcatataactagttattactatatatacacatccatgtcctttgtcgcatatagctatttaggtaacaattgttcttttctaatcgctatgaagtatgaaaaatatgataatgtgaatgaaaataggataatgtgaacgtggagaaggaaaattagtttcaatcaaaatttgccaccgacataacgctcttacatttttatttttgtttttttccaacagtagaaacgccttttcaccgaccaccccctcgtacctgtgaatgatatcgagaaaatttcccttattatcttatctcgagaacccaatttattttgtttcttatgacttggttcaagattacattccggtttagctcaaaaatcgattacaatattggtttagaagaacggattaattagagacaaagcgttatatgtgtcaacaaagattgtatagtaaatgatgcaaagttgactcttgcctattaacttgaaaattacatgtgcggaactagtaaacgatagttgaaatttactttctacagtcttgtcgattgagagagctaagacaaacattgaatgagatgtccctaggaaagacatttatagtcaactcattttatttggaacgatacagtcttaaagaagattagtattgatccatcatccataacaaatcatttcgacaacttccgaagatatagagatgtttactttccaatgataagttaaaatttcttattgtcgcaaaaaaacgacatctaatgagctagagagatcacaaccaagaaatcctactatattatttgggaagtacattttaaatgtaaccttaatttttgtaagtaattacataggtatgccattagaaataatattttaaaaagtaaattaatttatctctttaaggattaaaaagtcaaatactaatttaattaattaaattaattaaaaaacgaaatacattattaatttccaaaaataatagccaatcaaaatcaacttataagatttgatatctaaattttaattaatttaatttaaactataaaatataaatgtattagagaatgatacaatttgcaaaacttttatatataaaaaataattctaaaattttaaaaattactactttaaaaaaaaatcatgggccgggtaaaaaaattacagaacgtgttttattttggaattgggttatatggtggatgtatttgaatcaatatttataaaattttaaaatattattaatatgctgttttaataggggtcaaaacttcagttgtttaacaattgtctcatgaattcgtggtatagcgttacttaataacaattataaactgtaaaatataaatattttataaaaataaaatttgcaagttttaatatatattacttttaaaaacaaatcgtcccgcggtataccgcgggttaaaatctagtatcactatattctatagacctaacctcaaatccaaatttctatggaatgaatattaggaaaattatggaaatagtctcaatgttagatcatattataaaatatttaaaagttctctgaattaaggaagtctaaatgtaaatcctaaattccaaatttaatccctttaccataaaaattaaagcagtttagtctatctagatttaaaatatatatattttattttaaaaaatcctaattacaaattgtccctataatattagcttattagtgagtccattgggcaggtttattatgggccttagccttaccaatcaaaaagccttagaaatcaaagcccaaaacggttaaatagaaaactacacgtagtacctcttcgatcataacaaacgtcatgcagtgtatattcataaaaacggcacaaagtcctttctcattagacacgaacggaaaatctctacttgtctccgtcccgtaatttccgttactaaccaaacccaattttggaaattcagtaacagagcctttataaaagaattaaaatctttattgttttttccaaatcttcacaaacaaaattcgtcaaaacaaaacattcttgacacttcctcttctccgtttaactagtttcacgagctctgttctgtttcttctctttcagaatttcaaggtaaatttactaaaaaccctagaattgcaatttcactcactgttcttgaattataatttctaggttttttttatcttggcatgtataaaaattgaatctttattctcgtaggatgttatgattgtgcggttttagttgatgtgtttggtaatgggaaaaggtagagttaaagcagtggagaaaagggttttagatcagaaacttagaggatcgatcaatgttcctttaggaccagtttattatccgacagaagatgaattcaaagatccattagagtatatacacaagatcaagccagaggcagaggtttatggtatttgcaagattgttccacctaataattggaaacctccttttggtttggatttggaatctgttaagtttcctacaaagacacaagagattcatcggttgcagtttcgtccttcttcgtgtaattcaaagacgtttaagttggagtacaataggtttttggaggagcatttaggtaagaagctgaagaagagagttgtttttgaaggagaagaattggatttgtgtaagctgttcaacgcagtgaagcggtttggaggttatgaaaaggttgtcaaagggaaaaaatggggtgaagtgtatcagtttatgagctctggtgaaaagatttcaaagtgtgcgaaacatgtcttgtgtcagttatacaaagagcatttgcatgatttcgagaattatcataatcggatgaatgtagatgcgtcaaagagttgcaaaaggaagattaatggcattcgacgatgttctgaatctcggagctcgaagagaagaaaaagaaatgctgatgtgaaaaatcccaaggtggaaaatgaagaaggggttgatcaagcgtgtgagcaatgtaaaagtgacaaacacggtgaagtgatgcttttgtgtgatagttgtaataaaggttggcatatatattgtctatcgccaccgttgaagcatatcccacttgggaactggtattgccttgagtgtttaaacactgatgaagagacttttggctttgtgcctggtaaatgcttattacttgaagattttaagcgaattgctgatcgagccaaaagaaagtggtttggttcaggaacagtgtctaggacgcagatagagaaaaagttttgggagatagtagaagggtcaggtggtgaggttgaagttatgtatggtaatgacttggatacttctgtttacgggagtggttttcctcgaataggcgaccaaagaccagaatcagttgaggcagatatatgggatgagtattgtggtagcccctggaatctcaataacatgcctaagttgaaaggatctatgcttcaggccattcgacataacattaatggtgttacagtgccttggctatatcttggaatgctcttctcttctttttgttggcattttgaggaccattgtttttactctgtcaattatctacactggtatgtcacctgaactgtaattttcatcatgtttgttactgctgtaattacccttcctctgttcctaatttagtcatggtaagggagaagatgtttccaagactcactggaactctttaatttataatgaaatgtatcattcatagaatcttttaattgcaccttttattttgaaagattctgttaccaacttctttctgatttacacctcaggggagaggcaaaatgttggtatggtattccaggcagtgctgctagtgcttttgaaaaggttagtttttttgtgctttaagcctctaaagggtttatctttggttttaaaattggcatactagaatacttattttcagaaagaaaagttaagttgcttgatttttctgtaggtcatgcgaaaaaccctacccgatctctttgatgctcagccagatttgctctttcaactagttaccatgttgagtccgactgttttacaagaaaataaagtcccggtctacacagtattacaggtttgatatacaaggatatagttcattgatgagattatttcattgtcagcatttctattccaagtttggaagctatttgtgattaatagttagtaactttcctcctaaaatcacagagattttttagttttccaacataatcattctactttttctcactgctaggagccaggaaacttcgtgatcacatttccaaaatcctttcatgctggattcaattttggtatgccaactctaattcaagttatagcactatagcagtcatgaatcatgtgagtgttcaatcaattgcgttagggagtttggttaccaatgtctttgtgcatattttgtcttccaggtctaaattgtgcagaggccgtcaactttgctactgctgattggctaccttatggtggttctggggcggagctgtatcggctgtaccggaaaccttcagtcatatctcatgaagagcttctctgcgtggtagctaaggtatatagacaatctgagaaaagcgttaaaaacttgatatgcaagacttgcaagatgagttgtatctatgcccattttcacaaaagaagatttagtcctagaattactaaatattgctacccttgatcaattggttagtgactactggagatatcaacattgaaggaggcatcttttattacttgatgggattattaaccactattaatttatcattggttactaatgcaattatgtatgctagcttcaagcaaccaatgtggatatttgataaatccctagcttgagtgattgttttgattgtcttctcttatagggaaactgctgcaataacgaagggtcaatacatttgaagaaagaattgctcagaatatacagcaaggaaaaaacctggagagagcagctctggaaaagtggtattttgagatcttctcctatgtttgtgcctgaatgcgctgattctgtgggcatcgaagaggtttttctttctgcaatcagatattgttggtttcattgttaaaagttttccctactctatcattctagcttgcataagataatactctgatgtttggactctttatttgtaggatccaacatgcatcatatgccagcagtttcttcatctttctgctatcgtctgcaattgcaggccatctgtttttgcatgcttagaggtaaatatctatatctagctttttagaattcgatccacttcaggcaggctagcctttttttataaaagagaaactgttgagggctctagaggtgcattacagtagacatattttttctgaagattcttgtttcttgatgttgttatttacctaagtgtttataatctttaatttagcactggaagcatctttgtgaatgtgaacctacgaagttgcgacttgaatatcgttatacccttgccgagttagatatgatggtacaagaagttgaaaagtttggtgggtgcaaaacacaagaaaccaaaatctcacaacggccgagttcaggcaccaaacgatctattgctttaaataaaaaggtaaattaatacacatagttagcaaataacactgctgagtcttgttttctgttctcgttactggattttatattagccgcagcatagccattcgtcatgcttaacttttctattcaagaattgtaagtgtaattctattaaccagaattcaagaattagataaaatctagtattaaataagttagcagtcttccatatcatatgtttgcttaggccttgaatcttatgataatgtataaactgttgctgcttttctcatactagcaggagggaatgcaagtgagtcaggcacggccagcagacaaatggcttcttagagcatcaaaggttcttgacgctgcgttttctagtgttgaatatgccacccttttgaaggaatcagaacagtttctttgggctggatcagaaatggaccgtgtgagttttgagtatccgttggaatgcttttgtatatgtctttgggtagattctggaaaaaatattttctgtatatgtcactcaggtacgagatgttacaaaaagtttgaacaaagcaaagatatgggctgaagctgttagtgactgtctttcaaaagtcgaaggtgaagtcaacgatgattcaatgaaagttcacttggaatttattgatgagttgctgagagttaatcctgttccttgctttaattctggttatctgaaactaaaggttagccatatacctgcaacgtcccagttttccctttagattgttactgctgtttgttatcacattgtttacatgtttccacttctgtgtaggactatgctgaagaagctagaaaattgtccgagaaaatcgattcagctctctcgagtagcccaactgtatgccactacaaactccattacttccccacatagtctttaggaacatgccttttagttacatgacagtaaaattatttatgttatgcattctaattagtgttacttggttttgtatctagatcacccagctggagctattgcattctgaagtctccagatcgccaatctccctaaaaaaacacgagatcttgtcaaagaaaatctcttccgcaaaggtaaaccatggtagaccgacatatgcatagttggttttccgactcaagatatcttagtagtcatgttttgtgttttaacgaacaagcaaatctgttgtgttagttaagaggaatacgtgaatattgcatattggtttaaattacgattccatatcgaataatttgagatatgattaatgtccgttaacaacctggtgaacccggatatctgtattggcagcgctggtggtatgtttatgttattcgatgtacatttcctcgatgaatataaaaaagtctccgttaggggtcaatatccaacttggttattgatacctatgtttgtgacaaacttatagtttgttttggatccttgttaatctaaagggtatctatgcagtattttctcaatgctcgccttgtcttgaatttgataatctctctttctcacggatccgcagatgttagctaaaagggcgaaacgctatctcacagacgctaaacctccaggaattgaaatggatgcacttttcaagctaaattcagaggtgaatatcttgtctttattctgaaaatgataattctgttacatgttcatgtgttctaatcgttcttttcccttgatagatgttagagcttcatgttcaacttccagaaacagaagggattctggatttggtaaagaaatcagaatcagcccgtgataaaagtaacaaagttttgactggttctttatctctcgaggttggctgtacttttgttctgtatctttcagtgtgattaacaacaagctcttttgtcgaacctttctgaattatttcttttcttctgcacagaatgtggaagagttgcttcatgaattcgatagtttcagcattaacgttcctgagttgaatatcctgaggcagtatcatgttgacactttgtcttggatttcacgctttaatgatgtaatggttgatgttcgtgaaggcaaggaccaacgaaagctaattagtgacctcagttcccttctacgggatggagcatccttaggcattcaaggtctttctctggttcccacctatttttctgttgtaatgcgtagtgatatgctgataggttaaccctaaccatggtatctgatgatatagttgaaggactccctcttgttgaagttgaattgaagaaggcatcttgccgggaaaaagctcgaacggtatatgttttctctctcttgaatttcctaagttatatctctcattcaacagttatcatatgatagtctgaataggaattgcaataattccttgcattgtttgcatctgagattgaatgtaaaatgcatggaaatattgttatattaattgatgaaatagcattaggttttatgttttgagtgctctttctgtggttcatatctttgatgcagtttttattgtgtgttgaattttatgtaggtttatactgcaagaaaatctctggatttcattgagcaactgctctcggaagctgttatgtatgttgtcccctatatcgattatagaatatatgtaatatgcattctactttgattttttattaacatgccaaacattctatttccagactacacatcgaagaggaggagatatttgttgagatctcgggaattttgtcaacagcacggtgttgggaggaaagagcaagcactatccttgaaaatgaaactcagatgtacgagcttaaagatctcgtaaggtatataattgttcaggcttgtaaatttttttacttcagcccatgcttagtttttcttaagtcttttatttatcaaaagatgtttgttcctaggatgtcagtcaacattgatgcggttttacctactctgcaaggcatagagaacacaatctcgtcggctgaaacttggcttcagaaatctgagccttttctatcagccacttcctctatggcatcatctccatgttctatgcttgaacttcctgtattaaaggtttgtctgcctcctgtgcctactttggtttctgtttatgtttttgtaactgatttgatttttggagaatttaatgctttaattttttgcaggatctagttactcaggctaaattgctcaatgttcagcttcaagagccacgaattcttgaaacattgttgcttaactgcgagaggtggcagtgtgataatcatcagctcttgcaagaaactgaagatttgttggacaatgcgaaaatagatgatggcacgcatagcaatatccttccgaagataatggatttgataaccagagtggactccgctaggagatctggtctggcccttggtctcaatttcgatgaacttcccaaacttcgaactgcaagtctaaaactaggatggtgttgtaagaccatcacgttaagctctagctcacctacctctgaggtacaaatagatttctgaattttaattggttcgtgacactcagtgtggttatgtaccccgtttaattgttttaagtgcgtctttaaatggcagttgctagaagatgttggaaagccctcgttacagcatattcagcagcacttaaaagaggtatgttcggataatatattaacttcctacacagactaagatgtctttggatctttaagcattatccttctctttggattttcaaggaaaccacagtgatctggtttgtgagtttcgtcattcttattgacagggacaaacacttgaaatattacctgaagagtattacttaggcaagagactcatggagttaaaagacactggactggagtgggcaaaacgagctagaaaggtacataaccaacacacgttttctcagttgatcgcgtaaagtctctatggaatgtttaatgaaaacgagagctattggttttatctgcaggtggtaacagactcaggtgctcttgccttggaagatgttttcgagcttatttctgagggtgaaaacttacctgttcatgcagagcaggaacttcaggttaatatgaaatgaatgttagcaaagcttaacacataaccttactgttatctaaaactgtttgtatcatggtaaattgatgcagtctttacgagctcggagtatgttacactgcatttgtctaaagccatacaactcaagatccatggtttcttgtagtcaatgtggcgaatggtatcacacctattgtttaaagcttcattggcggcctaaggcttatgtctgctccgcttgctgtccactggcagaaaccactccacagatcgatcccgccaggtttgttcctttgcaataaaagcttactctaaaccacattgctacacacttgtattcacatcgatcttagatttttaaaagcatactttcttgaaacctctatacttttgcttcactcattagtttaggtcacaatcaaaagctactgattgtgtggtttctgttaggcttagtggcttgaaccgagaatgtttacagattcgttaagatactctacacttcctcccatttttctgaacccatttgtttgattgatatctattaacagagcaacagagccagagagaccgtctctgaaccaaagacggacaagaatggtcgcgactgatgcagcagttaatgacttaaagtggaaaacccgaaaacacatcaaacggacaactaaacggagtcctcaggttcatattcttccctggtttttcacttaaaaaccaacataataatctcttgagggtatgatatatagagcaatttcatttattcaattttagatgagttttctcaaacctttttgtaatgtttcccattggaaaatggacaagttcacattaaaaaggttttggacttaataatttgccagatttttggatcttttttttttttgaactggatcagtggatctataactagaatttgatgattatgtaatataagaaattctaatcacaactatgtatagaggagatattagcttagatcttagatttaaagcttgtttcattctttgatgttttattcaagtttaacacatttaccattgaaatttgtattcttattcaattatagatttatagtatgtatttgttgatatctctcactttttaaactcaacaaactctaccaaaatcaaactaccagcagctattagaattttgaactattgttggaccaccaatgtgtgaagagaatcatatctcttaatccccacaaattcatgagaaggaaaataaaaaagcaacagttgagatcactttccttacaagaatcagaaagagacccacttttgatgacatcatgtttcagagacccacaatcatatctctctatatatgtatgtatcataatgtgtgtatatgtgttgtgaagtaataagtaagggactttcatagaaacagagccttattgtaccttttgagacaccatcctcaagctgaaagcttccttcaacactcttcttccatttttgaaaatctatctagtacatttattgtgaatttcacactgtccatatcttgtttatttattaaagttattaatgttacatgtagatgaaatggactgatttgtgtatgtttatagctatttatgtaagaagaacaagtaaaatattgtataagttcagtaatggtcggcctcaaatttttcctatcatgaaatttctaagtaaaaaaagacaagtcacattactttaggtaaaaagttggcaaaacaaaaagtgaaagaaggaaagtcaaaactctttattttattgtcaaaagtcaaatgtgtgcaaatgtaatattgttgacattaaacaaaacaaattaatgtaaagattattcataatggagtagcaaaacaaatctaattaaacccaaaatatataatatatgatatatctctagaaaacttttatttatatctagcaccaaattttgactatttggattttttggtcgggtactttagccaccggatattaaatgcatcatacaaactttcaaattaggtggaaacaaaatatatgtacgtatatatatatatatatatattaataaatcactttcaaaacttttaaaagaaaataaaaaaaaagaattttagataaaaagtaaaagagaaaaaggggaatataaaaatggaaaacaaataaagttaggagagagggctcactgtccgaagcaaagaaagaaatagcaaagtgagttagacatgtgagagagaagagattcaagtgtgtccccattctctttcctatcctttagtcaacaacacatctctctcatatttggatatttctaatcaagatcaaactttttacaacaagatttgattttttttgttcttttaaaatcttaatttgaattaagatgatatgaagtcatttcatactagtcttgcctcttgtcaaagtgtaactgaatgaaatttcaagattatatatttataagaaaacctaaaatttttagatatattttgaaataatcttataattatctatactaattaaaaataaattataaatatattatagagcagttgaccaaaaaaaattacagataactattgaagatatatagacatgattagttgaggtgtagaaagtttgtaaagccactaaaatagctccaaaattgaaataatcatgttgtagttttttcttttttctagcaagaataatatatttttgattattttaaaaggtttgtacatttttctctttttattttcactttatttttttagtttctttagaaacattattatacttttcatatatatatattgaatttatcttcaaattttgcatacatattttacccactaaacatgattccatataaaaacggaaaaagtgtgtcacagaagaaataatatattacatgatataataatctaaaatgtcaactgttttctttagaatatgttagaaaagattttttttttaaatctttattggtagcaatgtttatgagaataaagcacataattgtctctcaatgactaataaatttcggtttcagtcaaagatctaacgagatattagatttgtaataatcatcaaagaaagtctatcctttttattaaaaacaaatattcttaaacaaactaatactttaaataaactattcttaaacaaactaatacattaaatattcttaaacaaactaatacattaaatattcttaaacaaatattcttaaacaaactatgcttaaatctttcataataatctttctctcaattgaatttatctttcacaaaattaaataacaaatcaattaaagagatatataaatacgaaaaacaatggtcgtcactctcgttcagcttctttagttttcttctaactttcagagaaagacctctctcaattcaaaagttcacaatattaaaagtataaatcagaatcattaaactgttagtctctctctctctctctctctctctctctctctctctctctctctctctctctctctctctctctctctctttttctcttcttctccctgaattgtctcatctgtcttcttcctttgtctctcctctgatatacattgtgttctccttctcagaaaccctagatttctctcaatcaaatctagcttttctcttagggggagatttgatttttttctctgcaagactgtaacagtaggagaagctactttcctctgttttcttaatttcaaatctgcaatcgtactttttcgagttctataagtgaactcagattttagctttttttttttagggttcataagaacaaattggattttgagctcacagtataaataacccgactttgattactgggtaattttaaaaccgccattgttgttctctttactacttttgggaattagggtttatgatttctgggtattagattagataaatttgtttcctttttttgttaatcaatttaaaaatctcttatttctgttaaagacttgtaattttggagtttttaatgcatggacggaagagaagcaatggcatttccaggctcgcattctcagtactatcttcaaagaggagcctttactaatctcgcaccttcccaagtcgcgagtgggcttcacgcgccgccgccacatacgggattgaggccaatgtctaaccctaacattcatcaccctcaggctaacaatccaggacctcctttctcggattttggacacaccattcacatgggagtggtctcctctgcttctgatgctgatgtgcaaccgccaccgccaccgccaccaccagaggaaccgatggttaagaggaaacgtggacggccaagaaagtatggagaaccgatggttagtaataagtctagggactcttctccaatgtctgatcctaatgaacctaaacgggccagaggtcgacctcctggaactggaaggaagcaacgcttggctaatcttggtgagatctcgagttttctattctgtgtactttgtcaagttaagtttttgctttagctctgttagctagtcttgaaggacatgagcttgaatcttatggatgctagaagctttgaatgattctatagttaagttaggttttgttactttgtcgttactgatactcaatattgattgttggctattagtttgacggatctatgtgtggtacaatgctaggtgagaggagtaattggttattagtagatgtggacgaaatcgacttcttgatttaagttattgatttaggtttttaagctgtgaaagagtaatcttactaatccattcatgtttaagtaattggtcatcataatgtgattaatcaaactttaagtaatagcaaactcttgactctgataatttctttaggtgagtggatgaatacttcagctggacttgcttttgcacctcatgtgatcagcattggagcaggagaagtaaactgaccaaaactcctttatatattaatgatcatttatgcagcttttcattgtatcaatttccttttatttttctttgcaggacattgctgcgaaagttttgtcattttcacaacaaagacctcgggctctttgtataatgtcaggcactggaaccatttcttcagtcactctgtgcaaacccggttcaaccgatcgtcacttaacatacgaggtttcaaagtcgttcattcagttaatcgaaaaagaaaaacctgaaaagatttcttatttaatcctctttctgtgtttcttagggaccttttgagattataagttttggtggatcttatttggtgaatgaagaaggtggatccagaagtcgaacaggcggattgagtgtctctctttctcgtcccgatggtagtattattgccggtggagttgacatgcttatcgcagccaaccttgttcaggtatattaaattcttcttcttaatggttgtaaagtgaagctaaaacgaggcgaaactaactacgaatgttagcctttgatatgtttgtgctgtcactttctttcctcttcaagatatcatgtggtagtgtttgaaaaacttgtttgttattcaggtggtggcatgtagttttgtatacggagcaagggcaaagactcataataacaataacaagaccatcagacaagaaaaggaaccaaatgaagaggacaacaatagtgaaatggagaccacaccgggtagtgcagctgaaccagcagcatctgcgggtcagcagacgccacagaacttctcttctcagggaataagggggtggcccggttcaggctcaggctctggcagatcacttgacatttgcagaaacccactcactgattttgatttgactcgtggatgatatacactattagtctttgaagcagcagcatacaaaatgtgattgctgtacatatgttattgtagatttctctctgggaatgttgaaatcagacatttaaggattgatactagatctctcagctccttctaacattgttaatgtaacagaaccctcccactttcatgctattttaggagatttttttaactcttttatgatctcattgtggtcatcaagaacttggtttctttactagttcactatttttctttcaggttctttaacatatttagtaaacttgattcctcttatttggtagacaatgtgtaattcaacacacacaagatttaggatccttaatttataggaagatgacaagctcataatttatacatgaaaagcattaaatattaatgaatatatatcctcaaattgacttaaatttctttttcagtcagaaatctaatgagacattagattttgttataaaccattgaagaaagtctatatcctttttaataaaaaaaattcttaaacaacccaatttattttttttgtaaaccaattgaatatttttttttgacaaaattaattaaagaaatagtatataaatagaaacaatggtcttcacttcctttctcttctttttttttctttccttttttttttctgagatttgctttctctaccagagagactgtaacagtagtagtagctacttttgcttgttgtcttcatttcaaatctgcaattttactttctttttgagttctaagtgaactcaacatttagcttctttttcttttctaggtttcataaaaacagtttggatcttaagctcacagctgaaaataacccgactttgattactgggtatataaaagccgccattgttgttcttttcactctttgggttattagggtttacgatttctgggtggtagataaatttgttcttcaaaaaagtttccttttttaaaaaatctcttagattcttaaagaattgtaatttagggttttaaatgcatggatgggagagaagctatggcatttccaggctcgcattctcagttctatcttcagagaggagtttttaccaatcttacaccttcccaggtcgcgagtggtcttcacgcgccgccgccacctccgggaatgaggccaatgtcaaaccctaacattcaccaccctcaggctagcaatccaggacctcctttctccatggctgagcacaggcattctgatttcggacacagcattcacatggggatggcttctcctgctgcggtgcagcctactctgcagctgccgcctccaccgtcggagcaaccgatggttaagaagaaacgtggaaggccaagaaagtatgttcctgatggacaagtttcattggggctttctccaatgccttgtgttagtaaaaagtctaaggactcttcttcaatgtctgatcctaatgcacctaaaagagccagaggtcgacctcccggaactggaaggaagcaacgcttggctaatcttggtgagatctcaagttttttctgtgtacttgattaagttaagttgttgttttagctctgttggctaacccttgaaggatcttatgattagatgaaagtttgaatggtagaagctatgtatgattctatggttattttaggtttttgttgctttagccttactgttactgttactcaacattgattgttaggtattaaattgactgatccatgtgtgggtacaatgccagttgagatgagtaattggtcattagaatgtggtagtcaactcgatatttgacttcttgatttatggacacaatttgtaagctttggcacaactttcttctatgtacattgtgaagaacacgagctggggtcttatgattaggtagattttggttgctagaagcttaatgattttatggtcaaattagtattgatttggctctgttgttactgctactcaacatcggttgttaggtattaactatgagagtaatttgactgatccatttgtgttgagataagtaaatggtcatttaactctgttaattaccttaggtgagtggatgaatacatcagctggacttgcttttgcacctcatgtgatcagtgttggatcaggagaagtaatctctaaaaactcctatcaatcttaatgagttatgcagcttttcattgtttcaatttccttttatttttcttgcaggatattgtttcgaaagttttgtctttttcacaaaaaagacctcgggctctttgtataatgtcaggcactggaacggtttcttcagtcactctgcgtgaacccgcttcaacaacgccttccttaacatttgaggtttcaaaatcgttcattcagttaatccaaaaaagaaccaaaccgtggagaactaaagattctttatcccttctttgtgttctttagggacgttttgagattctaagtttaggtggatcttatctggtgaatgaagaaggtggatccaaaagtcgaacaggcggtttgagtgtctctctttctggtcctgaaggtcatgttatcggcggtggaattggaatgcttatcgcagccagcctcgttcaggtatttcaaaattggtttggctccattaagttttgttttggttgtaattgtttggtataacatttgtgctacctggaatacaaaagttcaaaatacggttctggtacggtttgagaaattttgtttggatttgtttatatgtaatgtgactcttaaactaaatttttttgttggttgttattttgaaggtggtggcttgtagtttcgtgtacggagcaagtgcaaagtctaataataacaataacaagaccatcaaacaagaaataaaacctaagcaagagccgaccaatagcgaaatggagaccacacctggtagtgcaccagaagctgcagcatcgacgggtcagcatacgccacagaacttcccagctcagggaatgagcggatggcccgtttcaggctcaggctcaggcagatcacttgactctagcagaaacccactcactgatattgacttgactcgcgggtgattcaaaacaaaaacattattagtctttcttcctatttactccgactactaccctttagtcttggaagcagcagcagcagcatacattatgtgagtgctgtacatatctttgttgttgtagatttctctctgggaatgttaaaaccagacatttcaggattgagaccagaactctcagttccttattgtaacattctcaatgtaacagaaccaccccactttcaggctactcaacgagattgtaactcttttatatcactcattaaagcttcctttggtttcttcaatatctgtgttcaattcggttttggttttgagtgtttggttttagaaatgaagtaatctatccaagttgatcagcctgagataataatgctggtttatctaaataaccgatttggctctcaaacagaactaatcaatccaagtcaatgtcatggctctttattgaatgagagaggttcataatcaaatacaatacgattcagcaacaaagcttcatcattcaggagatattcagaagattctttatgtcatgctgcagaaaaattgagacaagaaagttagcagagatagtgtctgagagagagtgaatgagagatagttgctttacctcaagtgtaagaggggaagtagttggataataacgttgtacagcttgaccgtttttgtcaacaagaaacttagcaaagttccattgaatgtcatcgccgaagattccccatttgcctttcttcaggaacttatacagaggagaagcattctctccgtttacttcaatctaatacaaaattggacatatacgaatgttttaagaacttcaggacaatcatagagaattgtagtgaactcatcgagtgaactatagtaccttgttgaaaatggggaattcagatttgaagcgagtacaaacaaagtcagtaatttggtcattagttcccggttcctcgtcaccaaactggttacaaggaaatgctagaatctccagacctgcaacagaacaacatcaatgaggaagctaataacgtggacttagaaatttgttgaaatcactactttacctttatctttatacctgttgtaaagctcattcaattcagtgtagtttgagtttgtcatcccactgagaccatcatagagtatataataaacaagacaagacgagaaagttacaaacgaaagaagcttaatagaatgtctaataaactaaccatttggaagcaacattgacaattaaaagaactttgtctttgtattgactgagtgctaagttgttcccttttgcatcctgttacaggaagaacaagataaagactcagaggccaacacaagaaatcaatcaaagatcatagaaaacaatctgtgagagaccaatcaacagaagaaagaaacatgatccatcatgatctgattgattctactgagaaaagcaatcctaaactaaacatcgggatacaacagaagacaaatcgttccttcagacaatataaaaatttgacattccttttcatccggaaaagcctacaagacaccttaaagtaaaaactcttcacattcttagaacccttatatcaaaggtgcttccttttaacaaaagatctcacattcaagttatcagagacagagagagttattgaatcgatgactcaagttagagaaatgtattcacctcgatgcttaactcgtaaacagattctggttccttcgtcgccatttctcactgggaaatgcagaagaagcagtcaacgaggaaggaaagaaagaagctgaagcaagagaaagggacttggtcacacgcgcgagtaatgcgcgtgacgttcgatatagagtcgtttctctgttttaactggtcttaatgggcttctattgggccacttttgatatattttcagaatcctttagtttttggcaaaacctccaaaaactataaaatgatgatagctttaagtactcatcaaaataatcatttatcaacatattcactcacataagcgtttataaaattttagcaaatttctttatagtaaaattaattaaagaataaaaatcatatcatgaaaacaatttgctatattttattactgatttttttcaacgtacgtcaaactagaaacctatacaatcataaggccttttctctagatatgctattttataatttatcctaagtcacatggcaccaccactgcaccaccttatacaaataaggcatttctaaacattttggcaatcatcttttgagatttttaaaaatattcaaataaacgaactacatttgaaaatttgacaattaaaatcaaacgaaaaacgaaagttatacagtttttgcaatcttcttgaataaactatccatagtaatatcgaaagcatctcgaaatctctcaaacttagcattagaatctccatagaccaaaccaggcaaaagctcatgaacaatgtaactcctcatgtcctctctttcccttagagtctttgacattaacttctcaatcacattcactctcttcaacttcacatcttctttgtttatatacaccgaatatctccggtgatcctccggtaaatgccacgtgtactggtaatacgcgctgtacggatcaaatatcaccggaatacaacctaatatgagggaatcgaaaatcgatttccttgttggactgtctccaggcggttgaaggcagaactccgaatctcggaaaagctcgataaccgattccgatttatcgcagcctccatcggtacaattcaaaaaccggcattggtttggagacgatctgcattggtcaatcaatattgaccggatgctctcagggttaccgggtcttgctgcaccagcgaagctaattaggctccgacgaggtttcccaagtattttgttttgccatatggcgatatcggtgtcagttttcgggtggaagtatgtgggatgaggtatcgcgatgtcgttgacttcccatggattacgttcgatgagaagctttgtagggtttttcatttcttgcatctcaagtaagcttgagccccaagaatacttatcaaccctcctaaaatcccaagagatctttccgagaacaaaaacatgatcttttccggagtttttcctccatgatttcttcgatccgagccatttaacaatctcaatcggcaaaacatctttcacatcgcttgaaacgttcttgaaatgccatctcaaaacatccataccgccatagaaaggcacatagaagagcttcgcttgagtctcgttatgaaccctacatggatgcttcaaaattctagagtgaaatatcggctcaagtgaatactgatgcgttctgaaccagcctttacccatactctccatcagttcaccaaacgcatcgttcttgaagtagttgcaaaaatcagcccatggaaccatatcggagcattccctcaacaaatctttgttgaatttagatggtaaatcgtaaacgtatacaccttttccttcgcaagatcccggctttttgcggttgtttcccatcgataaccaagttctctgtatttgaatatactcttccgtagattttagaccggtctcctcgtcttcggtcttcgctttgaaatatcggtatcgttcttcgccagtttctggatcccaatcaatgatgaaatcttgatcaatctcgtttttgggtaaagaatcttgatcaagaacggaatcaagattcttttcatggatgggtttagcatcttgattaagaatggaaactctttctccggaggtttctcctgtgaaagtttcgttcttattgatggtgaggttttctccgaccgtagatttgtctgaatcttttcctccctcgaaggtttcattttctgcgaaacccttgtctccgtctttaccaagaacaaaaacattcttctcttctttacttgttaccacatcttcactagccggcgcagtgaaattgttgactggtgcacgtaaagcgggctgagaaccggcagtgaggcaataaaggtcagtgagcttccgcgaagagatgcatatatgaacgacgttaccagagataacggtcgtggaagtggaccaaagataaatcaagaaaagaaagagaatcgtgagaggtacacgataaagaaatgatctggcggaaaagatcgaaaaaaggttattacagcaagtacgaggatctttaagtgttttttcgggatttccggtttcggtctttttggacgttcttggtcgtctcaactttgagacggagacaggcattttcttgtttggttgttttttggattctcttttgtgtacaagcttttgtagatgttttgatagggacatctggacatgcactcacgtcgtcacataattgtagtaaaatgatcaatgagtgtgcacgtcttgttgtaacaaacttaaatcatttgatttggaaacctgataatagaaatagatgcatatgttaatattatatagcaatgtttgttagtttagtattcattgaatcttatagtgaaattaataatccaagttttggtagttaaaacgaattaaattaacgtgcctccaagttaaaattttggaaaacaacttctcttatatatggttgtggaatattcactttgactttggatgcgagtgaatatatccataataacacaagatctatctagctggccttttttggtcaacttaaatttataattcaaagtaggggttatgcaaccaatccggaaaaaaaaggaatctataaaacacaaagttgacatatagtatacgagaagaaaacgaagcagaaatgtttacttttctccttgcaacaacattgtcccattgatgcactcaccgttagttttgggacgatgaagaagattgttattgcattcaatcattctccatgatctatcaactcctcccaatgtgaatacttgatgttcaaaagatggaccatcccagtaatcattcactttttccgacatgcacaatacttaatttatactcaccattgactggatcatacccgaaaaagttttggataatcttttttcttgatttcactttgggtaaaggtatgtacttacttgtgctagggttgcatataaattgttctcgtccacatccaagacttatcaaaccattaacgtaataaggaacattattgatcctgcggcaatacggactcgggattgagcatgtcgcactaagagataaataatacggtagattcttggttgatgtcgaggaatacgtgaagaagttacaaatctggcgtccgttttggttatctaaatatttgaatgcaaagagtatatgtggctgaagcgaagacctaaagggaaacgatctaatgaaatatcgactgcggataattgttgccaataacttggatacaacgagaaacttagctacggacttcacaggcaatctcttcttgtctccgacgttacttgacttactcgagactccttctctatctttgtccttttgctgccatgtctagttctcattatcacgtttcaaagtataatcctaatcttcttatctttatttgtgtcctctctgctcttgtcttataataaggcaaatattttccttttccaaataggaaaaagggaagcaacgaaaatatggaggcaaagtaaatcaattattagttcatggacttaaattctagataaggagtggaaacttactgtacggtttgtttattggttcatcaaattcaataaccggtactcggtttagttcaattttttaaactcgctccacctgaatctcccgaatctccagatgatcaagcttcttaggtcgcttgtagttcttaagcaagagagagcaacacacaacactaacagaagaagcagccattgcagcacctgcaatccatggaggcaacctgaaacgtgtccctgggaaaagcactcccgcagcgatcggtatccccatgaggttatacccgagagcccatacgtagttgagacggattcttgagaacgttttccttgaaagatcaatggctgtgatcacatcttctaagttgcttttcatcagaactatatccgctgcttctatagcaatgtctgttcctgcacctatcgccatacctacatccgctgccacgagagccggtgagtcattgattccgtcacctaccattgccacaacatgtcccgcagcctgcaatatatattcattgcttttatcaattccatatatgtgaactttttaacatttagtgtggagcttttactcaagtacctgtaattccttgactttctctgctttttgctcaggtttagcttctgcgataacagagtcgataccgacttctctagcaattgagtttgctgttccccagttgtcaccagttaccatgatgcttttgatattcatggattttagaatggagatggcttctcgagcactcggttttagaggatccgaaacagacaaaactccaatcagttcactgtttatggagacaagaattccggtctgggccatatcttcagagtcagctagcaactcttcagcatcatctggaataataactttatgatcattcatcagattcttgttccccaccataatctctctacctttaacggtggctttcactccctttccagtgatggacacaaaatcacaggcttctggccaggcagggttctcttcgtcgtctctgaatttcttcgcgtactcgacaatggcctttgctaacggatgctcactgtttacctgataaacaaaatagcatcaacatagtaatattacttttgatgtaggccaggagtttccaaaagtttacctcagttgcagcaacaagttcatagaactctcgaagtaccatgtttttcaggagctttgttttcacaacaacgggcttccccatcgtgagagttcctgtcttgtcaaagacaatgcaatttacctacaccgtcattgaaactgtcaggtttcaccatttcagaaaagaaatgatccagagaacctgagtaaagtatatacagtatagtaagtttacaaagccatagaccaagttactgcacactaaactaaccttgtgtgctctttctagggcttggccaccctttatcagcacaccttgggatgcaccaaccccagtaccaaccataacagcagttggagtagccagcccaagagcacatggacaagctatgaccatgacagagatcccgaactgaagagctagctcaaagctatccatcgaagaaggtatccaggattcagggtaccaatgcagtttcccagctaagaaccaggcaagccaagttgagaacgagaggaaaattaccttcaacattataatccagtgagtttaaaaaatagttgtgcctctaaaagactaaataatttgtttatcaactggtcagattactcacaagaggaacaaagaacttggaaatccgatcagccaacttctgtactggagctttggccagttgtgcggactcaacaagtcgaacaatctgagcaagagcactctctgaaccaacccttgtaaccttaacatgcagaacaccattctcgttcaaagtgcctcctataactgtatcaccctttctctttgccactggcctagcctctccagtgatcatactttcattcacatgactttgtccccatatgacataaccatctgaagctactttagcaccaggaacaattttgatcacgtcattcttctgtatcaatcgaccatcaatctcctcttcaccagtcacattcccttccttgtccaaactcaacaatatcgcagtgtcgggtgccaagttcataagctttgcgatcgcttgagatgtttttcctttagccataacctccaaatattttcctagtatgataaaggaaatgagcatggcactagtctcaaagaaatctactcccttgaaatcaggagatgttgcagctctcaacactgtgtataatgaatagaaataagctgcatttgtccccagagcaatcagaacatccatattagccgatcctcggcgtaaagccttgtaagagccagtataaaatctccaaccaatgacaaactggacaggagtagccaaaacacaccttatgatttctccaacggtgagcatattgatgaccttaaacatgagcaaatctttaattccagggatatacataaagaccatggctgtcaaaaacaccggtactgtaaaaaccaaactccagagaaacgacttataatactgcttaatctccccttgcttttgagattctctgcctacccctccctctgagaatattgttgccttgatgtgaccactatgaccaaagacagtagactcaatcacctgaatgaaattcctcggccccgtcacatcaggtttgtacaatacagatatcttatcagttccatggctgatctcaacactttgaacaccaggaagtgcttcaagcgacctttcaataaccttcatggattcatcagtaagctcaccatcaatcttcaaatcaatcttgctcacatcctcgcctgtacttataagcacagcttcaaaaccagcattttctatctcctccaatagtctatcatagctcgagagtctaggatcataatgaatctcagcttcttcaattgctaaagccacatgtgctctttgtacaccattaaccgattgcaaaactctttcgattgttgaagaacacgaagtacaagtcataccattaattcttattctacaaacttgtctcgacctctcattcgcttcattttcgatcaacgatgcttcaaatccagcatcctcaatagtctcacgaattgtctccacctataaatccacaattacacagaaaaagaaaacctaaatcccaaatcaagtcttctcagaaacaattcaaccgagattcgagagaatatcatagcttacatcgacagagttagggtaaaacagaatctgagcacgattattcagagcatcgatgacagcatcgtgaattccagggagacgcttgatagccttttcaacagatccagcgcaagcagagcaagtcattcctaacacttgaaaaaccgccctggaaatcggatcatcgatctcaaaagccgccgtctccgacgatgatcctccgccgccgtcgcgagacctggtaaggtgcttccgcaccagagggtaacgctcgctgaatctctctttccttatgcatgtaagcgacaaaagcttcgtcgccatgtaatcgatcgtcttgtgcgcgaatcttgttcttctcgtatcgaatttgagtttttaaaaagcttttaggtttatgggaaatgatgagactttttgaaattgttttgctttttaaattggaacgaagacgagggaaagcggtttacgacatctaaaatgacaaaaatgtgtgggccgatttgtaaatgtttaaactatagggccctaccaaacaatactttacttttaaatttcaaccgccatatataaaaagagagaatttcaacctcaacagattaaattccaattttcttttaaattatataattcaaatttaatcgtccaaagtaacaacacctttgactttaaggttcgctaaaaaaatggattgattagtgatgacaaaaaaaaaaggattgattagtgatattattacgacatgatgaagtaatctttttttttttttgataattaagaacaggcctgattaagaatgattaagtaatctttacttgtttttttctgtttcaataaaataatatgacaatatactaacgaaacttggctaatccatatctgttttaactaaaggtaaaatggaatctattttacgtgtctgtctaatcttttatggcactcaacctcgtaagaagaagtcataccaaaattgaagattgaaaacagtcaaagcattgataaatgggcctattgacttgtgtggcccatttagactgatacgaggctaaatgtgggccttttattaagttgatccatgcattatgatttatgaacttcaactacgtttcttcttcttcttggtccgcaaacacttgtctgagactgatattgatctcaaattgattgccttgaagctttttccaatgagactaatcatgtcaaacaatagatacaatgctctatataatataagattaaaggttagatccaaacacactacattaacattcttcaacctctcatagattttcaaataatagagaaaatctttcagaaactatgttcatctcttcatttacaaacactttgaaccacccaaaactcaaaactaatcaagaacacagacacactcgtcaagatcagagcaaaaaaaaacaatatcaaatgttgtaatcagtcgattgatttacagagttgagagtttggtttttagttagttagcattgcatcattcaacactcgttttctttcctttcatcattctcatcacgagtcaagcgccagctcggcccaagccaaagaagatgatctaagctccgctgaaatagacagactgattctgctctccaatgtctcgcatagctcttgcactgagggcttgttgtgattgttgttgttgttggttgggtcccggttcaagcattggctagccacttcgcataccgtctcaagatcttcttggttaaaatgtttcagctctggatccaccaatcccgacattgcctctggtgcttcaaggaactcctttgcctgcaaaatgcaatagatacgtttcaaattcaaaacttttgccacaaaaaccacatttgaggtgcgatataactaaacatgtgaacaaggtcaagacttccacatccagacgaaaactcgtctctccctgaacagacgactccattcctactaggctaacagtaacaaagtttttgatataaatggtgaaaaaagaggaggaggaagtaactcagtttcaagtgtttagagaaactgagttgtttttgtcttacccattcaattaagaatcctttgtctttgcaataaggaggtcttccactgacaatttccagcaaaagaatcccgaatgcatagatattacccgacacatcaagatatcggctctccattccgtttgggagtacacatatcgaaccctggctactaatatttctcaaattcttttctgatcttgcaagaattgtcttccagcattcgaaatcaaccagctgcatcagagaaagtcagaaaaaagaaagaatgtgaacataaagcttagcttagctaattgtattactcagataacaagcaggtctcactttactttaccttgggagtaaaatcttctgtgagataaattgcgtttgagctcagctcagagattgtaaacggaggatcaagttccatatgaaggtacttgagaccacgtgcgatgcctataacaatcttcatccgtcttgcccacgatactaacgccgcttccccgtctgcatcaaaatatttcacataaaaatgttatctagctaaaacaatacaggatgatgcaacaaagctctgaggtaagttagactatttacagtgaaggtgctcatatagtgttccgtttgatgcatactcaaaaacaagcattcttgtaaatggtgagatctctttgcaatatccaagtaatttcgctgtgttctcgtggtttaatctagccaaatctgcaacctgaaacagtgaggagatggatttaaaatctcagaaaaaaggaggatatgtttaaagattgttcaatccaagtggcttggtgatgatgataacatgagaggaagctacctctctctggaaatagagctcaagatatccagtccaatcttcttcctttacacaaagagagatcaccgcaatctcagacccacctttcagcgttcctttatagatctgactatctgctgataaaccaatgatgttgctaaagtcttcacacgccacttcgagctcttgtcttgttaatctcgaaacatccttcagcatttcagaatctgtagttaaaataaaaacatgccacgtttttttagttctttgctccatggattctacattggaaggtaaagaattaggaaagattctaacctacgtagactgtgaacttttccttttcacttgaagatttcttccaaggaatgatgagagttgatctattgttccagcggtgaactgcagagaaaagtgcaaccagaaggagcaaaccaaccattgaccctgtgactatctcaagagctagaagccatttaggttttgatgctctatggtgcttagccaccatttgagctgattggtgcttaggagcagcgctcgggcttccatgagttttgaccagttgtgcattagctgcaacagggataacattcagaaaaccaagactaattgaacatgtatgtcgataaagtgaaaattattctatcttacacaccgcattgggaagaagatctatgcttaagatccttgttttgcatgcagttcccttgaaagctcgtcctagtgaccacaaaagagcatttctaagactaaattgaagacttagagagttccaaaagacagcatagatgatagaataccttggaaggttttctaaacattttggaatatttcccacgaaaaagttgtatgaaaagtcagctacttttaaagatttgcacaaaccagcgatgtttgcacttgaatttgaagaatacctaaataaattgaataaacaaaacccgattaacattgccatcatagacagaagtcacatagtgtttcatttttggcttcttgagctattaaacttacactttcgactgatagcccgatgctccagcaacaagaagacttccttgaagcctattcctgtcaatatgaagttctctaaggtacttcaagttaccgagctctgcaggcaactttccagtcaaaccattggactgaaggttgctgtaaaatgtgaaaagaaaaactgtcgtctcaacaactcatctgttaataagatatgaaagcatcactttgactgcgaaaaagatgaatctttattacattatcatgatgccggacaaactcccgatctctgcagggatcggtcccataagatgattgtttcccaagtccaagattttgagattctttaagtttcctatctccttaggtattgtccctattagaatgttcccatgtaggattctacagaagcattttaatgatgttaatgagatgcatcaaactcaatgcatcaaactacatatttgtgaaagagatgaaaccgtacagttcctgcaggtacgttatttgacccaattccggcgcaagaaacccttttatcgatgaagcggatatatttctgcacgaaaagaagatccacaagctataagctcaagccaacttcatcctaaaccactcataaacaactgattctgcagatactatacaagaataagtaaacgcaagagaaagaagaaaagatgaaagattcttacatcttgataacatgatctttagatggagagcaataaatgccggtccaatcacaaggatctgaattggggtcattccaattagacataactagcaaagggtcctcatagatagcttccttgaatcttctaagtgcttgaactaacaaaaacagagcagaagatccataaatctattagatgatttatatgatcagaccttgaattaaaagctttaacttcacagattcttctgatcttatccattaaaaagataaaactttttcaggttgattaagattctacactaatcccaactctgttcaagttaagttagaaagttgttcacagagagattcatggagactgaagaatctaaaaaggtatgagctttatctagcattttcttagtaaacctaacacaagcgagaaaacaattgaaatctgagatctgggtttaagaaaagtaacacaaaacaaagagattaacaaatagttttaccttcattagaggcaaacccatcacaagaaacgaagaagagaccaagaacaagagctaacgaacaaaaatacttcgatctcatcgtctgttgaaagattccttcaaattcggctcattaaaaaagaagcggaacctagattctttcacggatgatcaacagtataagctcaagaagaatctggagaaagacgacaactttctttgacaagtactctctgcagaaatgagatgtataagctcaagaagagaccaagtttagtaaagtaaagagcgagagagagagaagctgaagaatggaacaaggaaatggtaaaagagaagtgaaactggacaagattatttgattgatttagcaataaacctatcaaagaaaactcactgagacgagaacaaaaaaaaagtagcagagatgatgaagtgtggcgagaaagagagagagagagagacttggattcaaagacaggtttttgtttttccttgttggaggggaaaaatgagctttaatttttttatagaataaaaatagctatgaaaatatacaatttaaataaaaaatatcacagaaaggaagaatgttctcatcctctttatctttttatttcttttactttgggcaactttatgtgactctgagttgtttttaaatattctgaattatggatgttttttttacatgaatgtttgtttagtttttagatcgattttctattcatttatataagtgagaaatatatttatctatattaataatatatatacatcaatcatgtggcaaagcttaacaccaaattaataataaggaaatatccaaatctttctatatcaggaatctaggggcatatgtacaactgtatttttgcatgagattttaattgtaatatacagtaaattaaaaaatgatttgttagtgttaaaaaaatgatctgttgaaaagataatcgttgtattgttattcaaatatatattatcgctattttacttttaaaataaaatgtaaattttatacaaaaaaaattgtgcatcaagtgtaatgttccaatatcatcgttattatgtaagagtaaaattattttagaacctgatttttattaactttattaattatagatactaatgtggtatttgtgtagtaagagcaaaaaaaaaaaatatgagagaggtgagaaaaagtaggagagaaggagagttaaatttttcggaggagaaactttgagaaactattcttatcaaatttgtacagatgtcatcatattattagttcaactattaaataataattaatatatttgttttgattaaaatattaatatatttttttttgaaaaactttccttatttttactgatggaaatagtgtgccgtagatttttcttcactaatttaatgtggatctagtttttgaaagaggtaaattttttagtagtgaatttttagatattcaaaaaattaataataggacagactattattcgaacgtaaaatggaagagaacatctcattagaataatggtagaaatgaataaatttcgttggaagattcctaattaagagtataatattgttgctaatcattgaaataatagtgcgtttaatttataaagagaatttatttttcgtggtacggtcacggtgtctagtgtctactagtccactacggtgatctagagccttgctaagctgttgttacaacataccgtactactgtagatcacagctatgatcattaaattgtattttaatcaacggtcaacatattaacatgcaatactaatatataaaataattatattttgttagtaaattcaatttcattgtaataaaatagtatcgtgaaggctataaacaaacttcaaataatacgtatttgtcaattataataataagctatttaaatatagtatgctacaagaattattatttttagtgtgagagacaaaatgtcccatgaaagttacgccaccaatcatgcgagcttatgcttggagcgcgtgacgaatactctccgtattttaggtttattgttaccacttggaagttagaatcattaactatcacaattcacaagttcgaaaaatcatgactatgatgttgtgggactaaatgaagaaaaaacaaaaaaaagctaaaatctccattaagctttctctagaaacaattgttgtttcatggaaataaatcaaacataatgtcagaatattagaaaaaaacattatgcaaattaacacaataaagtagggaaaatcaaatggtttaaaagatacaacgctcaacaactctatcaattaaataatttcttttaattgtcaacaaagttacacaacatatatttttaatgtttggtacaaaatctacataaacatttttagatgaatccaactaacccctcgtttatttctagtacattctacgtttcttattttttttaataagtctttatataaattatataattggcctcaagagatcgtaacttcattaattgaacaacaaacaagagaaggggacaaattacccatgcgtgtcccaatttgtttgtttctaagttattttcgtgttatatttatttcgttatataaacgtacacacatatttgtttctaagacttgtcgacatcccattagatgattagatctcttgtatcatttatgtttatgttttgactgcttatgcacttaaaattcgtatggtatatactttctactgtttttttaatttttataatcaagatataaaaacgtattactaagaatattttctaattaaatatatacatacacttctgttacagtttggacatgaaggttcccttgtcgtcacgcccaatgcttacaagcaaacattgagtagatgctaagggaaattgataagaaccatcatgaatacacaactttgtgatgacatcaaatttaaatacggggcacttgttcaatcatactttctaaccaaaggattagtaccctttttccaatggatttaataatttaatgttgcagaatttggaagtcagcagttatctcaaattaaggtttgagcttatatgtacagtattcgggtttagatctaaaccgggtatgcaaatattgtgggttttacacgcattcggaataatttgatataacttaataactgaacttttattaatctgcaaattttatagtgttcgtgaaatttaagaagttatttcagtgttagatcaaccattttcttttctttttgtgcaacacgctactattttcttaacatgttctttttagtatttctagtgtagtattaaccattgacatcaattgtaacagattttaatgtgttttaactctctctttttaaaatgtgtgttttaagtttttatcagtcttacactatctttttcgcatgagagaaatcttaaatctgagttaaactcaaaagtattcaccgccgccgccgtgcttgtgtgaagagaaaacgacatttaatgaaatgaacaaaccacatacagtaatttcatattgataaaatctcaaaatattgggtatatcaaaaaaatctcaaaatatttataaaggatgatgttttattgggttctgttttttgaaaaattgatcatctttttatttttttgtgagtctctttattagtatagactattcagcaagacaactaaaccattaaatccatttggagaatttatcattaaatcattttcggtaaaagagtagtaaatgttttgtactaatatgtaaataataaataactagataattaatgatgatatgtacatatgatcgtgtcatgtgtgtatataagataggctgagaggcgatacacgtttgttccaccaagacgactagtaaccaagttggtaccaaatggctaatacgatattaacatcacagtttttttgacatgacaaattattgaaattttatatattatttcatatgatggtgagtttaagatactattctcataaacaatttgttccaattactcgataattaatcatgcttataagatttatattgaatgaactttgcatttgtttgtcaagtcagtgaaagataagtaaattattagaaaatagtacatatctcatttgtttataagaaagaattttaattcctcaaaattataatcaatctaacgttatccaatagataaaaaaaggtactataaaaatccccaactaaacttagatcatcaaatttagattatatcactttacagaaccttttgccagtaagagtcttcccatttctccacttgccggatgagattcaatttcttcctatggaacttctcaagaccattggaatcaaaaggaggaggaagtgaacatgggccagaagcatgaggcctactaactaaagagcctatcataaatttcttatcaaccccattaacatcttccccttcagaagggcacaccaaggcttctgtgcatagctcaacactattctttggaacttgaggcttgtacttaagaagcttggagtattcattcaacagatggaacatgtaatcataaacattttccattgatagatctctttgcatgaactcacttgcttctcttcctatctcttgagcctgaaaatcaaataaatctatgaaatcgtaggcaaagttatatatgtgattgaatttatcaaaaaattctatacaacatacttttgtttgcataatacagataaaccctttatttttcttcaaaacctaattatttttgacgaactagtttgatgtgatattgtattatacatatctataaatagatccagaaaaaaaaaatgatcatgttcatataagtaagataatgtagaaagagattataaaaaagatggagaagggtaccttttgagtgtgattattaagccaatcaacagcaaatttgatggatctacatttatctttatccctaatgggccaatagtgttggagaggttgaagagttcttgagaagaaatcatagtaataaggtttcaccatcaatgtgactgagtcacatgctaatatgtatttctcactcactgaccacgcatacccttctatatagatcttgtacctacatagtaactttattactccaatcattaaatgacacaaaaggaagaagaaattttagacaatggtactgacctgtaagtgcattgatttgctacattcgaattctcaaatcctctttgtccttctgatatccaatcctatttgcatgcaaatacaaatcaaaaatatatatatatatatatatatatatatatattgcataggaagacaagtataaataaatctgattatagaagcatacctgaatgaaaattctagcattccaatcatgtagtgaggataaattgcaagtgaggagatcttctcttgaaggagatgcaacaaaagggttccctttccaatatgcataggcgtctctttccataaatttcttcttcttctttccttcttccatttctttcaacactttgctccactcccttatgtttatctcctgccttcacccaccaaaattattccatttcatttcaatttcattcaaaaaataagaacttaatttgatagaaaacatgtttaaatgaatagttatgaaactaccaatatggttttggttttacacttcatgttttgctggaaagattgaatgacacaagaaattaaagttactttagtgaaacactttagttaaagcataataagtgataaacaacttacaaccacatatttaaattgtagtggcattgcgtggagggataatattgtttttggacttaccttttcgtccctttaaattactataattttagccactaactagctatactactatactcttaagaagatataatacaacaaaatgaatctattaagaatcacgaaagaatctatttgtgtataaatgaaaaaatggacccggtaacttttctccggcatgtgatcaagtggggacaagtgtaccttaacaaccatacacgttagcttcagagttcagacaaaagaagaaaaaaggagaaagtgagaagagattatattctagtacttaccatccccagaatgaccaatcaggaaagacgatatccaccgtccacctatcaccgcaatatctaaacaacggaggtggcgcattctcaaccgtacgattcaatatattataaccgtccgatctaatgactggtcgatcatcacagtcaaacatgagatccacgtcaggtaacttccctggatactttctcagcagctgaagaatcccccatagtgtgaacgcatctctagtttgtatagacttcttgtagttttcgacgaacaccttgccgtttaaaataactaacctgaaatgtgctgtagttttgcctctttccaccatttcttttgttatccctgtttctctccatggttttagatcctcgtgaatccacttgaagtaatcaggacaagaccggttagattcggtttggttttgattataacccgattgcagtgttcttgagcaagaaccagaccggttttgattcaagaaacttgagcaatctaccgagcttccggtttcctccggtgatttcttctctgatacacgtaccgggaccggttttattgttgttattgtcggtcgatgagatggttttttctatagtaacaaaaaaatgttgtcataatttatttttcaatcatgaacatatatattaggcataatcatggaagtaaagaagaagaattaccttgttaagtagaggtgttcttgagcaagaaccggaccggttttgattcaagaaacttgtgcaatttaccaatactccggtttcatgcggtggctctagctccggttctggttttgttgctactaatgtcggtcgatcaaatgcttttgtcgtctttgataaacaaacaataattcaaagtatgaataatagttatcatgatagtgtgaactatgtatatatagtgaaaagaatgatttaccttgttaagccatagagaggaagtgacggcaataccggcggcgattaggaagagaagaagcgttaaagttgccacgtggagttttccgataaccggacggtaagttttaaagttggtgatatgagaagtgagagctctaggtttagagaatagagacgtcatcgttatgattttttctttcttggattattaagggaatttttttgtctttgacatttttgttgatatctcgaaaacaagttggggggggtttctctttctatttttttttttttgaacttaaaaaggttgaggaaaaaagtagaaaagaaaatgcctcgtgggtttgagagaatgatgaggacacgagtcacacgacattgatgatagtggacttgttttgctactagtatatactttggaattcggaaatttaaactagtcaactttatcactcgatcgtttcaattacgttatttacatagattatacgtatagaataatttttttctgttcaacatatgataatcatatagtactactatttaaagcgtggccatatgtggataaaagttaaaagggatttcgatggaagtgtttttttgtctttcaagtatctcactatggttttttaatccactatgcttcatcaaataaaattgttcaaattttaaacttatatcaaaatagatgagcaaatcgagcaaatcaagcaaataggaggaagccttcattacctttctgctggcccgttgtcatcttcggtagtgagatcatatacttgctctataacattctcatgagggctcaagaaaggtattcaactattgaatttcttatactaattaccgactactaaaagaagaatatgaagcaatctttataagttgttcttgtggtcttgccttgcgcattcacgaagaaggaaagagtgacttgtttttaattcgtgtgataaaatttgaatttatattacgaaaatggtaacttgatggttagtaactacacaatttaaacacattgtgttggagaacagcttttttcccaaaacactcaaattcatgttttacgagtgtaagttaagcagattttttcttgtctagccatttcacaaaaaaacgagttgagatagctgatctttgtttggtgcatagaagaagaacaccggcgctgaggcttttcgtagggaataaaaaagagaggctgttaacaccattcatttcaaataaagtacattatagggggttttgacaaagaaatttatatacttttttcattttgttatgtatatataaaaatttcaaaactcaccaatttaatctcaatattaaaaattactaaccaacactcctatagtcctatgcatgtaatttgtcgaatcactatagattttaatatataatttttgatatttgtgcaagtttagtcaccataaccaaaaatcgttgggttactggaaatacaaggtccattaagtagagatgagatcccataaaatataacgaaatctcttgtataaggcccattatcactttcaagagagcagattgttgagtttattggaaatttgaggcttgatcctaagatgcttgcaaatatcatttaacacactctctgttgttgtatgatatgaaccaagtcatgggatgtgaagtttcaaaactcaaacttcaatcccccgaaggcctatggaacggaaaccatatttgcattatggattcatttggatcatccaatcacctttgaattaatctccgacaaatagttaaaagacgtaatctcaaaactctaaagtcaatattattttttcatttatcacttgtttcattatttagctgactgtactcttctttatattattgttttaacttgttcgatgcgatgcgatgcaactcatcatttatttcataaataaaaaaatagccaaatgaacagttgatattcattatgaaccacaaaaaatggtacgatgtagcaattgtataattttctaatcgaaacaaagttgatagaactatttacatcattatttatgaatgatgaggtcggaagagacaaaacatgcataaactttgtgtctcggttttcttataaggtttttaatgtttcaatttgcaatgatgtcaaacattagggtcccaaactgaataagtgtaaatatgtgtgacctttttctaatattttactctctaattaattatatggtcgtgcatgatcttatttattttatacttaagtaagataacaaacgtttgtacataatgataagatgaaaaaaatgttatagaattatgagtgcgctaaattttctttaaccgtatgtatgtataatggtggtcctaaaactttaaaacgggtttagtttgtggcctgaaatgaaacgtgtaacccactaattacaaaatctctataatctttaatttcaaaaaaaatcaaggataactcagtttattaaaatgtgtacgtacttgactgcgtgagtcattctaaagattaattatcgattagaaattatatttgtgggcatgaatcgattccattaataaacattaaaaaaatgtaatcttcgttttagataaaatgatgttgaagatcctgagtcggctcaaacattcttgtctctgaatgaagtttcaacagcatacgtacgtagtttggcactggtggcaatgacaattcgtctagtaacaacaagtttgatactcaagtacttgttactagactagtctagcagttgctattatgttgaataatcttgtgttctgaaattcacaatcgagaatattggtttaaaccttcatcaagcttcatatgcgagacactattttcatttttagaaaaatttcgtaacaaaacttttaaaaacgttatctatatattcctaggaaaattttctttatgacttaactaaaaaaatactcaaccaataagaacagatattaaaaatacaattggtgataaaatatcaaaatagatttgaactttgcataaaaagttctacaaaatcaaagaaaaacctcaaatatctaataattaaaaacgaactgagaatatttttaaaattatagtatatgaatggaaacacaaaataaaaatgatttcaggtttaattctttagaaaatatgatacgaataaaagcaaaagaagaaaaaactcttcttcaaaacgagagaaacaattttgtagaggaacttgcataaattaaggacctccggcagataagtccactatcaacatgtataatatgcgaaatgcggtgtttgtattttgtaattatatcttttatcttatttaatgtttatacttttttttttgtatgacagacatctcgataagaattgtattatatacaaacaataatattttataaacacagcaaaattgaaaaagagtgataataacgcccaaccgtggaaacgttgtgaggatagtaataattttataagaagataggagtttttatttgaaaataattaaaaagtgatttgttttactaaacaaaagtgaatttttatttctctatgacatttgtcggctctatgagaatgtacatctaattcctaattttacacagttaaagttagtgctatatttttcaaaagcaaaaaagttagtgccatttttttttcaatttcattttgtaaggtaataagtgaaaccttaataattactttaacatttgcacatatacatatgcatgtcaaatttaacgtaatagatagattttttttttttttgtaaaatatataatattcgctcctcttttttacttaacaaagtcatatgtataaatcatatatgatgtcaaagattaaattattattggtcaccgtacatgaatctggtattgggagaaaattagaaaaattcaaagtgatcctagttgtttattttaatgggagataagaaaaggaaggctgattatataaatacaagtcattgaggtgtataagacttcttcaacttcaactacaatttcagtttcataataattattgaagtatatagtttatataccatttctcttctctctgtctctttgtctctctctctttaccatggctagggtttttcctcaagcggccatctcttcaccgtacatgagtacggagagagagactttcacggtttggatgaaatctctggtttaccaaaccaatggtttaactgtttacaattccaacggagagattacttaccgtgtcgaaaactacgacaaatgtagcaatgaagtccatatcatggatctccatggcaacattttgttcaccatccgcaaaaaggtataatcaatccctcgttgattcggttcgattctttttttcttggttcatcccggttcgagctccaaacaaactagtagttcgaaaattttgttgaccatccagaaaagtaaagttttcaagttcataaacatgctctaataccctcctctaagaaactatggggctaaagtctcataacttattggattcttaaaaatttattgaataatgaatcatttgaaaatcaacaacgccaaaaaaaataaaaaaaaattggaatttacaatttaaactaaaaaaaaagttaaatgaagtttctctagctcaatttagaaatagtttttcaaaaatatagtaagcaagcaaccatacttaacttatattaaaaaaactcaaactatgattcaaatttgcgccgtggaattggacttttaaaatttaatgatgatcatgtgtaaacaagttggacaataatatgaataaattcatcatatgttttaaaattattgtgtttcttgtttaaaaaatatttgcagaaattatggcttttcgggagttggtatgtgtatagagaatgtggaagctttacaagcacggaagaagtgaaaccttgtgctagaatcaaaaggtcttcgataagagatggagattgggaagttcgagatgagaccaatgaagtcttttggattttaagatttgaccccaaatttgcttttcagatcatagacattcacggaaatatcattgcacaggtaaatatatcaatattttgaaccaaaaaaacgaaattgaaagagtatatatatatatagagttaaatacttaaccatatacatgtttaataggttaagccaaagcaatcatcaaatgggattacattgggagaagatgtgttaactttggaggtgaaaccacgtgttgatcactcactcgttgtcacacttgtcactgtatatggattaattaaaggagtagtctaatttttcttgtttgatttgtatagtaaaaacacacacacaaatagtgatttttccaaccttgtttgtgttgtggaatatgtaaatattcttttttttgcgagccttgaattttgcttgttttttaagctctgtccaaaaaaacattccacaatagaattatattgtttagggggaaaaagccgaaaaaatcgtcatttatttttaatttggctgtttaatacatgtagttttaaatttggattaaaaatacctcacttattttttgttgtcttttaaaaccatcgtcttttagattttggtaatttcgaacctggtacttaacagccgtcaatgaacataacggaattatttgaccctacgtatttcaattatataataataggtttacaaaaagttttgtttatattgtcttggtctagtggtaccgcagggtttgggtaatcccaatttctcggttcgagtctacatcccactccttttaatttttattttttatttttctgatttacttcatcttcttcacgagtttttttttatctccagtaattgattttatttttcaactctcatcatttatggttttggtgatggagagacatgtgattgatcggggaaagacgaagaaagagttagagattttggttaaatgatatagattgatggggaagtgaagcaattgagggattttgaggaggaagaagtagcagtaggagatgaaatcgccattgaaatatgagaaaatttagggtttttggtgaattgaaggaatctttgagaagaatgtgagatttgtgaaaaaagtgaggaaataaaggaaaaatcaattgcagggatggtgaagaagatgaagtgaaaaacaaaaaataaacgaaaaaaaaataactaaatgggaaagaggcggggttcgaacctgtgaactgatgattatcctacattattgttaccaccagaccaagacaacacgcacatacttttttgcaaattcattgtttataaatatgacaacacgtagggttaaaatttaacgctgttaaatgattccgttacgggcatcaacgcctgttaagtggtaggttcgaaactaccaaaatttaaaagacaatggttttaagagacaaaaaaaataagtaaggtatttttattccaaatttaaaactataggtattaaacggccaaattaaaaataaatggagattttttcggctttttcccctattgtttaggacttacatatagcaaatataaattatcattcgaagtctgaactcttcatgataggtccatgatccggaccattgagtttcatttgccaacaaattttgcctatggataaaatgttaaagaaagaagaagacaacttttaaagtttgaaaatcttctcgtgtccacctaataggagcataacaaagagcagtaccactgtactagtcatgtccacgaaactcacactcaacaacaacaagaacaaatttaacatgaaaacacaaactgggtccagaagtaaacaacaaggtcgattcacctcacatatgcaatcacaagggaggatggttgctccccaattcgtttctcgaggattgattgtttcaagacagcatttccagatagtttttttccaatctcccatcatgcaacatatcaatcaccatatttattgttgaagcatctccagcaaactcgcgactcctcattcctctgatgagttcagctgatgctgctttgtcaccatctctaagatgtgccctaataaacgtattttatgtaccgctatctggaagaggcccatcttctctcatttttctgaacaaggcatctgcttcttcctttaaacctttcctacaaaatcctgagatcatagtattgtaaattattacatcaggtttcactcctttaaggctgaggctacaaaatagatcccacccatcttccaccttccctgccttgcacatcccttcaatcataatattatatgtgtaaatagtaggttccattttactcctttgcagatactcgaatacaaccattgctttctctagcttcccatttttacaaagtccatctaacagagtgttgtatgtcataatattgggatgcacaccatcagaaaccatctgtttgaacaccatttgggcattatcacaatctctagcttgaaaaaatccatggataagagtggtgtaagtgactgtgttgccaaccaatcctctttgagacatctcgcggaagagttccacaccttcgtctattctcttagccttacaaaatccgttaataagagtattgtaagtcactacgtttgggaaacagtccttgctaatcatcaactcaaacatgtgcttggcctcgtctaaacgatcgtgcatacaaaacccattgatcagtgaactataagtgaaaatatcaggatctatagaccttttgatcatctcgtcgtacaatttctcagcctctacaagcttcccctccttcacaaatgcatcaatcaatgcgttgaaagtgactacatttggattgattttcctctcaatcatatcactgagtagtcgagaagcatcactccatctttcgtaattacaaaggcaacttatgagggagctgtaggtaataacatttggtctaactcctttgttttccatttcagtgaacaagttgagtgcatcatcctcatgtctatatttgcagagactatctatgactgtgctgtagatcacaacattggcctctattttcgcagcttccatcttgttgagcagattaaaagccaaatcaatatcacctctcttacataatccatttactaccactccataagtaaccagatttggttgacagcctctttgaaccattcgatcaactaacgccacagcttcagaagctttgttgtggagaaaaagcccatgaatcaaagttgtaaatgtgattgtgtcaggtctataccccatttccaccatttgatcaaccaaagctacagcatctgaaatcctcttaccgtgacagtatccattgagaagagaagaaagcgtgacaatgctgggctcatagccgagtttcatcatcttgccaagaagagctaaagcaagagagatttgagagcgtcggcagaaacagttgatcaaaatattgtaagtatatagattatgtgaaattcctaacctctgcatcttctcacctagagagatgacaagatcaaactttttcatcttagcaatggcactcaacagtttattgaactcaaaaatggaaggtaaaggacgtgacttgaccatgccaccgaacaaaccaattgcatcatctaacttcatactatgtaacccatttctcaatatctctctgtaatcaccactgccactagaaaaagctcgtccccagtaacacatcccgcaaagatcaatggaagaaggagcaattcgaggattacctttcccctgaagattccgatgaacaaatctactcgtcgtcgatgaaactacactcgaaattgagatcctcatcttctcgttttggcttcagctgattctcaatctcactcttactctcactcctctctgcaaatcgcaaaccctacacggagagagagatatgcaaaccggtgggattctggtttagaactgattaccaaaccggtttactaacgattgaattttgaagcgggccataaaactgttttgggacttccacttaccctctagataaaacgcagcgtttagataatttctcaggaatttgtttttgtttttttaacattgtgtcgtggtgtgtgtggatcatgagtttttgggccacatatttataaaaaggccgtagtatattcaccatcgttaacgaatctcgttaaaaaaaccaatggcgccttccttatcaccaatcagatcacaccacgtggcagttatcggcgccggagccgccggattagtagcggcgcgagagcttcgacgggaaggtcactcggtggtcgtcttcgagagacaaaaacaagtcggaggaacctggatatacaccgatcatatcgaacccgatccattaagcgttgacccgacccgatccgttgttcattcgagcgtttatggctctctccgaactaatctcccccgtgagtgtatgggatacagggacttcccgttcgtggttcgttccggtgtatcggaatctagagatccgaggaggtttccgagtcatggtgaagttttggcgtatttacaagatttcgctaaggagtttgcgatcgaggagatgattcggtttgatacggcggttgtgaaggttgctccggcggcggaagaaggaagcgggaaatggagaattgaatctacggagaaagagaagaaaaaatgggcacaccgggcagtgtagttccggaatcgacaatgtatgtattcccggtgacatattgagaagaatcgtgaatgagatagcgaacaagagatgtaagccccggatccacagtctgttgcatctttaatggtacaaccttttccgtaaccttcttgagccactctttctggaaaagaccttgtgtgatctctgacctgaaaatccccggtgcgatcgagttcactctgatcttataaacagctaactcaatagccatcatcctcgtcatggtgtcaacaccacctttggaacaagcatacgctagtccaccgcgcaacaaaccgcgatgaagcccagagatcgacgagacgttaatcaccgagcccccgcgctcagcgtcacgcatcaaaaggcagacgtatttggatattaaccaagatccggttaagttggttctaaagactttgtcccattcttcttctgacaaatccaaactcgacttgacattgcctctgattccggcattattgatcaaaacatcgatctttccaaaggtttcccaagcttctttaaccgcttttcgaatagtgtctgcttctgatgaaacgtctagctcaagtgctacggcttggactccgatagcaccaaagctgttgatttcagaacagagagagttgagacgatcaacacgacgagctgctgctacaatcttacaaccagctttgcatagatcaagacagatctctctccctataccagaggaagcacctgtcacaagaaccactttatctttaagttcacaccatggctccaattgcttcaatacctgcttctgtccacaaaaaaaacaaacaatcatcaagaaagtggaagggcaaaatgagagaaaagaaatctcacagtttgatgattgctcatattgattgatgtttcactgtctcggtggagaagaaatacaatgacacaagttatataataaaagcatttctctctatcaaccaaaacgtggcaatctacgtctgtaataacagattcgtgtaagtttctaacacaccaaattgattattaaaaacattgtaatcataaattgtaacaagtgtgtgtgattgtgattcatagattctaatcaaagaacacacaaatggcacctgcattatcaccaaccagatcacaccacgtggcggttatcggtgctggacccgccggactagtagcggcacgagagcttcgacgagaaggtcactcagtggtcgttttcgagaaacaaaaacaagtgggaggaacctggatttacaccgatgaagtcgaatcggatccgttaagtgttgacccgacccgatccgttgttcattcaagcgtctatagatctctacgaatcaacggtacacgagagtgtaccggatacagagatttcccgttcgtggttcgttccggtgtgtctagagatcggaggaggtttccgagtcatggcgaagttttggcgtatttgaaagatttcgctaaggagtttgggattgaggagatggttaggtttgagacggaggttgtgaaggtttctccggcggcggaggaaggaatcgggaagtggaggattgaatcgacggagaaagagaagaaagttcgtcgtgatgagatttatgatgctgttgttgtttgtaatggacattatgttgaacctcgtctcgctcaaattcctggtaatatatagtagtacattttttatattattaaaatatttatatttatgttaaaaaaagtatttttaattaattctcaaaaatgttgtgagatattgatattttttgttgtgtttttagtagatatttctttttgattcaaattgaaaattcgtatacattaaaagaaatttgaattgtcaaattatcttatttaccaaaaggttgttgaatattaaacaataaaaaaaaaacattttcgttgcatattattaataatttcaaatgataaaatttaatattttggttaaaaagattgagttaaaaaaattttgaaaaaaaagagaggaatttggtattggaatttcatgaaagtcaagactaataaatgagaagtgtgactgtgttttaatcttggaaacttttaggtataagttcttggccagggaaagaaatgcatagccataattaccgtattcccgaaccattcagagataaggtacttattttcattgatcataatgtttaattccttgcataattggattgtgctggcaacgattaggttgctgtgcttattgggaactcttcaagtgctgaggatataagtagggacattgctagagttgcaaaagaggttcatgtggcttgtaggtcaaatccagctgatacgtttatcaaacaaaccggttataataatctatggacgcattcaatggtgggttaactttagctcctaagtaatactcgacgtaaagaaacaattttatgttttcttaaatgtcatgcagattgagagtgttcatgaggatggctctgttgtttatcagaacgggaagacgatttcggttgatattattatgcattgcactgggtatacattctttctttagtttagtttctgtttagtttctcatatatcatgcatggtgtggttatttgacaaagcgctttacttttcgtaggtataagtatcattttccgtttcttgataccaatggaattgtcactgtagatgataaccgtgttgggccattgtacaaagacgtcttccctccagcatttgcaccttggctttccttcatcggtataccatggcaggttacatacctataaattgctctttttcacgtttcccctcaacattttaagtcataacaaatcggatttcaggtgttaccgttccctatgtttgagctgcaaagcaagtggatcgcgggtgttttatcgggtcggatcccgcttccttccaaggaagatatgatgatagaaatcaaaaccttttactccacacttgaagtccaagggattccaaagcgatatactcatcgtatgggcaatactcaggtttaaaatcccaagtttccgcacataaaaataaaataaaataaaccaaagctaaacagaaacacatcaatgacattttttgttgtttgcagtttgagtatgataattggttggcttcacaatgcggatgctcagaaacagaggaatggaggaaagagatgtgtttggcgaatggtgttaggaaggaagcccatcctgagacgtatagagacgaatgggatgatcatcacttagtttctgaagcttatcaagatttctctttgtactcataaacaaaacattttatacatgaaagtaaatttaccgaatttgtaaatgccaatactgccattcaatgtaaaagacatattgtaaaacattaggcgcaccaggcaatgtagctctggcgtctacaatgtatgtatcccacggtctattacatcttcagaaactacgatggtctgcttctcgctgtcggtggtgttatatcatcgtcgctggcactggcaaatactatgactctcatagcgaagattacaaaacaaaatttaagaaaaaatttcaatgttcgagatcaagacgacaatagactcgtattttaggtctcagaagaactgctctgatgaatgataccatttgaaacttgactcgattataaagaatgttgaatgttctgtgtttttgatagatggttttacaacgtatacacaaaggtaaacgtatacaagacttgccgaacaagtataacgtacaacacaatccaatgcagcctactaatgataatccattgatttgactgtttgagagataagagatactgtactgtagttcttttcttaataaggctttcaccaccaaagtaactaaaagttttgatgattttgcaatttcagtatccgacgttttcgaagctaaaagatttttctcttttactttcgaaacaattgaaaacaaagctatcagtggttttactttgctttttttccaatgaaattctattccgacttttgatctttaagttttttacaaatgtaagaggaaaattaatttaacgtcaggtcattcggccactaagccaatggagacttagtaaatagtgtggcccagcagaggtcaatagccgccacgatttaccaaattgagaaggtcgttatgcttctcaaccatgcaaagtatctcatattttggactcactcgaacgagagaatttgatcttatttcgagtggactaaaacgtaagtcttatcttcaattattatttgcatcgtctctagtacgtttgctcagattactaaatttcaaatttcagatctctcaatttctgtaaaatgggtatttctttctcgataccctttgatccgtgtgtaaataaagtctctcaatggctagacatgaaagtaagttatactcacaatctcgagaagaatctcgcagctttggagaaaaccatgaaagagctcaaggctaagcgggatgatttggaaagaaggctcaaaagagaggaggctagaggtctacaaaggctttccgaattccaggtatggcttgatagtgttgcgactgtcgaagacataatcattactcttcttagagatagaaatgttgaaattcaaaggctgtgtctttgccggttttgctctaagagtttaacgaggagctatcgttatgggaaaagtgttttcttgaggttgagggaggttgagaaactcaaaggtgaagtttttggagtgataaccgagcaagcttcaacatctgcgtttgaggaacgacctcttcaaccgacaatcgttggtcaagacacaatgctcgataaggcagggaaacatctcatggaagatggagttggtattatgggtatgtacggtatgggcggtgtagggaagacaacacttctcactcagctctacaatatgttcaataaggataagtgtggatttgatattggcatttgggttgtcgtgtctcaagagtttcatgtggagaaggttcaagatgaaatcgctcaaaagcttggtcttggtggagatgagtggacacagaaagataaaagtcaaaaggggatttgtttatacaatatcttgagggaaaagagttttgtgttgtttttagatgacatatgggaaaaggtggatttagctgagatcggagttccggatccaagaaccaaaaaaggacgtaaattggcatttacgactcggtcccaagaggtatgtgcacgcatgggggtcgaacatccaatggaagtccaatgcttggaagagaatgtggcatttgatttgttccaaaagaaggttggacaaacaacacttggaagcgatccggggatcccccaacttgcaagaatagttgcgaaaaaatgttgtggcctaccattggcgctcaacgtcataggcgagaccatgtcatgcaaaaggacgatacaagaatggcgtcacgctatacatgttttgaattcatacgctgcagagtttataggcatggaggataaggttcttccgcttttgaagtatagctacgataaccttaagggggagcaagtcaaatcgagtttgttgtattgtgctttatatccagaagatgcgaaaattctgaaagaagatttgatagagcattggatatgcgaggaaattatagatggaagtgaaggtatagaaaaggctgaggacaagggttatgagattataggttgtcttgttcgcgcatcattgttgatggagtgggatgatggggatggacgacgtgctgtgtgtatgcatgacgttgttcgtgaaatggccttatggatcgcttctgaactgggaatacaaaaggaggccttcattgtgcgtgcaggtgttggcgtacgtgaaattccaaagattaagaattggaatgttgtgagaaggatgtcattgatggagaacaagattcatcatctcgttggtagttatgaatgtatggaactcacaactttgctcctgggaaagcgagaatatggaagtattcggagtcaattaaaaacgatctcgagtgaattcttcaattgcatgccaaagctagctgttttggatctatcgcataataaaagtctctttgaattgccggaagaaatatcaaatctagtttccttgaaatatctcaacttgttatatactgagataagtcatttgcctaagggtatacaagagttgaagaaaataattcacttgaatttggagtatacaaggaagcttgagagcattactgggatatcaagtctgcataacttgaaagttctgaaattatttcgttctagattaccatgggatctcaacacagtgaaggagctggaaactttggaacatttagaaattttaaccacaactatcgatccaagagcgaagcagtttttgagctcccataggttgctgagtcattcacgattgctagagatctatggatcttctgtatcctcactaaatagacatctagaatcactttcagtatctacggacaagcttcgcgaatttcaaattaagagctgcagtatctctgagattaagatgggagggatatgcaacttcttgagcctcgtcgatgtgaatatattcaattgtgaaggcttgagggaattgacgtttctgatctttgctccaaagattagatctctttctgtttggcatgcaaaagacctagaagatataataaacgaagagaaagcttgtgaaggtgaagaatcggggattcttccttttccagagctgaattttcttactttacatgatctaccgaagctgaagaagatctattggagacctctaccctttctatgtctagaagaaatcaatataagggaatgtccaaatctgagaaagcttccactcgattccacaagtggcaagcaaggtgaaaatggatgcatcatacgtaacaaagattcacgttggtttgaaggtgtgaaatgggcagacgaagctacgaaaaaacgcttcttaccttcatgccaattgatttctcttaaatgattttcaaggattgtgtcagctgttacttttgagtatatttccaaaaaaaaatatatccagagacccaggctgcttactaagggagcaagttggaagttgataatgtcatttgggttctaaatggaaactttctatctctttgttgctttctgctgaattctctacctgcttatctctctgttgtgtgttttgcattctgtgtaatcagtatcacactttgtattattgctttatgtgagttctttttatagtccttgccttccacatgaaacatactttgatgactagttagtgatgaatgtatgcaaattgattgggatgtggatcaacgattctgagtcttgtgatttctaattatgatcttgcaaaaactagttgatactaataattcgatagctattggcatgagaaagaaaagacagttgtaggagtactcaatccctgaaaaggcatgtttggatctgaaagtattgagactgtgaggttctgatgtttcattggacctcaacacagtggaggagttgctagttttggaaagattaaaaattttaaccataagaattggtttatgattcaggtttggttcaatttttaatttctcatcttaagcttatgagctgtacacgagatttagagattagtagtcttcaactagaatcatctgagataaagattgatatgacgtgcattcaaagcaacacaagttctctgttgcgcaatccaataatttcttgagtctttctgatgtgtatgtataagattgtaaatgcctagggagtttacatggctgatctttgctccaagtcttagatatattgatgttgaatgttctgactagctctagaagatataataagtaaagagaaggctagtttaagtgaagaatcagggacttttcttacgcttacaaattcctgttaatgaagtgtttatagtttcattactcagttttgtttgtttaattcttttcagattggataaaatgtttgttacaaacagtatatgcttcggcactttttattttaaacagatttgtgtgtttgaatgtggtctgtctctactctgttactactatataccaatatatatggaattaaccttcgaatcttggttaacaagtaaatgtacccgtcgtcgctaatggaagacaaagacttccctcgaaactaattccccagcttaattaggtcttctatacaatccacaacaaattgagaaatgtgatggcatagtgtaactcatagtgtgatgattgctcatattgtttcactacaacgtgtgtgttccgtggcgaaggagaagactatctaacacagttttgattaaaaaaaaaccaaaacgacaattcaaggcatgccaatgtaactctgtcattaaaagttttgatgattttacaattttagtatccggtgatttcgaagctaaaagattttctctctcttttttttttttggaaacaattgaaagcaaaactatcagttgtgttagctttttcccaaggaagttatatttcgacaattgagtttacaaatgtaagagaggaaagttattttaacgtcaggtcattcggccactagcgaatggatcctttgtaaatagtgtggcctagcaaaggtcaacagccgccatgcttcaccaaatcgggtgtgaatgtgagatttattaaagaagaaattattattattgatatatcaaacgatcaaagtttctgagaaggtcgtcagtggaccaaaacgagatttcggactcactcgaacgagatcttgatcttatttcgagtggaccaaaacgtaagtcttagcttcaattattctttgcatcgtctctagtacgtttgctcaaattagtaaatttcaaatttcagatctctcaattactgtagaatgggtatctctttctcgataccctttgatccgtgtgtaaataaagtctctcaatggctagacatgaaagtaagttatactcacaacctcgagaagaatcttgtggctctcgagacaaccatggaagagctcaaggccaagcgggatgatttattaagaaagctcaaaagagaggaggatagaggtctacaaacgcttggcgaaatcaaggtatggcttaatagagttgagactatcgaaagcagagtcaatgatcttcttaatgctagaaatgctgaacttcaaaggctgtgcctttgtgggttttgctctaagagtttaacgacgagctatcgttatgggaaaagtgttttcttgaaattgagggaggttgagaaactcgaaaggagagtttttgaagtgatttctgatcaagcttcaacatctgaggtggaggaacaacaacttcaaccgacaattgttggtcaagaaacaatgcttgataacgcatggaatcatctaatggaagatggagttggtattatgggattgtatggtatgggaggtgttgggaagacgactcttctcacccagattaacaataagttcagtaagtatatgtgtggctttgacagcgtgatttgggttgtggtgtctaaagaggtgaatgtagagaatattctagatgaaatcgctcagaaagttcatattagtggagagaagtgggacacaaaatataaataccaaaagggcgtttatttatacaatttcttaaggaaaatgagatttgtattgtttttggatgacatatgggagaaggttaatttagttgagatcggagtcccctttccaacaataaaaaacaaatgtaaagtggtattcaccactcggtccttagatgtatgcacaagcatgggggttgaaaaaccaatggaagtccaatgcctggcggacaacgacgcatatgatttgttccaaaaaaaggttggacaaataacactaggaagcgacccagagatccgtgaactttctagagtagttgctaaaaaatgttgtggtttaccattggcgctcaatgtggtaagtgagaccatgtcatgcaagaggacggtacaagaatggcgtcatgcgatatatgttttaaattcatatgctgcaaagttttctggcatggacgataagatccttccgcttttaaagtatagctatgatagtctcaaaggggaggatgtcaaaatgtgtttgctatattgcgctttgtttccagaagatgctaaaataaggaaggagaatctgatagagtactggatatgcgaggaaattatagatggaagtgaaggtattgataaggctgagaaccaaggttatgagataattggtagtcttgttcgtgcatcattgttgatggaagaggttgaattggatggagcaaatattgtttgtctgcatgatgttgttcgtgaaatggctttatggatcgcatctgatttgggaaaacaaaatgaggcgtttattgtgcgtgcaagtgttgggctacgtgaaattctaaaggttgagaattggaacgtcgtgagaaggatgtcattgatgaagaataatattgctcatcttgatggccgtcttgattgtatggaactcacaactttgctactacaaagcacacatttggaaaagatctcgagtgaattc

SEQ ID NO: 33 - DNA, 91530 bp, Arabidopsis thaliana
gaattcgcaataagttcataaggagaagcgacaaactgcaacttgctcccgtggactaaaaataagatttctagtactatagaatgattgtaattgttaaatttttgtaataattgtgaaaataatttgggatcaaagcttcaaacaatttacttggacttatgtcttgggtttctttctcaatgcaattccatatggattgtggccgagacagtgcacgagaccatgaccgggagaggtatgtcgagttttagagtagagatcttctaggagatgtgcatgtgccagatgtggttatcacagtcgcaaacacataaacattatatagagcgttttatagatgttttagagaggtgcatctttttgttttgtcttgtgtctttattctttctcttcgtgaatcttgtaataatcttctacaaaatgttccttatgaaatatgagggcatataaggtgtgttatacacaaacgggaagcaagaagaaaattagagttatgggcccaaagttatgcgcatatatataatcaaatcgaaaaactgtaggaaatacatgataggtcaaaaaaccctgattttcatttgaagacgacgatgatgatatccgatcttccggaggatatggtagaagagatactgtctagggtttcaataatatctctaggagcattgagatggaacgatttatctaaagctcgggtcatatgtaaagcagaagctagacaacagtttgctggtttcatgataaagggatctaaggtttgttcaatgagatttgatcttcatggaatccaaaataacaacgtcgaagtagttgagccatctataaagcaaatagctaagtttaatcatgttgagatatctcaagtctttcattgcgatggcttattgttaatgatgagtaaggaggtcagcaacactaggctcgtggtttggaacccgtatttggggaaaatatggtcgattcaacataggagtgcttatcattccgaaaacaggtatactctcggatatgataacaaccgtaaaccacaaaatcttgaggtattttataaattacgaaatctacgattttaaatctcattcgtggagggttcttaatatcattccccactcgggtaacaattttcgtaaaggttgcatatcattcaataaagggaattacttatcttttcaatggaggagagaaaataggggaaggaccaactggatgtttactttgttttgattttacaagagagagatttgggccgagtcttcctctaccatttcacgttgctcatttatatactgtgactctatcttctatttgagaggaacaacttgcagtgttattgcataattggggagcatttgcgatggagatatgggtgacaactaatattgagcccaatgcggttcttatggagcaacttcttaaaaattacttactgtacacttccgattttagttgggagttttttcattgaccaagagaagaaacacgctgtgatttttgattcaagcttatcttgtggatccgtagcttgcatcattggagagactggaaacttgagaactgtggatcttggagtagctgccgtgccgtatcgtcagctaccagtgtgctcttatgctccaagtttagagcaaatcaaccaaggccaagaactaccccttattggtcagaagaaaatatcaagattatcaaccagtcttatttacattatgttatttgtttcgttcatcaccttcattttgttctttgactctgttttcttttgaataagtctagtcatacaatgattgtttttttcctgatatatatttaatcatatgatactcaaaagctttgttatattgaaggcttaacccaaatatttatggaacaacacaagtactgggtttccactttccttgataacttgattaccaaatatggttgatgaacagaaaagaactgagaacaaaagacatatgtacaacaggttacatattatatgacttagaattctatgtggaaaacattagttaacattgtctttgcctctttggtgaatttctcatcgtcccttactctcattctcaactgctcattaggttaattgttctctatgctgtcttaatatagctctttcatctttcatcgtcttcctcgattctctcctatacttcttgggatctatccgtggtttagcttgttccacacccttctctcccatgtggcaactgtgtcaaagcttccctaatcattccaaatttgtgccaaatctcaaaataaaagctgtttgtttcaagagaatcgaaaaatacctaacaccaccttcccttttggttccatacttcttaagttgacactcctcatcgattttgatctcatcaagcagttgtaaaaagtaatcatacctttcccaaccacctgtcacagcacagccttgtacccctaaatgcgagcaatccttgtatttacattttcctccctcgaccattttccgtatctaaggaaagagtaagaaacaccatcagtgcacaatcaatcagtctcacatatggggaaatgggcacaagcaaaaagggtacaaacctcaggaaaacacaagggaagtttttgctttgttactttcagcaacttatgcttgttaaagccaggagtatcagcaaggtatccacctccacaaagaggaagtagcgttacatttcgggttgtatgtttacctcttccatttctatgtgaaacttcccctacactctgatcttcaaaccacttttttttattcttcttgttttggcctttatacattgtcatgaggatatggtaaaaaacaaaaggtttagctatagaatgaagtaggacaaaaaaaaacttacaggcttaaacacttcttcgtgtttaatgtcaccaccgtagctacttctcaatatattgattaagctggactttccaacaccactaggtccaacaatgacagaagtctgatttcgcaggttaaacgcaatctcatcaattccgactttagttcccacactacagaacaatggttcatagttccaactacgcaatcttatcttccaagattccacttcctgaaaacaagatcattactctaatcaaaccctgaaatcgagtctaaactataaagcagcaagtgttctgaactagtagtgaactaatgagctatgaaattccaggatatggttctaatcaatcccctgaaatagagtacaaaggatcaaagtggtctaaactagtcgtgaactacgcaatgtctttctagcaaaaacagtggtgcatagttccaactacacaatcttatcttctaagattccaagtcctgtaaacaagatcattgctctacttaaacccctgaaatggagagtataaactagtagtgaactatgcaatttacttcctaccaaaacctagttgagtcaatatgattcatcatccttacctcttgagtgacgagttcacatttgttcaaagcaactgtgattcgaattccaatagattcagcttccaccaagaacctagtaagtgtaaatggatcaatcttaggttgatcaagagaaaacagaatcactaagtgatcaacattcgcaaccggtggatccaaaacctccgagactcgatcaaacacattgataatcttagctctccgatcaacccaatcaactttatcaacgagaactttatcaccaacaagaacagtcctacctatcttcttcagtaactttctcaccacacaaagcaactcaacgccaatcttatcatcctctccattatcactctcaggtacatcttgaacaatgacgcgcatgtagtcagctagagcggtggcgattgtaccgatggcttgaagctcaacgaggttaggtttttcgtctaacgggagaaccggagctaagaaggatctgagaatagtcttgttcgggtggggatttttagtgacattagggttctcttgtcgtatcgctgagagaaaataaaagctgcggcggattcggagaccagttccaaatccgccgtgatagatcgttgtacgacggaggatggaggtgagagcggcggcggaagaaaatgtctgcataggtaaaatctagaaggttctaagaaatggcttgtcttccaagatattagtgttgacattgattacagagagagagggagagagatcttcgcattaaatttgtaattgctgaatatatgatgtttactcttgcgctgggcaaaatattcgttagatccgatttgatccgttattcggttgaattcgattcgaaaaatctggatgtccgtcgttttacaaggcaaatcaaacactgaaaaataatatcttcttgctttgttttaaatgttgatttaagggaatgttttgtgtttatcaaaaaaaaaaaggggaatgttttgattggtggagtgttgctttgagaaagaatgaaagaataataagcagagggagtcaaagcctcaaaggattcggaatagtttgacttaagtttttacacagtaacagaccagaacaaaccggttgacactcttaaaaaataaaataagaaaagtagtagtagtacacttgtattgctatctttacgcggtattgaatattcaacaaagaatttagctaaatacatttcgttatcatcaactcagtgtgaggtctttcttcatttggtttcaagagaaagtttttttcctttttctaatttacgttttgagatgggttggtggaggaagaagaagaagcctaaatccgagatagcttccgaaagaggagcgaagctgttaaaagatctgatcgaatgctgcgatggcaaatccaatcccatcaaattcttttctgctgatgagatccgcaaagccaccaacaatttcggcgtgtctaatcttgtttccgaattatctcatgattttgactacaaatggtattcaggcaagaacgagaaccatgacatgatacttgtcaggaaagctttttcccagtccgtctactacaaagatacatttttccgcgacatagcagtttcatcaatggtgagtggtcacaaaaacttcctgaaattgattggatattgtcttgagtttgaagagccagtcatggtttatcatggtgtcaagaaacattatcatttagaatcaagtgaacagccgtggaaaaggagaatgaagatagcagaggatatcgctactgctttagcttaccttcacaccgccttcccaaggcccttcgtatataggtgtttgtctcttacgaatatattattggatgaagatggtgtcgcgaagctgatggatttctctttctgcgtctcaataccagaaggagaaacatttgtccaggttgactatatagcgggaacagttgattacttgaagcctaattacttgaagcatggtgtagtctcagaggaaacggatgtctttgccgttggacattccatgcaaatgcttctaatgggggaaaaaatatttgataggattatgagaagaccatttcctacatcaaaatttatggaagagccaaaaatggatgagattgcagatccagaaatgggcgaaatttcagaagaagagctttgtcaaatgaaagctttcctattgctctcactgagatgcaccggtcatgttggggaagttccaactatggtggaagtggctaaagaactaaagagtattcaaagatgtcttcacaatgacactttttctccttcagttgaaacccaattcgactctcatcaagacatttcttcctcggtaatcctctcaaaccaaactaaagacactagggcattgctaagatgtattgcctgccacgtatttgacgaaatgtttcaatgggttatgatgaattggtttcgttttttcagaagaaatcgaagaatatgctgaaaataacttcggttcttgtttttttattcagacattatcaatcgcaaagctttagtttctttacctttgtcagatcttgttgggaaaaatgaccaaagagattaagatggcaccgagacaactagaaaggcaagcatatataagtatttttgtgtatttgtgaagagaacagaacaagagtagttaactttgtaactcttttattgcttacttcagatgattacaaatgccaagcacttctaacaaatgtacacaaaacttctatttctttttatgtgacttttgcctatcaaagcttgattcattttctttctttctaaacctaaatcgaatcaatctttgaacggttgtgcaaaggatagacaattaataattcgaatagcgttgtaatcttcaattgtataatggtcttcctcttctttcttcattcatgtaatcgctttgttctccttttggaactactcattttagtcctcttcattgcctccctccatagtgaactgattgtttgattatattttaaataatatattctagttagatttataaactgtctaaacacgaagaaaaatagttgtataccttttttttttgtgtcaaactaaaaaatagttgtattacctttattcaagatttccaaaacatccgaacgaaaaacaaaaagattttatccaaagcctgaggtgactcacggccatgtaacatatgtggtttactctaattaacaaatggatcaaatggggttttatacgttaaaggctaatcaaaattaaaatatgaaccgtcaaaaatggctagctaccacataacttgtcaacatcgcgcggacaaatgattattacaaagaaaacgatttttaaaaagtgaaacgatcgctttcaggtcgccgcttttagattcagaatttcataaataagtaggctatagattaaataagagattaacaagccttctttttcattatggtgggtggtttaagtcaaacttcacgaaatgtttgctttgtcttacttttcattaataattggatgactttatcctttttctaagttttaacactaaagaatgtgtatatttggattgaagttccagatttcttaaagtcattcggaatcaaagatgtactttggaaaactttgttttttttttttaataccaacgaagcctgtaatgatttaccattttggtcttttagagagtttcggaaaaactagaaggatacttttttttcctgagatgttcatgatgcttaacatttaaataaaatcaaaatcttttgaaagtgttactttctatgatttgattaatgtcaccaatttttttttgtaaattaagaatcaataacaccctcttagtattattatcatggctttggatttcattccagttttagtttttttgggtatgtttagcttccttttttccaaactaaatttctaaaaaatatgttttttcggatttttttttgattatttgtttaaccgtcggttatgtttttcagtatagcttacgataacaatatcccacatcggaaattaggaaaagatcatgatagtatataagatatatgtcatcatttactcattgccaagtggttttgtttgaatgagataatatatctcattcattcattgtcaattagttttaagttaaaaaacttatattttaatatagtatcaaaatgcttgatccatacattttccagctcggttcgtattcgatatgatccgaatttggtctattgatccttgcttaatatatcgagagcagtggctaaaaaatcatcatctctacaaagcgtattatcatcgtcatcttgccacactgttagcaatatatattcatcctctcattttcacatccatttgataaagataatttgaattatttatatgccccctacatagcgaggattacaaagaaggaataaaactgaaagtgaaaaatgggatgcgactttaatagagtttcatggtcaccactacccataccagttggtccacgtcagacgtatacaaaggcatacgatacgattgcttgtgctttcagattgagacaccaaagatcaccgattcaccatcatctgatctgatgatatgcttttttcccatcttctgagtctttctttttttcttctaaatttcacaatatacatatattaatttcaataccattaccatcaataattttatagctacaactaaataacctacaatatacagaaaatataaaaaccatttctaattttaaaatgggttttgtgtaaaaaagactttaattattgcaactttatttacatcttaaaaaaatatagattaatcatacaaaatcaacaataatatataatataattttttttgctaccgtcaaatttataaaatttgaacaaataatatgtcaaattgaagtcctcacgattaagaatacaaatttagttttagaattttaaaattttaatgtatgtaattgtgaaattgtaggattaatctaccaaaaataattatatatataaaaaatatgatcaaaaatggtaaactttaacaaaaaaaataaaaaatgacaaatctggacaaaaattagtttatgcagtatataatattatttttgtagcaaaaacatgtctttgttttcttggttgtctcgatcaaaaacatgtcttgagagcatatatgaatactaatatagtattaaactataggatgatggggtcattgacgtggtgactagttgacattattatcaccgtaagatctgattgtgctatataatccctaatctgacgctccatttatttattcctccattaccattattagatctctctgtctctttctttctgtcaaaaatattatcttctttgcaccaacttcaacgcattacgaagcagaagacagaacccaaaaaccgacaaagttcccctattctctcggtataacctcatctttatcttctttctccgccattttctcttttctttgtataaatgtctttacccattttggattagattttccccctccaagtaaatgaatcatctgcttcttcaggtctccattgattctcctactctgttttcctcctatatttgtatttgatgttttgtttttttctttggaaccaaacaagtcataaagtttcgatctttgagatcttgcccaattcttggaactagtgtttggttttcttgataatatttctgtgagagaattcttcaattttcagattttcttgataatgttttgctcttttaggaaataatttatagccattcagatttattctcttgtttctttgtggtatatggtgcttgtaattttgcaaaatttggagcaccctatctttttgtttgatgttgatcttattggttcttgacttctttcaaagagttgacttatctgtaaaaaaatattttgcagaaaattcattacttctaaagatggatgttgtaggtggctgatgactcttcttccctagcatgacctttattggtaacatcttctttactcaaaaaagaaacattccttttggaagaatcttgttgttgttgttgttgactaatcttttttatcatgttcttggcagatacagagatgtgtatgagaagaaacaacatcaatttaacaacagtcatagattctaacgaagccattggtatggaacatgaattagattctgctagacatcaatattcttcagtgctcactgcaattccattcttctccgctacattgtttattcctctctctttgaaaatcactatacgtgacgggtttcacgaaagtctttaataacatttccatacacaaaacacaaatagtttagagatttgttcttagggagatttagctatctctctgttcaaaagattggtctaaagatgcaagcttttgctttaagtgggaagaaaaggattgtgaatcacggcatgtgtttttccaaaggaaatcttgatctcggttcacgcttgtctgagaattttatggatgatcctttgatcccgggattgcctgatgatgtcgctaagcagtgtctagcgcttgttccgcgtgctaggttcccatccatgggaagtgtatgcaagaaatggaggtttgttgtccagagcaaagagtttattactgtgagaagactcgctggtatgcttgaggagtggctttatgtcttaacgatgaatgctggtgggaaagataaccgatgggaggtgatggactgtttgggacagaagctatcatctcttccaccgatgcctggtcctgcaaaaacagggtttaaggttgttgtggttgatgggaaacttcttgtcattgctggttgttgtatgatcaacggttcgcttgttgcatctgctgatgtttatcagtatgatacatgcctcaatagctggagtagactagcagacctggaggtagctcggtatgatttcgcttgtgctgaggtgaacgggcatgtttatgttgtgggaggtcatggggtagatggtgagagtctgtcaagtgcagaggtgtatgatcctgagacgtgtacatggactttcatagagtctttaaggcgtccgaggtggggttgtttcgctagcgccttcaacgggaagctatatgtgatgggtgggagatccaacttcactattggaaactcaaaacttcttgatgtgtacaacactcaatgtggctcctggcatggtagcaaaaacggtttaacggtaagtctttttgagtcttttgctcattgagtattattccttagctcggttttcgagtatagcgattgtttttaagattcaactttttgatatgttcacttgcagatggtcacagctcatgttgaagtagggaaaaagctgttctgtatcgactggaagaaccaccggaagatgtcggtgttcaatgcggaagacgaaacctgggaagtggtggctcttccgctatcaggaagctcgagggccgggtttcagtttggtaagctgagtgggaagcttttgctattctcgtctcaggaagaaaccggtcaatgtactttactgtatgacccggatgcttcaccaggcacacagtggaaaacgtctgagatcaaactctctggttcttgcgtatgcagtgtcacaatcacagcctgattgataccattgtgttgtttacatttctttttatgatccaaatccaaagagagcattgtcgtctcttttaagttgatgataacactgatttaataaagtggagagtgttttgtttgaaactgttgtagtgttgttgtgaatttctcctctgtttgtttcttgtaacatatgattgattacgttttgatttattttggaatttgtgtaaaggcaaagctggttggtatttacaatggcttacattgagaagttacagagacttttattaatccagttttgaaattacaacatttttggaaacactctcttaaaatgcaaaaccaagaatgaggattctaaacttcgaagtagaaaacatatatttagttatagagtaaaaagaaaaacacatcattggtttcagctatggttatcactcactcatgtgagcaaaaagagtaccataagattccattgaggtctttaccaacctctcatgcgttcccttctcagcaataacaccgttttgcacaaccgcaatggtcctgagccgatgagtctataatttcattagaggctcatcggctcagcactatcacggttttgcaaaacagcgttattgcaaagaagggaacgatgaaaggttggtaaagaccttgaagaaaatatcatgctactctttctgctcacatgagtgagtgagaatgatagttgtaacggacgttgtgttttaacttcttccagtttagctagatcttttttctactatacaagcttggaaaacctcaaagaaccaacgttaatttcaattacttaaacatcaaccgagaagttgatgcaactgagaagaacaaacgctaattgcagacctcttataaaggcaaacatgaatcctccaaagaaagttgctgttacttgtatgaatatcccaacctgtgcatcaaaaccatcacactctcagtattttgtgtcagcaatgaatgtaaaataatcgattaattagtattcctctgttgtaattacattttttaagttattcggtgtaattcacgaacaatgttttgtaaaagaacttacatcaataaagacaataattaaaagcaatcgaagaatctaacctttaaaacttctttaaccatgttttctggatctgtggtgcttaaagcgtctatcgagtcaccacaattcagtatcatcatcaacaggtgagtgagtccgtttgcaaccgcagcgatactgcttagtagtagtatcataagaaaaaatctcccattgcttgcaaaataaaacattttattctccataattttctcctctcaagaaattgaaagttctgaaaaataaaacatttcgagtgtgtgtatttgagtattgacaaacgttatgagtctctcctttaataaggatgttgtatatatagtactagtaaagttaaaaaaaaacatttactaggtggtggttggctcatgcataatgtattaatgtaataccagcatgtatatatctcttctgttcaagtggttgttaggtcaacaatgggttaaaagcatgaataagaataattccaaactcttttgaccaaataaaagagaaagaaaatgaaatttccaactcacttttgcatgagataaagaaaaaaaaaaaaaacaatggattttaaagttattaaaaagacacagctactctcaaccaatgaattaccaaaatgttggttcttagatatattataattttagatgttgattgattatagtttacgaattatataactatagtagttcaacgaggcaagtcatgaatctctttcctattgaagtggtttgagtggtttattttggaatatgttaaaaggcaattagcatttgctgttttagtcagatatcagtcaagaccacgagaataagggatgtgcagagaagctagagcttccggtatatcttttccaacaatttatcgtaatttgggcttaacgtaacaaaatctggggcatatacctcgaccaaagttaactctgtaacactataatataaccaccatgagaaaataataaaaccctacatcaaaactgatcttctaactcaaatgtgttggtaatttaaagtttcgttcccgaagaggttctaatctaaaaaataggataatcttctgacataattaacaaggtaagcgcagaccagccggtgaagagacgcgtgcctttgcctgttcccttaacttgatcatattgttcccagatgtaccccgtctcgtaatagtttctaaccacgttcctgtatttttatgacatgtttcaagttaatatcaaaccagacctctctatcgcagataccatataataatataccttatcaaattgctccttagttccgtgtaaattgctttcgacttttctctatacggtccatccactgcaggaattttgacacatggtaaaccgaatgcatatgatagtaagaaaacgtagaggtcttgtagtatgatgtggcgcttttgaccaagtggagggtagaaaattacctatagagtaatggtaaagagaagaaagaatcatgtagttcatgttcatccatataggacctctccagtatggtgcatcatgctcagtgttacgtttcatatacatagaactgcatcaaaacaatgttctttcttatcattgaagaagataatttcgactatgtatgctccttcttgtgggcttacctggttttggcaagcgaaactagtccatagtcactccataagatgctcctatttgaaatgagatcgagctgtttctcgagaattggagaatcctttctcaaccaaaaatatgtgacgatttagattttaaaaaacaactgatccatgagggcttcaaagatcacgaatagtggaaaacatattggccaaaaactcacaggtgggatgattctagacatgaagggaaagaagctgacgtaacccaagtgaggaaccaattttagctttggcttcccaaaagtcttccttacaagttgtcgagataattgaccattttcttgaattacctctttccatatcaacttaacctggggatcaattcaccgaacatttgggttaatgaaaagaccaagaatcatccgttcttcttcttctatatgacaaaaatttgacactcagacttgttgatttatgaagcttctcttactttttctgtatgattgccaaagtcaaagtaagccccatagtcactatcatagtgcatctgctcagaaattatccatgaatgagaatagagaatggtgagaagaaaaagaaaattaatgaagttaaagtgagaaaattgttggcatctgatagagaataaacctgattcagaagattgaaatttgaaagcagcttgacagttgaattgtaattctcctgcaggattttttttttttacgtcagtaacatgtgaaaaaaaaaaaaaaaaaaaagacgcccctttcttttccatcttgtgctaacctttgaaagtttgtcttcttttcctaaaagctctgtgatggaatgcatgcaatctgcagcaaggtacatccagcatctaagatcaacatgtcgctcatcttcactagggtgcgaagcccggggataatcatccagccccgacgaaagcgtctgcaagaaatttaagatatcaaattcatctctgaggatctgtcaattgatctaccatatccgcaaataaacagctgacacagtagcaatcctactaaaaatggtcgctcacacacccaataaattttgagacattttgtcgctaacaagaatatactgcagcaaaaattcatcaatcaatggtatcatatattgatatagagcatacggaagcagctaaagtcagagaaaaccttaaaactcgacacagtctatgtgagggttaaaaatagagccttcagtttatgagaaacaaagaaatagtaccttagggttaagttcttgagttgttgtgttgtctctgccatgccaaaagtagcttccgatctccttgcctagagtttaatcaattcattaattactaaacatatgaactagcccactccaaccatattaagcctataaaaatatcagttctatataaaaactcatcacatctacggatcgtgattaacaacaagaaatccaattgtgattggtaagcaatagtcacttaagatattactactaactctaaaacacatagcagttgaagactgaaaggattctataaatctatacactagaggacatccatgttgttacctttctgggaagtattaaaccactgaaaccaagcatctaagcgtacagaagctcgctcaaggaatgacaatacttcatccttttctgatgcgacaaacttttccatccttatagcatcaatcagatctgaaaaaaagagattgtcactatatggagctgaattaattgtaagcctttatctatatttacaaggataggtcacattttcaatccacaaaattagtaggaagccgaaagcactcttatgatcttggctacaaagttctaaacatctaattgtagtaggaacagaaatatcggtacaacaaacggaaggaagctgataacgatattgctgattccctcttctataataaatgctggtcaaggattggtagtaaaataaactaatttttatgacacaaaggcatacatgaaacaaagagagcaatgacaaacgaaaaagtaagtagagataaaagaacaacagattcttaccacgtatcaccaaaaacagagttggtggattgccattactcgggtattgaactacgaattcctctggaaccttactgcaggtagagaaacactataaaacaattacaacaataaccatgactaccacggttagtgagagagagtaaatacctcaaagcttcagcacccaaaatttgctcacgtggaatccatccatctatgttcaataggtctaaccagtgtccaacgatatccaaggttatacgaatatcccaccgcctgatcaaagcacacacaacaaattccaaagtatgatcaactagtaggaggaatatagcttgtaattttgtaataataattggtcaaacaaaagtggcaatagcatagcaaagaaatcttcaacagacaaatgattaataagaacgaaccagatcaacaattgatggaaaccttcgtcccacaaaaaccccctaggaaaaaaaggtcggcttggaacagctgtgtacagctcggctggccaatacagcaagaaattatcccgacttccaggctgcaatagaaggtatcaattgtgtggttctgtgagaggtccaagctagtttgcagatgggaggaacataaataggatgaaaaaataatacataagatgctggatggaaataaactcgcctgagtgcttttaggaacataaatttttgattggccatagaagtaaccaatgcccccaagcatgtttgcaattgcagtccttccaacccccaatgtttctgaatcatgctggaaccagaggaaactgagattgagaccctcaatcttttatgaacatcgatttgaatagatgcaaagtattaactatatgtacgttatgacaactaggagctgacaacatatgtacgccattgagaaacagaatagcacataagcagagagagactaatcctagtggaaggagattctgagaggtgaagaatgaaactgctgaagtcaatacagcaagtgctcagcaatcgctgttctcgacttcacatccagacaaagttgttaacagtgattttttcacaacaacatgaagatccatgaaacaagacctctgggtgagctaaagaatatttattagcatgggtaacatgtgtagcataccttttcagaaagcttgaagcattcattaaactttgcatcaaattcttgatgtttctttttaagtagatcagagagtggcaaacctacacgacatatacatgaaacttagtacaaatgcaataaaagtagacaacatcaatgatatagtgccatcagagaacatttcttaaatggacgctccactgaatcataacagatacacataattagtattcttagcgaagctacagaataataagctactgcttttcctcaggttggagggacacttaagaaacacaaaaatacacacagaacccaaacataaatttcagactagcattctttatctgagttatgaaactcaaaaggataatgttgccgtaaaaaactcataaacggaggagaagttcttccatactcaaactcaaatggaagtcacatccacaaactaaggttaagaaaatcaaaacacatcactaatgatgcttgataataacaggaggttaactatacctgtgagacttgttaaacgcttttccacatttgaactttctcctttgatcccggagatgaagggaatatcaatcgtaaatggtagcctcccagaaatctgtatgttgccattggacatggtgaaacatattgatcacagattccataggagttaagaaaattctatatatttttacaaaaatacacatgcatacatctttattaagactgattacctgaaagatgtaaatgttagaagaatcctctgatgtgtcagagagctgaagtcgtccaaacttccttgcctgaaaacatacaagcaaagagaactgtaagcattgcggtctttaaaaaaatatactttggaccctttcaaaatgagttatgagctcgaaaactagcagacctgcagagcaagattttgctgaactagatcagacaaattatatatgtgaggcgtcttgaaaccggaataatgtgtctcgagctgattctgcaaatgaagaacaatcaaaatggttatatccagatgagcatcagcggatgacatccgaaacatgacagaaaatgtcaaaccacccgcagatccacttccagcagagacagctacaaaagtcctaagaattctacagagcaatttcaatcacaaattacctgtgattttaagtgtatctgccagtctcctacatcttcacgtgaccccgaaaccaggagagagctcccttggaaatctaaaccatcttggcctaaatttaaaacattgccaccttcatcagctaaataaaagaagagatgtgcacttctcttcacatcatcattcaacctagtttagttccaccatggtcaaataaaaaacccattgtcatgccacagtgtaaaatgaatttctatcaataagccaaaataacaaaaagccgacactgtgaagaaaagtatattacagtacgaatgcatattagcaattaccctttattttttacatcaatccgaactgcccaatccccaccataaccaaggccgtctcccttggacttcacaaaactcgtctctattaccatatcgttttcaaccagctcttgccgaccataatcccgtccattatgttctctccagccaaatgtacttaaatcatcagagttttcacagaaatgccgcataacatacatctcatctttgacaccaagccacatcaagccagctaccaaggacaatggagttctgcattgccatatacaacttctttacttgtacaaagaatatcccagagtagagattcattcacagtggaatttgcatacctagctcgaactccaaaataaacatgaggacgataagttccccagtataagctctctttgtgctcgccctgaaactggtacacatatacaaaaaacgaatctttccaattcatgactttgatgatttaaaaaaacgagtagtgaatataatattagtgtaccattgacaaatccatgactttcggagcaggaaaaggagtgataaccctaggcttctgggactcatcaaacaacaacccgtgacgaactagccgattgattacgaagtagattactataatccctaatatgattaacccaaccaatatcttgagattcgtcttgaaagcaccgatcgatacaagttccttgcctttgccgcggcggatactcggaggataagcgcttccttcatcggagccgggagataatgatgatgatttgattcgaccacgcgcgctccgacggctagctccggtcatggtcgggtaaaatataatcgaaatgatgatgaatgtgtgtagttggttttgtgattggcgatgatcagtgaagctgggaagtgaggaaggtagagaagagttgactttgaccaatcgtgtttgctctctaattttgttttcttttcctaaaataaccgagacgaaccgaaccaaaccgaaaccgaaaccgaaacctaggaattgaattaatcacttgagaatgcaagagcacttgaatactatttgccaaaattatagaaactactaactagagaagggtttgggggaaaactctttattatgtgttattgatctcaataacattgatacaatatatatatatagagcctaagaatatgtttattacgggaagaaattcaaattgtgtatgaccaaatctgttttactttttgtacactcatatccatgaccatttatatgtttgatataactctgccagtttccatgtagttgctttatcatatatggatacgaagattatatccaaacacagggctatgcactttacgattttgcgggagcgtgctattgaagaggtgaggttttttccttattcagttttcttaagcattctataagttttgcctacattgaagggattatcacccattttgtgtgaaacagttggttgtgctcgaaagtcttaaaaagagagagattgaagcattgcaccatctcaccaccacccaaaagactcgtaggcgtttttgtttcttctgttaattttttttgttatgttgtttttgtttctttatctatctatctatctttctcgtgaacttggtatgctatacaaaattataattattttttccaagattgcttatacacaacacaacacaaaggagttgaacagaatgatgagtgacagtactgtactcgtgggtgctactactatctatacacatattcacacgtccttgaaaaaaatgctctttgatcacaaccatataaacctactagttcgctcaaaatcctgcaaatacaaaaattcacatcgttacttaacaggataggatggtttagattagtttgagtggaaatacgtatgggatagagttagattactggttttttttttttttttttgagttttcgtcaaggttagaaccactcagccatgcatttagggtaaagctcactctcagtagcaatggaggagaggccacgaagctctttctgaactttccgtctctcgtaaaagactgagcacgcaagggaattgcatttcactccgctttgcaccacccagtctcccccaccacagtgtctgcatatctgcaaataagataatataaagaaaaatcaattaatggaccaacaaagttggaactgaatgcatctacagagattcaccaaggtcacaacttaagcacacatggaaagaggtctacactcgttcttgttataaaatagcaaacatttctgaaagataatctgaaactaataagtctccactttttagcataaattgttttgcgactaccatgagatgaaactgtctctttgaattcaaagtgtgtgcaagattaaatgcaaatgctcacatcagaaagtgtacaagtttctatgaagcacacgatctcttggaaagtaaagacagtaagatgatggttgtaaacgttaccaagttctgtaacagttcataaacgttagattttggagtacttaccgtggctaggtgttgcatctctctctccaactttgaagtcttccaaacaatggttgcagcagcagcacttttattttgaaggcaccggttgcatagttgagcagattcttgaacaacttccccacacaagatgcaatgtttcgatagataaaaataatcaatccttgttttgtgtgagtttttagagtttaagggacgttgaccaagggagcttctggtgagacggggcatctccaaaaaccactggtttaagtctgcacccacgagtccaaataccctttgcaaagctggtataatttgtttgttgatgtagtataagtcattcagtcggtagggtgtatcgacgtccaaaagaaccagtggatcaacaaccatatcaacaagtcgagctcctggctccccatgaatcacaacataaggcactcgttcagcatagcgtggctctgtccgagggtctgctttcattgatttggttgccacaatagctgctggaggaaggagtgaagagtctcttgtgctgtaagtacccaaccgaacttcttttgcaaagataaaatcttgaagagacactctccctgatagtatccgcttccactgtctatacaagtacgacttaacctgcacaatgaatagagaaaagcagatgtacgacactgcagtttcagctgataattcgaaagagtgcaagaaatcaaatttgtaccttagagatgttcttctgttcaaaaaagagtctcaacgattgctccatagttttcgcaacagcttcacaagtgtctcttcgaacagtttcaataccttttgcatcaaatataggctctctctgattgggactttcataactgtacccaacataacgcttcttcgtaagaaggaaacaagggtgatagactttctccatctttaaagtgactgggtgtgggttcatttcagttattgcagatgcaatctcttgtccgactacaaaagcttcttttacagttcgtccttttaggaggacaaacatactacagaagtaattaaaatgcatgaggccacgaggaagaagtaaataaagaaactgtgatacatacttgtcaaggctgctgaaatgaccataataaacactcggaagtaatacgaatatatattaacttatgcaagcatgaaaccctggctatactttatattgtaggaagttaaaatagtgccatgaaagatggtggttaatgtttacctatcagtgtcaccatatacaactctagcgttccaattatcattggcattgacgaatgaaatagccttctcaagtgtgctacgaccacactggacaatactatctgccagctctgcacaaggcattcgaccactgaagccagcagcagtataaccataagtcacatttgctatcagctttaaagcaagctgcctcgcattaaatatctgaaagaagacactgtataccatcaaaattgcaaattttatcttcaaaccaaaaatttggactctgatcaagataaccatacccggtgaagaactgcttctgaaggagtcaactttttcattgcttttttcaccattattcttgtagacagaatctcctctagcagcctaggtaaaattcctctacgcacctatagaaagaagagaaggtgactactatgcttaagctaaataagaaaagaactcatcgatgcagaaaacaatgatgctttcgggaaataagatcattgtttgcattgattatgatgactttaaatacaagatttaatttgctcaagaaaaacaatgcacattacctctggtggcacgtacatcacactgtttggggtctgtaggatctgatttaaatcctgaagaacatcgaggtctagagagtatgagctgaccccaagggtgttcatcttcaaatgtgcaagttttccgagacatgtagaaaagcacagattatatgctataatcattgaagggtaaagagattgaaaatccaacacaataacaggatcatcgtaaaaggcagattctggttccatcacaagaggtacacattccatagctggctgagaggcaacctacatgatcacatgatttagttaggagaatactaatgagtaagaagggcgtgaaaagattatgaaagctatcatgaagacaaaacaaggcatgaccagtccattgaataaggccagacgactggttataatccaagaaacgttaaaagtaaatcacttggaagtagcagataaaacgaacctgttggtttcctggagaaatagcaagataattttgtgtatgtgctaatctcagaagcatggattccactctgtactgtgaacctcgggagagaactgagaaaaagtctataccaaaaacacgagcaagttctgacgtacgatttatctgcaaacaatgatttagtgggatcaacaacttgcagataattcactatataaatcaagttctaaatgttacataccatgtcaagttggctcattatctcaaggttcaaatttgctcgccgaatcacatattctatgcatctatatcttgcacccgcaggaccacttgaaaaccattctgtcaataccttataggggattgatggaaccttctgcctcaaaacagcctctgacacagcttcaatcgtgtacatgttgagtttaacttccccgcgaatcaaacgccatgcattgagaacaattctacctccaacatgaacaccactagcatgtgtgcggccccactcgtcctcaattaccacttcttctacttgagcaggattagctaccaacggatctggcagcagattattaccaagttttctcttattatctgaattgtttgttgtggtcggagatggcgtcctagatatattattgagaaatcttataccaagctgtgcagctctttcagctagaaaaccaatggatccgccctgtatatcccagcccagaagaacatctggatcccatttacataaagtctcaataaaatatctgaatagttgcctctcttcaaggaatacagacaacttgcatccagataggccatcaacatttctgtagtgagacaacaataaaagcatgaatacgtcaggcgcaagatttctaagaaaccaaaaaaaagtaaatctggtatattacctctgatcaatgctatctggactaaataaaagcacaaatacttcagctacaaaactatcgtcattctgcacgacgagagctataacattgacagaatcaaatcgtggatcaggtcgcaggtcccctctagactctgcatgaacctataagtttatagatattaacatgtatcaatgaaccttttcgcagaagacatcatcttaaattaagaaagttcatttgtactacagagggccgtttggtaacagcattaacaaaatataatatactaagacgagcttgtaaaggtcaaaactcattttaacgagctgcacgttttgacttcctaagtccactgtttgtaaaccattccaagtgtccattactaatctatacgtgcaaaggccatttgaggactcttagtaattgaagctgtagcttcacaaagacgagggttaagttaaagcacctctatactcagaattgtaagctgttgccccgcacccatgctcgcaggatctcggaatcccatttgacttaagggagtgggcccagatttcccatcagggcctgaaatctgagacagctcttgggaaacactggcctgcaagttaagattaagaaacgttcctttgggtttcagatctatctccgactctgtataagcatttgattctgaattcacaaaaaggttattatgctgctccacgtgctcagacacagacaccacattagatgcagaagcaagatcagtgaaacttgctccacgatcattatgattatctcgtaatggttgtttttctgaatcaatattagagtctcctggacgtggaaaaattcaaaagtttaaaacaaaagttatcattttcacttacttttaatgaaatgaatatcttaatcagggacagtaccattttcgtaagggaaaacgctttaagcatgtatattgaaactttgagaatatgttaaattgaattaaattaggcagtccagtgacttccgactaactctacacaatacctttgtcattcgatatccattgtaaaacagaatccacagaagggggtgaaaaggcaggggtcagtaggtaaagattggagccgtcattgagatgatgcaagggaataccaagggaagttccttggaaaaagtgtttcttttcctccttgttgtcctccaagggaaaaaacgggatgtcgttggaatttccctcttccaagagaacaaaaaacaaacaggatgtcagaagtatctcaggtcgaagtaaaaataaataaagagcacagccagagagaagttctgcaagaacttaagttgacctaacttcagttttataaatttatatttcaaccgcatttgcattaactgtagaagtggcagaaactagaaccagaacaagatgagtaaaggtaccatattcatcatgctgtttttccctggcatgaatttcatgagaatgtgcagaatcctgcagtccagcacttaggcaatcgagagaaggaggcttcttgcttaaggttaggcatattaatcttcccgtctcatcagtttcattggcagttgactcttgctccctccccgatttttggacactatctatttcaatcccaacatgtatattgctagacactagtgttcctgattccacagtttgtggatccttaccaaatggaacagtggtagatgacaaattccttaaaacttcatcactgttttgacttgctgtctctttagctgaacatctatcaacagaatgaagttcagatgactcagtggatatattacactcgcaatttccagaatctataggagataaatttggagtatcgccacaaacaaattcgctaaattctgcagaaagagcaggaccttgttttttggcctcacatctcaaggtgcactcatttttttccccgtgtcgggaatctctaaccttcctagacttcatatgctgtgaaacaggcgattctccatggcataaccgtttttttctcatcaagtcccgcagagaacatccagccaaaacgtttctgtcaattgtattacaaacatctgcttgatgttctttgactggaacaatataattgtctgtcatctcattcatggggtaagaactaatctttgttaaaccaagtttatcactagcatttgtactgtcaaagtccttctgaagatttttggtcagtgtaaaaggtaaaggtccccatactgagttgctaggcttgttgctcttagagaagctcctgttcttatactccattacttcactcgtatgtaaatcactctttctgtatctccggaatgaattttcgcttgctccatttgaagtggagctatctggaacatcactagcgacttctatttcaagagattgtttgtcggatgaagttctaagattctggctatcaggattactaggtaaagctctcttagtcgaactcccaaagtctggaagattttcctgagaatcaagaatgtcttgacattccttttgggattggctcacataatctgtactagccatttcaagaaccttgttaatagacgctaaaggcaaaagaggactaaggatagtttcccggagaatctcatcatctgagtttatgtcctctgcagcctgagatgaggcaaaccacttaaagagacccaaggcttcagcatcttgtatttgagcaggtgtatctctgtccgtgggtgttttcatatattcatcattttccattgatgcttcttcactcttctcgccaagtggagaaagctgttctgatgcaggaaactcactgcatgtaccaaccatatgattcaaagcctgtagatcagtaatttcaggtttggcatgcatatctggaccagctgaagatactgcagtaggcttcataccaggcggagacaattcaactttgtttagcatttctttaagcatattcccaaacccaacataatctgacatagtctgcaacacatcagctgcagagggtttaccaggatcaggaggtataggtgcatcatgcacaccagtcctttcatactcctcctgaacaaaagtgacgaggttaggcaaggtaataccaactaaataatttcaaagtagaaccaagaaagtagaatgaacctcccaaattgccacaagcgactgaaccatgttagtatcagactgggcttgtgaaagggagttgtacattttaaactgttgattgagaatatctacaagagaagaggctagttcaaacgtccggtcatacatgaaacacaaacaattaaatttcgaatcaggaaaattaccactactagtagcatctccctcaagttcacagagactctgacgtctgtaatggtgttggtgcctatgctggctctggctcaacggtgtatcagattcttcagagagattccacatccactgacctgggattgttgacaagctccaaacaggaaaactgacgcttgcagcagcacttgaatttgcctgctacattgtttcagtattgtgatataaaagaagataaaactaccacacaatataacgcaaagcatcaagtatttgaagatctacctttgtaatagccacttcgtcaatcctttgtcccggacaatcatccaaatcaaatctccttggccggaaatggtgaggcactgggctacggaacttcatctttgatatatgcacatgacccattccatacaaattataatcaacctatagaagaaaatcacagaaacttcagtattgaaatgcagacaaactgtcgtggaattacagggagggggacacttagtatctaaggtttggttggaagggttcaagagcaaatatataagtgaaaagtagctgaaaactgacaagtaaggaaggcttcagggcaccaaaagactattctcaaattattatatatagttgtggttggatcagcattacttattaacatgaatatgtgcatgactatcccatagaaaaagtatccccccagctccgtttttcattttaattacattttgatggtacataatccgtagcaattttgacagaataactttcatatctgaaattgctaagtttgacaaaatcctagtcactaaacgatttctttggaatacataacaacgaaaaattaccagaaactggagaataaagggaatatgagactcgtaaggctgcaaacttttaccaagaacagcacctgcctagagaggaaaataaaaagagttatcagcatactattttcaccaaaattatatgcatcatacataaagtacagaataatggcggagtggaatcatcaagatatcgtaccagaagaagactggcagcacgagccacatcgggtggatggtagctactatactgttaaggtgattaaataataaactgctcaagaaaatggtattgctcgaaaattaaatatacaggatacagataaatcttcacaaaagcctcctctgttgagtggtacccataaaacttctttgctcttacaatctcacaatcatggatatgttgcctttttgaagcagcatttcccttaagctacaagcccaaatcaagtatcaatattgattgtaacacatctatgggaacacgcagaaaccacaaaaaaaaaaaaaaaaaaaaaaaaaaaaagccagatacataaacgcagctcattgtcaagagtcaagactaaaaaaccatggctcacttggtataaaatacacacctttagagccttctctaactcaagggataaagcaagtgtacttccatccactgaagcaaaaaaaaaggaaaattgtcattggtgcttgactagctaactctagtatatttctcagtagacttataaatgggttacgaattcatacctcctttatgatgctcaagtggaatttctgagcacggaatatagagatatggtaaagcctataagagaaacaaagtttccaatcttagcaacaagcaaacaaacttttttttcttaaaacaagatagtaaaattaaaactcttacacgatgaatgtgcaagcaagtcttctgaccagcaggtgtagagccgtatatccttataacagggacttcatttacctcactaccttaaattcccagcaacaaatcaaatagtaacaagtcaaaaacttgccctttaacatctaacgaaactggagcattactctagtcaaaatttctgaagtcaaccattggattcaaaaaggcgtaagctttagaaagtataaagagagaattttgccttaccttggaagctactgtagcaaatattataaccagggattggagaagccatgtaataatcgattgaaactatccgtaaactgaaaacattggaaccggattgagaatcagccatggctgtttcgccgtgactttgaccggaaccacgaattatgatttggcgccagtacccgcagaatctgaaaccaaaaaatcaaaccggatcattccgttttaaatcttctaaccaaacggttatagttcggttcattttgtttaagacgtggttaccttcagtgaatcgctctctcttgcttgtagtttcttctactctacctaaccgcgacgccgcctgagttatcccagctacttaaccgttctccgacaaaggttgccggtgtaaaatgtcaaaaagcagaaaagcaacaaacatttaattagtgggcctgataaatataatgggccaatctaaattttaattatccattatgcttttttgaaaatttaccccaagttaaatattctgtgacccgtttaaatctaaaaacccaaatccacatttgcataaactctatgaaaagcgaaatttcaaatggatggttcttggaagatattagatcttgtatgtgtatcttcaactgaaggacaagacaagtgcccgttaactaggagttgtcttttaacagatgagaaaaagacagcaaaataaaagacaaagccatttaaagcctaaagtataactcatttgattcaattttcataacaaataattattcaataaaaacaaatcgaccactagtcccagacgtgggagtgacgtaacgacctcgtgtaagaactatcggagatacaaaaatataataggaaaaattaaagaaaaaagaatataataattgaatcagattttgtcgatgttctcagagacgttcttcatacgtggacggacttcagggtcaccttcggtacaagcgagagctagatgaaaaacggacaagacttgttgcttggcgtgaacttcttgaagtaacattggatcaaccatgtccgacaatggagtctcctcttcaaaccctttcctcacccacttcaccaaatccggcacctcaacaaccaccgtagacgtcgaggaagagcttaacggagaagaatccggcgatttcccggtgagaagctccataagcacaacaccgaaggagtatacgtcccatttctgagtaggcctccctccagggagccgggcctcgggggctttatagccgttggatctatctgagggtttgatggaagtgtaaggaagagctccacctaagaaaccacccgcagcagaggaggaggaaggttcgttagaagaggcagaagcggcagtgatggtgatgagacgtgtgagaccgaagtcagagatgtaaggagtgaaggaggaatcaagaagaatgttggaaggcttaacgtcgccatgtaccaacttccttggactacactcgtgtagataagctaacccacgcgcagctccttttgcgatctttatacgcgttgaccatgttaagctcggtgatggttgaccattcctccctattcacacaccaaaacaaacaagtatccaatattaaagtaagtaatgagttacgatgagaaaaagacgggacagctagaggctcaacagagtgggtgtataaaatcattactcttagcccacaagtaaacttctctcatcattgtttcctcattctgctatttttactaattacttctactctaagactctaccacacttaaatcatatactaatacttaaaaaagatatttattattcggacatgtcgaattctcttacaagacatgtctcttttacatgtaacttgactaaattctaaattaaaataccaaaatatgcctaaaaagagaaagaaatcttggtccactcttgctttgacaatcccacaaactatctctcagatctaatctcatctctcactaaggtagtaatgtctaatctagcgttgacaaagtcaaagtcaacataaatttcttaagtcaatagaacagaaccggatctcaaactttagttagtagactaattcgataagcagaaaaagaagaaggaagaagtaatgtaatacctctaagagcatcagctaaacttccattgttaacgaagtcactaatcaaaagcttctcatcaggagcccaataataagctcttaacttcaccacattaggatgtttcactttccccatagcttgaacctccgtaacaaactctttatacctctgttcccctccttccccaagtcgccgcaccgccaccggaactccattccctaacaccactttatacactatccctaacccactcttccccaaaacatatgcagaagctctcaacaactcatcaagctcaaaagaaaaccctttatcaatcgctacaagctctccatctcctttcccttctcctctctcattaccttccgcttccgaatcatcctctttcggaaaccccgtgatacaacaacacgatttccccttcaccgaaccaccaccgagtttcgcattccctgtgcagctacaccctccctcagagtcttttttcttccagtacaagtaaactaacactaaaccaataaaagctacacttgctgcatctgccaccgagatcaacactattaatccagtacttaaccctcttctagaatccgcattattctcgggcgactttcgagtccccggagagttctcatcagtgtctttacaagttttctggagagggaaaccacacagtttcggattattgagaaatgcggttggcccctggttagagaacgaaccagattgaggaatctcgccggagaaatcgttgttccggagatcaagagagactgtcaccggtagatttcctaaggaattagggatttggccggataaatggttaaaggagagattcaaagtaccagagagagacttaagctctccgatatccttagggatttcgccggaaaattcgttagcagagagatcaagctgagctaaattagtcaattccggccagatatcaccaggaatctcaccggaaaagttgttagcggagaggatcaaccgttgaagctgtttacacttgttgagatccggtgaaagagttccagagagcgaattcatagacaaatcgagattctgaagctttgggagtttacagatcgaaggaggaagagtaccggagagattgttaccgtataagaagatactatgaagcgacgtcgcgttgaataattgagtaggaattgaaccgtaaagttcgttgttgtggaggttaagacgacggaggtaaataagtgagccaagctctgaggggatgtagccacggagatgttttccggcgagggaaattccaacgacgcgagaggtagaagagtctgagatgttcatacaggagattccggaccaatgacaaggatcggtgtcgttatcgttccaatcggagaaagcggaggaggaggagtgatcgacggcggatttgagtgagagtaaagcgataccgtcgggggaaagagaaagagaaggagaagtgttgaggagatgaagaagaagatggagaagaagtgagagaaggatcatttctctgtacttgaatttttctggtttgtgaaaataacagagagtgaagaaggtgggtgacgaaagaatgagagattggttggttcttgaagggtatttatttatgttagttatacctttttaatcatactgtaatcaattaattaagggcaaaacatcaatttatggcaacgtatttaataattcaattacaaattttttgttttcatttaatttagtttgacataacacatttttgtaataatgtttgccaaaatttctattggtcatcagtaattttgtcgattgataccgttttgattgtgactaatcgtaaaatatatagcggtattacaaatatcatttttattgtaatgttttagaaaaaaaagttttactgtttgggggttcataaattagatccactattaacataaaattatctaaattagtaatgtttatattgatgagtactataattttgactgactgtgagtactgtaattttgagactttgtgaacaaaggtaaaagtatggtggcatgtgtaattgattgccaattatatatttatttatcataatgatatttttttttcgccattttttttttttcattataatgatatcataatgataaagaaacaaaaaaagagagaaaaatatcatagtggtcctcacaaacatggattagcctaatccaaatgttgattagggtaaataactaacactactcacgtaagtgttagggattagcaaatgaaggaggtacggaacattgtaactccttgggaactgttacggtcagggtccctgtccctcacttagccgtcgaagtaaatgccatgcctttgacacgtgctcgctggtctctcaaagtctctgtatagaagttttttccaataattgtgtttaaaattgagttttataaatctttttcttattataaatctttttcttattatttcaattttgcgactaacatcttagaatatttttcataaaagggttatcaatttagtttaaattaatttttctgtaaatttacattttagaatcagtttaaaatgaattttctgtaaatgtacatttaaactatactatttgaggtgtgttgttaatgtcgttatgtccccctataatcattaaaacacgcttagaagctaactaaagcatgaaatctataagataatatcttatttaagtgaagtatgagaaatgagattaaatcattttatttatcacatcatgtttctactgtctagtctactaaactaggataaaattatttcaccgtcattgttgctagtttcgaaagtggctttatatttgctatgcttacggattcttttggttttggctggcttggctaaattttaattctattattcacatgatcaagaaattgaaccaaaattaatatcactacttaccaatttggtatgagttttttttttccgaccaatgttgtccgcaactgttaaaatatacagtacatctacatcatacatgtttctgtcatgtggtagttcgatttgtagaatggaccaacaaactactctcacgtgttaccatacagatattatatcacgttctaccatacaatcttaacacatatagatatagtctcaagattgaaaatgaacatcgtaaagattactcaacttcagcagctctttaaagttttgtattaccaacaaaaaatttccaatacaaatactggtggaaaaatattctcccgaattttgctttttcccttctactttgctcttttttttatttttcattgttcttacatcatttagccgtcacacccaattgataaaaagaaaaagaaatgagtatatggattcctaggtataatgatgtctggattatctgttacaagttttacaccaagaatattaatgatgatatcagcatattggaagaagatgaagcactcattgattccaccggtggatgagtttctctcaagaaaccgtaatccttttgctttgcacccaagtcatattcttttcgattatcttaattagcgttagttctatcttgcattatgttggctcctatgtcgtcttttgaagaagagaggtagaccctattttgctaaacttatgtactgtataacataataatactattttgcccaaaaaagaagaagttatgagcatgactttatatgaatacatcattaatattctaccggaacgacatatagtagctagatttctacggaatttcttcagtttgcgagttctatataatacaatacttatcatataaagttgtatgttttaatattaatattattggtgaatgtggttagaagttcttgtccaagttatttagaccttaaatattacttccatgtgttatattttacatgttatctcttgaatttggtcttcttttatgtatcaattaagttgagatgaatatgtatagatcttttactttcccggattcggataacggaaaaatttataagagtcatgcatgcacgtatattgatacttaagatattacttgctcttgtaagagtatgtatcctaattcccgaatatataatccgtttatatctctattaaacgaagaaaaacatttcaagtaacaatgagattcacattatatcagttttcttattttcaattcaccttgcctccagcaccgtgatggtaatactcgccgatacattttccggctcctgtggctcaaccttcatttctggaaagcttctccggggaccatcatagaaagcaggctctttaggcaaagaaagagcattatttccttcgccatatatcatggacacaacgtctaacatacttggtctatcttccgcgttttcttgtacacacaatagagcaacttgaacgcatctcaacacttgagggtaatcaagcgcagaatctctcaaagacagatctatcacctcacgaattttgttctctttaaacagattccacacctgagaaaacagagtttcagcgactagtcgactacgcaagcaagaaagatgagaatgttaacaaataagagaagaaagttttgcttttacatgaactatgagattcaaaggtccttctaagtcatggtgaaagctattgttcttcctcccacaaatgatttcgagcattagaaccccaaagctgaacacatctgatttcgccgagaatagtccttctctaaaatactccggcgacatatagccactacacaagagagcctattaaaatgtgatcaaagaatcttctccttgtttctagtcactcttaacttacaatgtgccagcaactcttttggtgttggctcttgtttcttccgctccaaatatccgagccaatccaaaatccgatattttcggattcatatcctcgtctagcaaaatattactagctttgatgtctctatgtatcactttcaatcttgagtacttgtgaaggtacaaaagcccttgaatgattccttccatgatcctgaaccgcaacgtccaatccaaaacgtttttcctcaagggatctgcacatatttgttgacattttttcagatgtaatctcgaaagattcttagccttttaataaccaaaatctcaccaaagaggaagtagtcaaggctcttgttctgcatgtattcataaatcagcattttctcatctttttcgatgcaacatcctaaaacctgaacaagatttgtatgctgaagctttgcaataagtatagcttcgtttttaaactccactaatccttggccagatgctaaagatagtctcttgatagccacttcttccccatttaataactttcccttcaagaaagtagcagaaacataaaaatctgctttaagttaatctaaaaaacatgaagactctggactaccttatatacaggaccaaaacctccttcaccgagcttgttttcatcggagaagtcatctgttgccgatactacactttcaaagctaaaaatctgaagctcgttattactcttcctttcatttctcttgtgtatgcagctcctatcaattcccaattcacgtagtagcatttcttggtctattgttgaaccaaaccttagtgataaaattctcctccgtatgaaaccaatcactaacatattaatagcaaatattacattaatagacatgcttttacaaatattattcagctaaatctcaggtacgtacgtaccttgaggagtgagctctctccatagaaagtagtatattccacgaaataaaacacgtcctggatcataaaaagaaagaaagagggtgaacttgttagtaagaaaaccattgagactaaaactgttttgtgagtaattctgatacaatttctaccttttacattaaatttcctcaacacgagatagattataaaccaaattataggtgtcatgaggaacagtgttgccacaacaatatgccaagctgccacttttttgttctcttgacctacaacatattcaatattccagaaaacttaatgtccaatagatttgctgcagttactaaagcgacactgacaaaaaaaacagagaatatatttccacaagttatataccatttccacggatatatatagttctaggactatgagaagccgaccctttgttggtaggataagtattccagatttcgcaacccgtaccatccggctcggttgaagcataggcaagacaagaagagttttgcaaacatatagcactgcaatcaactgaactaaacgttccactaagtacaaaaccattgcttgcggaagaagatactgtcactctgaaagaagtgaacccatatggctcatcccggactacgtaacctgcagccaaacaattccggttcctataattttgcctgttacgttgccgatgcatttgctctctacgcaaaatgccttgttcgtctatcattatggttggaaaaaatgttctggcatcgtcctgatcacctgaatacataaaatattgtccactcttggttgaaacgaaggaaaagaggaaaccgcattcgtttaactcctcttcggagaaccgacctttattccaaagcccgctactccaatacatgtttccacgccacaagatggtcaatacgtttgtgatattagtatccatcccaaagacaaaagatccagaagcaggtaaagtatcacctaaccatgatgtaagttcccatctcttcctggtcttgccatcgaaacctagtttcatcccaggaagaagagtatctgttggataatcgaaactttgccacaaaacccgcttcatcgatccatcagcatccatctcttggagctgaagatttccagaatccaaaagctgaagggttgtgtttcttgtggtttctatagagcttagctcaagcatggttgatgctcctcttaaaatcttcaatctgccaagagaatccactgtgaggcttccagagcggtctgagattggattgttacggttagcaatccagacaggtctgtcctggctatcagtattaagataaagattgttgaaccaaattccaagatacaagttttctgaattcttaaagttgaaaaacttgagtttgaagattttaaaagcagaaacgagctcttgcccatctttcaagaactgaccctgatgtagcgtatctgtttcactgcatgattttcctaacaagagagataaagtaagaagagagacaaagatgccatttgaacacatagtttcagaaagatggatgatttggcaaatagatttctttctaaagtggttttttaaagatatatcttgtttgtgatcaaagtcatatcagaagttccaagtctactacgctgggagacaaaattgaagtcttggccgttgaagtttctaagcaacagctgttatcacaactaattagcaagaaagtgaccacaaaattgaagttgactcttattacctaaaacaagacacatacataacagaaccagacgccatgctcttgagcaattgtttttgtttttaacgaacatctcacgcctgttgggagaatacaacacccaataaggatttaaaagggggagactacttacctgagaaataaaaagccaattgctaccaagagaggagaaacagagttatatcatttcttcataaaaagacaaaaaagtatttcatcatggttcataaaaccccaaatcttattggtaaagaaaaataaataatttataatcattttgttgaaagaaaaaaacccaaaaaaaaaaaagaaataagaaatccaaaagcttcttgtattgattgaacggaaaatgttgttagagtacataataataaccctgttttacttggtaaggagaccattttattggtttcaatggtagaaaagaatacaagaatcagacttagcttgtaacatataactggttagaaataaagactcaagtaaggtatatcatccgtggaattgttgaccttcgaatcttgggttacaagcaaacgtaacaatcgttgaagctatcgatggaagataaagacttcctcgaatccattctctagcttattaggtcttctctacaatccacaacaacttgagaaagacgactatgtatgaagtacctcgaaagaaagtgaaggaataatgagaaatgagagaaaattggtaactcaagagtgtgataaactgctcatattgtttctctactatgtgtgggttccgtggagaaggagaagaatatacgacatagttttgataaaccaatttaaaagttttaatgattttactattacagtattagatgttttcgaagctagaagattttctctctttttctttttttttggcaagaatttaggtaacaaatataacaactcaaaaacaatatttttatatttaagtctgatataaaataaataaatgataataattttcaaattataaatttaaaaatctaataaattataaatacaaaatgataattaaaaagacgctaaaaacttcaatccgcctgggtggatgggaagaagcaaatctttgagtgagtttttaattcaagaataattaaaatactccatttggtgatttggtggaccgttagaaattaaaagcaaaatgcaaaaatattcaagtgggataacataatttaactgacaatttgttcatgtttccactaacttttctgatggaaaaaaacgcactatttgcaactataacgcactaatctcttaaaaaaaaaggttaaccataaactctaaactcttccaaaaaagcttaaatactcctaactaaccaaattaatcttttaaacaaaagtcaaaaagttacaaattatatgaaaactcacgtcaaccccagttacaatattgtctctggaaaacttcctaaaactagtacattaaataaatatttatagaaagaaccgttcattagttttaaattagaatactaattaacatcacagtaatgccgttcttaacttaataatttttaaaacagaacacacagattcttaagtacttcctcctccactcgaatatctttttattctctctctctctctctcacatttaaccccaaaatcatggatcgccttaccaagaacaaaaccctaattcatcatcacttgtctgattcttctctattggtttatcttttatgaaccttcctccttggccggtctctcaatatccccggtatgtaaatgtttgacctctatcttatctcttctgttctgttctttgttttgtctttgtttgtccatttttggttgttactggttccacacgtgttctccgcagctttatttttagtgctctcttttatttttaatgtaattcgcaattttttctattaatcgtagaatttcccggtttttgtggatgtgtttcagttccgttattgcaatttttccaggatttgctgtttgaataaaaaattctgttttttttttctttctcttttctgggttaagatctttttctcatagcaaaggtaatttctgtgattgtagcatgattcattgtttgttttaataatttctctgaattcatgtattgattcctttgtttctgggagatttttgtagttttagagttgttttggtgaggtttgatcatggatgtgaccgagcttgaagagaatctattcgcggctagcgatgccaaggttcggtttttaaattgaaatgttcgaattcggattgtaattgttggaatctgattaaatttgcatctctgattattgcaaacaaattttctattagaaatagtaattgggttatcttaaaggacatattttttattatcatttgatttcaatgttgttagagggtttcgtgtttttatgttcttggtgtttgatgatttgattgtcttgtgcttttgctacagttacatggagatatgtgcaaggaactatctggagttctatgcaaggtactttcaatcttcccgtcattggaaggagcaagaccgcgtagcaaatcagggattcaagccttatgctctttacatattgcacttgagaaggcaaaaaatattcttcagcactgttctgagtgtagtaaactttacttggtcagttttttctctctttggacaagttttatgctttctcgtttcgtgtgttttgcttctttaatgttctacattttccaatgtgaacaggccataacgggggatgcggttcttttaaagtttgagaaagcaaaaattgctctcattgatggtcttaaacgtgtagaagacattgttcctagctcaattgggtcacaggtaattattactcagttcatttcacattgtgatgattaagataagtccacttgttgattgatagttatgatgtttatagttgagaagtctgtttttttttatgtatgatttcttcagattttggaaattgttggtgaactagagaacaccaggttcatgcttgatccatcggagaaggaagtcggtgatcagattattgcattgcttcaacaagggaagaaatttgacaactgtaatgacaacaccgagcttgaaattttccaccgtgctgctactagactaagtatcacttcttctagagtggctctggcagaacgaagggctttaaagaaactcattgacagggcacgcgccgaagaagacaagcgtaaggaatcaattgtggcttatcttctgcatcttatgagaaaatgctccaagctattcagaagtgagatcttggatgagaatgactctccgggttcctatccatgttctcctaatgaagatcatgggagtgttcatgggtttggtcgtcagctatcaaggtttggttctttaaacgacaagcccatgaacagcataaattcaggacagatgcctgttccacccgaagaactgagatgtcccatatctttgcaacttatgtgtgatcctgtcattattgcttcagggcagacttatgaacgggtctgtattgagaaatggttcagtgatgggcataatacttgcccaaagactcaacaacagctcccacatatctctttgactcccaataactgtgttaaaggtcttattgcgagctggtgtgaacagaatggaactcaaattcctagtgggccgccggaatctcaagacctcgactactggagactagctctctctgactccgagtccaccaaatcacagtcagtcaacagtatagggtcgtataaattgaagggcgtaaaaattgttccgttggaggagaatggtactactgttgttgaacgacaaaacacagaagaaagttttgtgtctgatgatgatgatgaggaggattctgatataaatgtacttgagaggtatcaagatttattggctgtcttaaacgaagaggagggtttggagaaaaaatgcaaggttgtagaaaaaatcaggctattgctgaaggatgatgaagaggccaggatcttcatgggagccaacgggtttgttgaagccttgttgcgattcttaggatcagctgtagatgataacaatgctgcagctcaggatagtggagctatggctctgttcaatttagccgtcaacaacaacaggttagtacctcttgttgatgttggtaatacaataatagattgtgactttctcattactttttgtgttctcaaggaacaaagagttgatgttaacttctggggtgattcggctgctggagaaaatgatttcttctgctgagtcccatggttcagcaaccgcgctttatctgaacctttcctgtctcgatgaagcaaagtccgtgataggttcaagccaagcagtacctttccttgtccaacttcttcagaaggaaatcgaaacccaatgcaagctcgatgctcttcacgccctctacaacctttccacatattcccccaatatccctgctctcctttcatctaacatcatcaagagcctccaaggccttctcgcatcaacaggtgaaaatttgtggatagagaagtcactagccgtattgctaaatctagcttcaagccaggagggcaaagatgaagcggtatcatcacagggcatgatcagcagtctagcaacagtgctagacatgggtgacacaacagagcaggagcaagctgtttcatgccttttgattctatgcaatggaagagagtcttgtatccaaatggtgctacaagaaggtgtgataccatcattagtgtcaatctctgtaaacggaacacctcgaggcagagagaagtctcagaagcttctaatgctgtttagggaagaaagacagcaacgggaccagccatcttcaaacagagatgagccaccccaaaaggaacctgcccgaaaatctctctcagcaccgctgtctgtccatggatcaactcctgcttcagcttcagttcaagactatgaaccaagagtcctgtcgaaatcaatgtcgagaagaaagtcgatggcaagaccattcagcttcttctggaagaaaagctactcggttcgcgagtgagaaagaagaaaatatcacatgtacatacaagtacaaccttttatatgtaaagctttgtttttctttcttacaagttacaaaagtcatttcatagagaagaagatatgttgtacaggtctcattgtgattagtacactcgatttttgttgttcttttggttagccaaaaaaagatgtatatcaatcaaggtaaatacaagtaaaacaaaaccccagttttaacatcgtattcacttattgtcattcttctggtttattatgtttctatgataagtatccaaagttttaaaacaaatcttaaacttaggttacttagaatatgacatttacaaagtaatgaatacaagaagtacttgaaagagaccaaaacatgtaagctattgtgtcacccctcgggttcaaatctcgaaagaaatcaggtcgaataggattcagaacgcgagaaggtgagcgaatccgcgcttctactacttcgtttgatgggattctgaatccatccggtctcaaagagttccaagatcggatctctgcggctactgctgcttcgaccagtgcttccaccgccatcttctccactacttcctctctgtaatgcctccttgtacgacactttcttctccgtccccaaattcctcttctcttcctcctcttctgaaactgaccctgatctgctaaagctcctatcaactgtgatctctttctcattcgtccctttgttcttatctctccaacgtcccaacacgttcaccaacaaaccaagcctagaaataacatgaaccaacaaccaatctagccacgccactcggctcatcaaactcggaagtttcttgagcactccatcaagtttctctggcagagtctctacaatgatcaacaaatcaaagatcttaacaaacacattgcttgaagaagggaagtaagtctcgattgcgtcttgtaacgcgagtatatgatcgtcagctacagagagaaccgcgagaaaatgacgatgaaacggacttgtcatcgaaacaaagaagataacgaattcaaagagtttcctcaatagccaagaggatagattcttcttcttcttcatcagagtctggcttcttgtgtaaagaacacgagtcatggagagtattacaccaccacaagtctcaagaggacgacgtcgcggcctccttctcgccggttgctcctgtcaaaatccaaaatcacaaaaaataaccaaacatgtccagattatttgaggttatcaaagggtaagaacaaagagaattgcataccatttatgaggaatgtagcagattccaaatgttttattttctcgtctgtaaattttcccggaaaatgatcgagaaacttttgagaaaattagttcggtttcaggattttatacgttagtcaagggtaagcgagcggttagtcttgatttcagctgagcattttttagaacgagcggttacgctattctttttttaagtccactcgagaagattcgaaactgggttgccaaaagtgggttttttgaaaatatttttaaaaccaaacgttgggaatcttttttaaaataaaataaaaaaggaaaccgaatctatgacgcatgcatgaggtaagccattagatagattgtactgtgcgagtctgcgaatcaccgatggtcaacgtctcttctccttcaacttcaaatttagtctcttaccagtacgacttctcggtaacggaatcgttgctctgtttgccggagacgtgggtaagattggattgggaggtggagaaatgaagttgttgccgcgagagatcgagaagttagagctacatcaagctggtttccttgcacagaaacgtcttgctcgtggtattagactcaattacactgaagctgtagcacttattgctactcaggtacttcactattcttcaatttcatttactatttttatggtctgcaattcttaagtcgaagttatggttctcaacttctcatggttatgtagattcttgagtttattcgtgatggtgataaaagcgtggctgagctaatggatatcgggagacaactattaggaaggtgatgatatgatgaattctatagttgtttcactttttttgtttttgttttgatatattcagtactattttgcatcttctttttctgtaaacaggagacaggttcttcctgctgttttacatcttttgtatacggttcaggtaggtagtggtgtcattgattcttttttaatgttccatgctttgtcaagtcattataactatagttagggtgttgtaggtcgaaggtacatttcgtgatggtacaaagttagtcacggttcatgagccgatttctcttgaaaacggcaaccttgaacttgctttgcatggatctttccttccaggttccattttgatcattgtattctacagttagctttttatttttctggtatactttgcttagttagtaaaagtagtaatattgttaatgtgtagagattacgacttgttttgtagttccttcattggataaatttccagaagttcatgagggtgtaattattcctggtgatatgaaatatggagatggaagtataattataaatcatggaaggaaagcagtagttctgaaagtagtgaacactggagacagaccagtgcaggtttgttaaattttcatctcttgcttcttttgtattttcaaattactgtaagattctttatttttgaatccttattggtatggagataggttcatgaaatcagttgtagttaatttatcaagtcctttttaggttggaagtcactaccattttattgaagtgaatccactattggtgtttgacagacgtaaagctcttggtatgcgtttaaacatacccgctggaacagctgttcgctttgaggtttgttttctcatcttttgttatatgtctcggctaaataatgaccagcttttagtcatgtcagtgaaatttatatttttgtagccaggagaaagaaaaagcgttgtacttgtgaatattggtggaaataaagtgataaggggaggaaatggaattgttgatggtctagttgatgatgtcaattggacagttttaatggaaacaatggagagaagaggatttaagcacctggaagatattgatgctaggttaactcctagtccacctacttacatatacaaaagatataaagttttaactgatctctttgcagtgaggggatagcaggggaagatcctcgatttacaactatgatttctcgtgaaaagtatgcaaatatgtatggtcctaccactggggacaagcttcgcctaggtgataccaacttatacgcaagaattgaaaaagattatactgtttatggagatgaatgtgtatttggaggtggaaaagttctaagagaaggcatgggacaaggcatagagcaagctgaagctctttctttggatactgtcattaccaatagtgtgataattgattattcaggaatatataaggcagatattggcattaaaaatggtcatattgttggtattgggaaagcaggcaatccagataccatgcatggtgtgcagaacaatatgcttattggggtaatttatttcactgtataaaacacagtaaataccattttggagtacttacttactttctcttgtttattttcttagaataagactgaggttattgctggagaaggaatgattgtaactgcaggagctattgattgtcatgtacatttcatatgtcctcaattggtgtatgaagcagtgtcaagcggtgagtagagtagcctgactgaatataaagcataagtttgcctctaaattcataagtatatgcaggcattacaactatggttgggggagggacagggcctgcttatggtacacgtgctactacgtgtaccccttctccgttcgatatgaagttaatgctgcagtccacagatagcctgccactaaactttggctttacaggaaaggtgggatatgtttcttcttgatactgatatccttgttatccatgtactcatctgtatttcgaactcttacggttagcaaatgtatcgttgttagggaaatacagctaaaccgttagagcttcgtcacatagtggaggctggagcaatgggattgaagctgcatgaggactggggaactactcctgctgcaatagacaattgtttggcagttgcagaagaatatgatatccaggtcttttcttttccctgatgacatcctcttttaagaaacaggattgatagtttcccatatgtactcaattgttttgatttgacaggtgaacattcatactgacaccttaaatgaatccggttttgttgagcacactatcaatgcatttcgtgggagaacaatacatacatatcacaggttcatcagcttctcacctcttcatgcacctctcagatgcttccttcactgcttatgtttgaagcaaaatattgaagtgctatttttgtttgttaaatcattctggacagtgaaggtgctggtggtggacatgcaccagatatcattagagtttgtggagtgaaaaatgtactcccgtcatcaaccaacccaacacggccatatacgaaaaatactgtagatgaacatcttgacatgctggtatgagaattttatacgagtgatggtgaattgctttacttttgtcttgttaataacctcatatgcaaacacaaacagatggtttgccatcaccttgacaagaacatcccagaagatgtagcttttgctgaatcaagaataagagctgaaacaatagctgcagaggatatattgcatgatatgggagcaatcagcattatctcctccgactcacaagcaatgggtcgcattggagaggttcatagtatttgaattcttgaattctatatcctttctgtagagatgcttactttgtggcatgttctcttttgacaggtaataagcagaacttggcagacagctgacaagatgaaggctcagaggggagccattgatcctaacatggctgatgatgataactcaaggatcaagagatacattgcaaagtacactataaacccagctatagccaatgggtttgcagacttaattggctcggttgaggtatgctaatcttctccacacgtctcatatcttacttatacagctttattttcctctgtaactacttaacgtcagtgcttttgtttacttaattggaaactgcactgtgatgcaggtgaagaagctggctgatcttgttatatggcagccggctttcttcggagcaaaaccagaaatgataatcaaaggaggcaatatagcatgggctaatatgggcgatgcaaatgcgagcatacccactcctgagccggtaatcattactgactactagattctagactcgttttcttgacaacacgtctctaaagacggtcctttcttttattttatgatggtaggtgatatcaagacctatgtttggagcatttggaaaggccggaagtgaaaactctgttgcatttgtcagcaaggcatataatcttttgtcactctgtatcttccattctttccccaattcatttgtggattcagttaatattaactatagtttatgtattcttacataaaccaggctgccttgagaaagggggtaaaagaactatatggactcaagaagagggttgtagcggtgtccaacgtgaggcagctcacaaaactcgacatgaagctgaatgatgcgcttccagagatcaccgtggatccagagacatacgttgtcacagcaaatggcgaggtccttacatgtgcgccagccgattcagtccctctctcccggaactatttcctcttttaaggttgttgaaatttctgatgctctagtgcattttatcggcggcattgctaactacaatgagagacacctacagcactatagcaagaatatactgataggtcacatcccttatgttcatttgtaacaataagcttctttgaacaaacaaacaaaagaatagtgagagaagcaaatataaaaagggaatgtggtgaaagagatgatcaagtctagagagttgcaaggaccaatgttgttagactagaggatccattatagaattataaagtggtgtcttttttatgttgtctctgtcattttttaatggcatgaagttgttagtggcttgcttgattcttgtggggtaaaagcatttacatcattatagaagcaacttccagaagacagcaaacagaagattattgtactgagctttcctatgaatctgtgatggttatcttctcctctactaaatggtgtgtgtcaccatcttgttcatgttcaatatcttcttcattgttttgcatttagagtcaattttaaaaacttattttattttcctttacgtacatgcctaattctattatagaaattgaacttattttaaaaaatttgccactttttcattccatacaccaaaaaacacaagtatatgatcctcaatcacattgatacgaatgctatcttgttctgcggtacagagcattttcaacaacatatttggatatctatctagaatcaacaacaatttttttttacatatatttgtatttttcatattcatatggggtactttatattcgaatttcatagaaaactaatatctttaaatttacatttttgtaaacaaaatttagttgtattttagaaataatgtaatttttgtgtgaaaagggacatgataagaccgaatttgaagtagactggttacctaacataacatcaatggatttggatttcaaaagagagaaaaagaagagaaattattaaggataaaaccaacaaatcaataaagtatatgcataaatttacagactattaatatcatgaatctatcggtttgttcaaaaaaaaagttgttgttagaatttctctttaaaaatagtatggttaattaagaaagaatgattatacatataaaaacaaaactcctaaatgtttaaatgatttaaaactgagagaatattgttttacaatcttttagaggattgtgattctcataatcagaagaaaataattgcagatacaaagatcttagctggctacgtgaagggcatgcttgagatatcataactctgatgtgcatccacacatgacaattgacagtcttaacatattttatgtccaaattataccattaggcggattatttagaacttgtccacgagaaacatattgtatgtttgtgatccatattattatttcttctttcttctaatataaaaattatttaaattttattatatggcagaaaagcagtagtttggttggcatgactcgaatttaagatcgcaaatgtaaaatggatctcccagtcatcgtttttgttcatatttatatgcggttcggtcacagttgacatgttcacacggttcctctatttaattcagatttcagacaaggtgtaataatttgaatggatatgaaacatttgtaaatatttataaaattaatgaaagaccaagaggtttggagaattagtttatactataataagcttatcactaaagaacataattaaacatcataaaaagaaagaaaaatagagagagagatatagactttattattaattgactgtacatcgtattttcgactaatattaattgactatacatcggctattcgaagtatatatctactgataccatttttttataatcaaagtgtaattcatgattttaccacttgacgagttcttttaggatgagtgtagccatcaaataactcatttatcgatttttttaatggatataaaacataaacactatttcgattggcgagatgaaaaagcttagatatttcaacgcttgttaagaatcgatttctgacttgcaacttttttacaagtaggaacgactaatttactaccacttggagtaaacacgtaccgataagattgaaaagttacaatttagagatttgaggatttatgtaccgttcaaagaaatcgccaagtttaataatttgtttattctgttaggtaggaatacaacgagcatgtgcataattaaaatataaaataaacctaaacttaacggcggtcattgcctccaatgagtatatgcatgttatgtggtcggagtttttaatgtccaaactgggtttattttttgacatcaacatgcactttttatagtacaattaagtttggtgcaggcgcagcaagcaagccacacccgtacattactgcgtacaaacaagaagcggtcaatttttcgagaaagacgatccatacgttctgtgtaaataaaaaaataatcagatttaacatacattttgtggaaaacaattcttcttatatgaaaacaccgtagaatgtaaagccagaggagatttaccaaggtggcttcgttgagatatttgaagattgttccacttgtgccttctaaaacgttagtgatctgttatatacgttacctcgctaacaacatgttcatatataacacacaaaaagttatttatgtttttttatgttagaaaagagaaaaatattttatagcgttgacaaaaaatttaaccaaaagaaattaaagtgtcataccacttggtttttggagtctgattctcacgcgctcttacacgcgtacgtgacaagtaaattcacaacccatttacggggtggaagtgacgacactctctcacggtcaaacacattatcctgtccgaaaagtgaaaactaacacaaaacgtcaccgtttttccttgactcagtcctctagcacgaggtccacgagcaacgtttctcgtttgccttatttatcatctctctctatctctctcttcacactgccaaactccaaacaaaagtaaaaatgttcgtagcatctccggtaaagacgaacttcaacggcgtcagcctagttaaatctccggcgttttccgctctttcatgtcgtaaacaacaccgagttcctatatccagacaggttcgagctgtgatcagccgtgaagaaaaagcggtggatcaagaagacggcaaaaaaagtacaaacaaaccactaataaactcttctcaatttccatggcaaagatctaagtatacgggatcgaagactgttactgcggttgtgaaaatcaggaagaagatcaaagagaagctaacagagagatttgagcatcaattagagcttttcatgaaagctattggtcaagggatgttgattcagcttgtcagtgaagaaatcgatcctggtaaattatctaaaattcaagtttccttttttagattttgagaaatcagtttgttactattttgagctagagaacaaagctaaactgatcacttagattttgagttacggttaccaattttgttcgtttcttctttggattttattgtgttagatttagcttttgattcttgctagcattttttgttttcttgaatctttcttgattttttttttttttttttttttgctaccttcaagatgacagctatttactagtacataataattgattagttaaaaggcccatcggccaatcataattctaattctatccttcctttgctatcaatgaccattctgcttgaacaagttggtcattctaaagattgtatatttcattactatattacgaccaaatgataaaccgaatctttcttcttacttgctagatctgaaattaggcatagcttacattacaccaatttttgtacattattattttcttagattgccttgttcatttataaggcagatcatcaaatttatcaacccggttgttctttttcggtagtatcctctcggtaattggcccatagtttttgagtactttgtaacacaattattaaatcaaatgtaaatgcgtagggtcggtataaagttattgagagttttaaataatttagaaagaaaaaaaaagactcttgacttttcatagtttcatcatcccttttcttaatcccacgtcaccgaatgtatttaatgcatatttgttttgcttaccacattttttagttacatgttacgtatagagattagatatgtatatgaatagcttcttgatattttgcagaaactggtaaaggcagaaagagtttagaatctcctgtgatgggactcccaaaggctgtgaaagatccgagatacctcgtattcacagccgatttcactgtcccgattaactttggtaaacctggtgccattcttgtcaccaatcttctttccactgagatttgcttgtcagaaattatcatcgaagattccactgacaccattctcttccctgcaaacacttggattcactctaagaatgataatcctcaagccaggattatctttagaagtcaagtgagatatcttcttctttacgtcattgaagtgtcttaaaatgtgttttgctaacaagtggaaccattgtttcatagccatgcctaccttccgagactccggatgggattaaagaactacgggaaaaggacttggtcagtgtccgtggtgacggaaaaggcgagagaaaacctcatgagagaatttatgactacgatgtttacaacgatttgggagatccacgtaaaacagaacgagttaggccagttctaggtgttccagagacgccttacccaagacgctgcaggaccggccggcctctcgtttcaaaaggtgattgatctctctgtcactcactttgcatagttatggttcatagagagaacattttgtgtagtaatatataagttagtgtgagacatttttgtggttcttgacttggtgaattcattcagatccaccgtgtgagagcagaggaaaggagaaggaagaattttatgttccaagagatgaagttttcgaggaaatcaagagagataccttcagagcagggagatttaaggctctcttccacaatcttgtaccatctattgcagcagcattgtcaaacttagacattcccttcacatgcttctcggatatcgataatttatataaaagcaacattgtcttgggacatactgagccaaaagacactggccttggcggctttatcggcggtttcatgaatgggatcctcaacgttactgaaacactgctaaaatatgacactccagccgttataaaatgtaactttgtctatgagattctctcattcagagtaatatcattttcttaaaccatatacatattttgaatcctcttttatgtgttgttttcaggggacagatttgcgtggctgcgagataatgaattcggacgtcaagctcttgctggtgtcaaccctgtgaacattgagctactaaaggtttgtttcattttaccatttgaatcaaaaatcttctatgaagagtttttgaaacttttgaaatgttttgataggagctgccaattcgaagcaatcttgacccggctctatatggacctcaagaatctgttctcacagaagaaatcatagctcgagaagttgaacattatggaactactatagaaaaggttagctattagtgtacatttttctggttgagataaaatcttctcatcttgttgatcgcgactaatgcaggcgcttgaggagaagagattgtttcttgtggattaccatgacatactcttgccatttgtagagaagataaactctatcaaagaagatccaaggaagacatatgcttcaagaacaatcttcttctattcaaagaatggagccctgcggccattggccatagagctctcgctgcctcctacagccgaatccgagaacaagtttgtttatactcatggacatgacgctactactcactggatttggaaactagccaaagctcatgtctgctcaaatgatgctggtgttcaccaacttgtgaaccactggtaaattaagtcacttccttgctttgtagtctccattgatgttttcaacagtacataatttgtgttttttggcaactatcttaggctaaggactcatgcttccatggagccttacatcattgctactaacagacagttgagtacaatgcatccggtttacaagctacttcatcctcatatgcgctacacgcttgaaatcaatgctcgtgcgcgtaaaagcttaatcaacggaggaggaatcatcgaaagttgcttcactcccggaaaatacgcaatggaacttagctctgcagcgtacaagagcatgtggcgatttgacatggaaggacttcctgctgatcttgttcggaggttaaacatttttgctttgtttataacaaactaacaaactactccgttttaatctctcgctaatgcagtctctggcttcatttacaggggaatggcagaagaggattcatcagccgaatgtggcgtgaggcttgtgattgacgattatccatatgcagcagacggtcttttgatctggaaagccatcaaggacctagtggaatcttatgttaaacacttttactctgattccaagtccataacatctgaccttgagctgcaagcttggtgggatgagatcaagaacaaaggtcattacgacaagaaagacgagccttggtggcctaaactcaacacaacacaagacttgtcccaaatactaaccaacatgatatggatcgcctcgggtcaacacgcagccataaacttcggacagtacccgtttggagggtatgtcccaaaccgacctaccctgttgaggaaacttataccgcaagaaactgatccggactacgaaatgttcatgcgaaaccctcaatacagctttctaggctctctaccgacacagctccaagcaaccaaagtgatggcggtccaagaaacgctctcaacgcattcccctgacgaagagtacttgatcgagctgagagaagtgcaaagacattggttccaagatgaacaagtggttaagtattttaacaagttctcggaagaacttgtgaagatagagaagacgatcaacgagagaaacaaggacaagaaactaaagaacagaacaggtgctgggatgcctccttatgaactacttctccctacttcaccacatggagtcactggccgtggtattcccaacagcatttccatttagatgtatgcacaacagatttgtatcattattatgtcttatatgctggtagagtctctaatatgaggttacttcttttttttttccaatgtatcaatgataatattatgcacaagaaggtttaataatctctcactgaggttgacggccacatggagtcactggctatagatactctaatgttggagcagagcttagttgcaatattttttgaagttgacggcctcatcggtgaggaagccacacagtcgctcagccactttaacaaaaaaaaaaatgttcatttttttaaggttggatgtgtgaatggatcttattagtttatctagctgaaaaaaaccaagtttaatttattggacaaaaaattgtgactagccgaccaacaatgagatcttgtagctggttttaatatatgcgcttcatgttcctagctagtatattactcacacgtttgaataattcacataaacactattttaaaattctaatttttttatttgtatgataaaaaaaaaaaagcagtttagtagaatgcataatagtacaagattgagatctcaggaaataagtttcatatagtttacaacaaaaactatatatcattgatcccatcacacgattaataacgatgcccgtaaaaatatcattgacgaccctcagccatctcataatctatttggtatttggccctttcgtatttgtttatttgaaaatgtttcaatttgaattcctcacaaaaactttaaaatatatataaatttatatagtcactaatttatgatattaatgaaactttaaatcggaccatctaagcatattgtgatgaaacaacaatatacgtctagaaagtaatcaggtggtactggtcttactctattatatatgttcctcatcaatcatcgaccgttaaacttcaaacctaaccccactttgagttgtttaatctaacggcttaaaaccatcgtaaaccagtaattgatgtttataaatttcccctcccaaatcacaccgctaactaaatgccaaatccctcgattcctggatttatttcttcaaattaaaaaattcaattttcagatcaatcggagaaatgaatcataaccgtcgatatcacgagagtcttctgattctgtagatggcgatttcaaatgagatcgaaaccgccattaacgagaccttccataaacgtatcatcaaactctgatggagagtcagcaacaacaatcaccggccgttgaaacgcctttgttgctcaattctaatcaggatcatcaagaccgaccttcgccggaaatcgacggcggcggtggcggcggaggaggagaaggtgttaacgacgatctagaccgaacgctagaatggttagagacgtttttgacgctccttgggtttaatcaatcgtctaaacaaagccttgttctgtcttggatcgtgtttttatcgattggtttggtgcttccggtgacagtgttggagctaggtcattgtttagggtgtgagagatatcagtacaagagtttcgagctcaacatcgttgtttcgcaggcgttgttagctggtgtttctctgctttgcgtttctcataatttgagaaaacatgggattcgaaagtttttgtttgttgatcaacttagtggtcgaatggatcgtctcaaagctcaatacattcaacaaatcttggtgatttattctactttctcttcgtttttgagattgcaatgtgatgatgatacttacttcaaagtttgtatctttcttattgtgttgcagaactctgtaagattgcttgcagtttggtcacttccatgttttgctttgaagggtgttcgtgagatcatcagaatgtattatgtgcctcatgaccagccatggttatctgttgcaattctcttgtctatgatcttgtcgtggacttacttaagcactatctttctagctgcaagtgctatgtttcatttagtatgtaacttgcaagttattcactttgaagattatgcaaagcttttagaaggggagtctgaaatctctcttttcatctatgagcatatgcgtttgcgtcattatctttcgaaaataagccataggttccgcatctttctgcttctacagtttctggttgtcacagctagccagtttactacgctttttcagaccactgcgtatagtgggcgtatcacttatataaacggtggtgattttgcagtaagtcttcttcttattcactgattgttatgttcttatgtggtgagcttaagcttggaacatgatatgttttcaggtctctgcggttgtccaagttgttggaatcattttgtgtctacacgcagcaacaaaaatatcacacagagctcaagcaatagcatcagttgcaagtagatggcatgcgatgatgtcttgctcgtctacagattcaactcagataagggcatctcctagtggagttcatttggaggctaccacgaatccgcccatctcctttccgatttcccgttcagatagtgatgtggaatcaatggatcactacatgaggatgcctgttactaaccagtttccttcttatatgtccatgtcctcatatcacaaacgacaagctttcggtgagatttgtttcgcccttttttacttgtacctttacagctaaactcagatatgatgatagctaattagatgatatgttgcagtgttgtatttgcagatgaatccaggcgggataacgatattcgggtggacagtagacaggcatttgataaacacaatattcttcattgagctctctctagttacttttgtactcggcaagactgtagttttcggtactgaatgaccaaaaaaaaaaagggttggtgtatcatgcattattgcatagcttttttaccttctgccatatagtgagattcttcaattgataggagaagatatacttacatgagcgtctcttaactttttttttttttttttttcccgcgagcctctcttaacttggttacgtgaagagtgtacaaagctatattgtactagatggaggaggagtttcttgatcttgatcctgttgttggactcgtcgtttttgtaaaatccatacttgttcactctcaaaatatgtccgaacatttggattttttataaataatatcatattttatggcaatttgcaaatttataacatatggagtaaattgtaaattatataattaaaaggtattagtatataaatagaaatagaatatttctaaaaatattcttttttagactagaaaatagaaatatacattggagagaaagcaactctattttagagtaagatatagagctatacattggagattgtcttacaaaacaagcactgtcagaaagccatagcactaactggccagcctagcttgtgaacacattaaacctgcaaggattctcagtggcgaaaggaggaaaatcatcttcacaaatcaccacggaccctcaaagtgaataaagaaagcatgaatgatattctgagatacaaatattccaacctccgcttaagcagcagccctcgcctaaaatgtggtaattccaaggtatttgagaatatcaaggttgtattccaactgctatcttcgaccggtgtgctgtacttcagccaaacagaccgccagacccaagttcggtttgcgttaattccttcctacgttgctcttccaaaggatcagggctctttaccattctcctcccacgcctaggcatagaagaaaaagtaagagacagaattaaagtcaaccactgatcgtttcagtttagatagacctcagtacctgtcttgggcatgttgagcaggaaaagtaggcatgaaatctttggattttggcagagggacttcgcggaaccaatcatgctttagagcttcattaacagttattctctgcagaagaagccacagagatccaaaagtcaaggaacaattaaggtgcatactggattaacatgcatgcaacagatatatattttctattaccctttcaggatcgtacgttaggagcttgttcagtaagtcaaacccagcatcggacagaactggtgcaccagtgaacgaagtggctgggaatttcttacgtaataggttatacctaaaagtacaggtaagcggtgagaagagtgacataacaactatgaaaacaatataaatccactaatgagtcagagagccacaccacatcatctaaagctagaaagcctgggaacaatattagagactttaagcatatactaaggttatccttccatataaactgaaaataaaaggaactataaatacttactgatgcttgacaaagttgaccttgactccaggtagtttagagaacccaggccaaatagattcattgggagtaccaaggattctgaaaatctgtaaattaaagaaggagtaatttataagctgtatgtggtcccaggatggctggagatccaaatcaaaaccgatgtttaaaataccttgtcaagttgatcaaactccgttttcccattgaacaatggcgccttcattaatagttctgccatgatacagcccagtgaccacatgtcaatggctgtagaatattgttttgctcccaagagaagttcaggtgccctggaaaaacaaatgcagtcgttgggcttggtcccggaggaagtgattattgctaaaacaagaagggagagtcaacacaaggaacaaaacaagtcaaggaagttgaagcacgtatatttcctaatgtgcccagattacgttggttcatggtacgtggtgtccaagcaaataccgcaaaagtgttaagtatttaatggctaagctggcatattatgaagactattctcaaagaggaaagataaggatccaaggcagtcacaaaactcaagtttgtggtgccattggaacaaatatcagataccttggaacaccatttaaaaacaggactttaaaatcattgatcctaatgtgcagaaatagaaaagggagtacggtgtagtacagctataccagaaaggagacgtggcacctaatgttatactaacaatggccaaaaaaaaacaagaaagtccaccagaattcaaataacaatcgtaaatgtaaacaccacttaatttttttataaacaagaatagggtaaaaacgcactttacctgtaccaaagcgtaacaaccagatgagtataaggcttgagcgggctgccatattgccgagccaaaccaaagtcacatatcttcaactcaccccgattgtttaaaagcaggttagatgttttcaaatctcgatgaagcacccagttgtcgtgaagatacttgacgccctctaaaagttgaagcattaagcacttaacttcactttgactaaaacgctgcttcattgtctccatcaatgctttaagatcatgttccatgtattccatcaccatgaatatgctatcaaggctgctacccacgaccacctctttaacatccactattgatggatgatgaaaagaaaggaggatgttaatttccctaagagaagtcaatggaaaaccttctctttctttttccatcttcaccttcttcaatgccacaatttcgcctgtcttcttatcctttgctctataaacaacaccataagtaccttcatcgatcttatttaacctctcaaattcatcaacacttctacaaccctggagcatgtttatacttctcagtggagtactggcaggttcaggtgtctcatgccgtacatattcgtcatctgaatctgtttcactaaggctgtcaacagagttttctcttctgtgttcctcctcatctatttccatcttgtcactcttaacagcatctctctcctcaaaatcatctctgcttcccggtaaagaatggtgccccctttcatcggaatcagatgatctataaccttccctcactaactccccgacctcaggtgtttgagaggtattgcgaaatctcccctgcacgggaaatggtttcttcctccttttcttttccccaacttcttctactatttcaacttcatcagttggagaactattaccagcagcccacctagaggatgatatatgccgtgttggcatgttttcatcctcttccaggtgtgttgcatgctcttgtttgtcatcctgctcagcatttgatgactgttctaccacacacaaagaggacatctctaccgaaggtgacaaagcaggcatagaaaccgcagaaacaccaacttccacaggatcttgatgcatgtcactctttgcaggtgaataatgagaattaccaccacaactgacactaggtgactggcttgacctcttaactagtggtggtgggggaggaagaggagtgacctccacaggtttttcatttctgctcaaattacttctctcatggtcatccctatcccatactattggtgaaaactttctcttcttttccacaggactttgagctctattctctacctccttcacaactccattaactttcgccagtgattccgactcaatcaaatcatccgacccactctcactagagagctcgcctggttccctgtccacagacctagctgaaaacccgcatcttttaggaccaagatcgataaatacttctctactacctggattgctcttcgataaccgaaacccactactaaccattttgttctcttcctgtctagctccagacttaattctatctctatccccgtgtcttagattactaacccgtccctttccattatcaatagcaccgttcctaacatgattataatcctcgttcgcataagcactatcccgcctggaaaatctagaattcgattcctggtctctcagttcatggtctggatatcttatattcctcccagccgccatacagaacttcggtgagaaagggacccaaacaaacccaaaatcctaatttgacgaactcttaaatctgctactagctagctgtgttcaaaatcagaattgcagagactaaaccttgagatttcaaaagttgaattacgcaccgatttaacagctacttgcgatcaaatcgcttacaattgaagcagaacttgtgatcagaaccgcgaaaccctagaaaccgaaagcgagacccgtggatacggaggaagagaggacgaaacgagaagagaactcagaattggaaagtgaaaatacgattgataaggagttcgtaaagttccgattgacgacgggtggatatagattaccgtggagagggaacgaacaatggcggagagagagagagagaagaaagtttctcgtcgaaagctcaaagctttaggtctctaaaatcgtgtttttgtattcgccccctctattttattgttttagtataaggagccccttgatgaaaaaaaaaaaggtataaggagcccctaacttttgtaattaatcaatgtgtttctttttatttttatctctaaaatattttaaaacttctacgacaatattattgaaaccaaaaatatatttatttatttaaatttaacatgttatggtcttgagttttttttttggtaggctgttattgtttgagtttttatcgtgagattttaccatcaaattggcaaaacaattttattttcgtgggatagtcacacgactcacacccaaaattaatcgaattattgtcatcttaaccacaaagactattatcttgaaagtcgatgttggagcacttggaacataagaacaatctcattgatgatttctaaacataagtcttttattttaaagaaagaaaatttattataaaagaatgtgtgggctttttgattagtgaaaaagtcatctctaaaataccttatataggaaattttggagagaatttcttaactattcaagaaactcacatagttagataatattatttttgttgttttaatgttaagaaacttatatctagaaaccacaaataaaattgctctaagacatgaaaaccttaatattaccatcaaatcatttaaatcaaaaaacatatgttaatttttggagtcatgttaactttgataattatgtacctaatattgccgaaggccagtcaaaactaaaatgtctaatttcaatgtccgaaaaaatgattgtcacggtttgtggctgcataatgtttaggggaccacataaaccgttttagaacattatgaatattcataatctctcaatcacgaactaatcatttctcttcttgtttgtgttcatgactagcttggtcgaaacatatgagtcatctttcattctagacttcaatttttttgctctttacaaaatttgacaatcaaaatcactatcaagtactagtactattccatcatatctgagattatctttatttgatttgtgtggatgtcgtaatccgcaattagaattttgtggttgtttcgtgaaggtcttaaatcttgttagacgaacagtgatcaagtgaaaagtatttatgtatttcagtatagtttcagtacaatgtgtatccccttttacaatgtcaattgactcttatttatacaaatacatcgaatcaaacgagttaaatgattcgctgacttcacgccgcggatctcgcctcattaacttcgcacgttacgagtcgtcagctcggatcgtaaatgcttatcatttaagttgagattcctccgttaccaaattaatgtcggatcaacctttgaactgctgggcttacattgtgccttaaagccgggcctgaccttatcttagaagcccaaaattgcggggtcgggccaaatgcgagatcagacatctggtaaaaagcccaaaacttttgctttaccggtcacatcaaagattatgagtttccccaaatgtgtttgtgtcaattaaaaggttagcgacatagttttaagtgaagttagcaattaaagtgcggatagttggccactcgtgggaccttgattaactttgagagttcttggctcaatttcttttatctacttccccaaacaaaacttttttttttttttttgcgttagttattgaatatcactaaatccatacgattacattctaatgaaaatagacaattattgacaccaacaacgagagggaagcttaaaggagaaagaaaaagaagaaggcaagtgaccactcctccttatataatcagctttctccgatgtcttcaccgccttttcgtttaacttagcctccgcattcgccctcctctcttccgctatccttttcgtcgcagctagcttgttggccaacttctcctctgcccttgctttcatcctctccgccttcacctaaacacacgttcacacattgttttaaaaccttttcaatccataacgttatttttctctttaacaattaatagatccaatccatatcaaaccaatccacactactttgtcttttaaaaaactaaaaaaagactgaaccgaaattcggattgaacacgtgttgacaactctctttccacaattagacagaacatcttacctccattttcttcatctccatctcagcctttctcttctcgtgattctcccaagcttgtatcttcacttcctctctcttatacctaattccacacaaaaaaaaaaaactctcaaacacgaatcacattaacacatattaaaatcaaccataaatttaaccaattaacgttaatcacctagccatgaatttagcacgttctgcttcatcccaagccatggctcgagcttccatagcactcatagccttcttactctccacaaaaccattaaccttctcactattattactctctaccctcctaacctccgtcaccgtctccatcacaacccccaccgcctcaccacgttgtgaagccctcaccggtgaagtcacaggactcctcccaaccggtgtagtagctcgcaccggtgtagctgttctagaaggctcttgactaccaataggagtcatctcagtccccatatctctcacacaaacggatctaatcacagccgttggattaatactactttctttcctccaaacagattcaccacaatcaacattcttcgtctcaacctccggtcttcccgccgccatctcttcatcatcatactcaacgtactgatcttctccttcacgttctctctgtgaagctgaagctataagtctaagatcatccgcgttcgagtttctcggcttattacttcttgagtgatgactactcttgtcaccacctccaccacctccacgagcaaaccctacaccagaaagccatttctgagcatcgtcccattttgacggcgctggcttccccatagtagaccggtgatggtttggtgtccggttcgaacctttctgaaactcaaaaccgttcgatatctccggtgtcgctggtcctatccatcctttgttatcttctacactagatctcattcttacgaataaaatgacacagagatctattagaaggtttttatctatatggatagatagagaaatgacttagaaggataaaaataaaagatgtggcgaagcaatcaaagagtcgtcactctcataggaacccacttgatgatgaagttgagagatttcagaaatgtgacattaatgtccagatgggttgttgtagagacgagaatgatagtgtctttataactctctaattatcactatgtttttttctatctaaatagcataaattgatatagacccactattttttgtttttttactttaaattaatgtttttattagaatgctcagatctggtttgtgttaaaagcttagattaatcatgtgtacgtggggagaaagtgactaagtaatcaccattaaagtaaagcgatgataataatgcaaatgcaatgggaacaatcacaaaacaattagggggaatcttggaagaagtaaagagtttggggaaaaggttaataatgtagttcccgagagagtggtattttttaagatacgactactacagttgtactttttaacggtaactttagattagatttttttgtttagctgaaggtggttttgttgttgagattataacacgtgtacggttaaagatcttggaatgagtggcgagagatgggttttgtcggtccgggttagggtaaaagcgggtccgggtttgactgacaaggtcacgtggtctttgacaggtctccctattgcttttggtttcttatggattcaatatttatgtacttctttttactcgcattttctatttatgtttaaagtttctaatttaaaaaaaaagggtataattgcctttggatgttaatatgttatggattaatgtacaaaaaattaaaaaataaatgtgaataatgtcatgtcaaaaaaatgtgaataatgtccacattatttgaaaacgaacagtgtagtagagaaaacagttttcgattgatccgggtacttaatcatcttgtcgataaagacataatgtatgtagatcttagcacataggaaaattttaataaacatggtacatgttttattttctttgtcttttttttttcattaccacaaaatgtattagtcaagtaaacaatattgtagtagtctttggatgtacgacaagattgtacatctactctctttcggatagtatatatttcgggtgaaaaatattatgtcaaacaaaaagttgagatgtgttgttatgagtctcacatgataaattgagaaatattgttgttcttttatatgggatagatgatgatagtgaaaattttgagtcgcaattaacgactataaatccatctttcagaattgtaaaaaaaggtcatatgtttaccgatttggctgtggccaaatatggtcacgacgttaaccaaataaattcagtggccaaaaccattttggtggccaatcgataatcattttagtagccatgaaaaatatcttgctaatcagtggctaaattccaattcttttgtagtttgaaaattgatggttgtatacatgagtaatcatacatataatgtttaagaatgattatgacgacaagaaggagatgatagaatgtgaagatcaaaggtaactttcggttaaataaatataatgcatgattctccatcagaggtactaaaccagctctaatgacattggttatcttgaacctatttgtccaatgaatctatctgttgtatgaaagttaaggctaagtgtttctcctaataatatcacacattagaggaattttatcagctagcttgtgccagaggaaacagaacttaatgctaatatatatgtgtttaatgagccaaaagaaataaagcaaatcaacattagctctataagcaaaactttgtagtcatggaatttaagaggaaatgagatgatgagttttaaagtattgatgctcctgagtgctgaatctaaacagatcatgttcgttgtagttcaatgcacaagctcccattttaccactttacagatctgtgtaatgacgtttcaagtttcctttactagagcaaacctaactaaaatatattgtcaatgacaagaacagagcagcaaaaaaaacagagaaattaagctcaatttccaaattctatttgcatgtcatggctatctttaaactacctagcagcgccttgacacacaatggagcagaaaaggcgagattttgctgttcccagcttaagctacttggctaacaagatgactaagtacccaacaactgctgtagatattccaagcattccaccagcaataacctgacgccaccaaaatatagatagtctcaagtactaaccacaatcattctcttgcttggtgtgatctgacacaattagtactacatacttacctggggaggagtatgacctagaagttcacgcaaaggtctggtttcagccagaggatgctctgcaggaagttcatacacaatctgatttagaacctcagcttggcgtccagcatgtaaccttacaccagttgcatcatacataacctaccaaaccaaacaatcttaaattcttaatcatcccctgaagtgatataatcaagaaaggtcattaattaattaagtgattagctaaaaacatacaatggtagtgagaaccaaagcgatagcgaaatgtgaaccaccaaaaccttcttgtaaaccaacagctaaagctaaagctgtaaccgttgctgaatgtgatgaaggcatacctccagacccaacaagccgtttcaaatcccatctcctttctttatacctacaccaagtagttgtaaaatcaaatttctacaactagtctgtttctttaacctagacagatatgaaaacgtaccaggaggtgaagaatttgatgaattgtgcgatggtgaaagctaaaacggcggaaatcagagggtaatttgtgaaaattgagatatagtgcgaggaagatgaagccaccgattcctccattgaatgatggtgatcgattgatctcgtatcgtagggctttaatcgtctgatagctcttctacaggataaagaacatacagagaagacataaagttgcgtgtagaaatctttaccttgagactcctctaatggcttcttcttcctcaaattttattttcctagttttctcgctttttcttcggcaacaaacaacagcttttatttaatgttttttactaacaagtctacacgacctaagtacagatgagattattacttttttttatcaccgtttatattataatgacaaaacagctacatatcaataaagaattgacatctgaaaaattgcatattatctgaaattatataatagaaatattattttataaactctgttgatatgttagaagtttttgcgatattaatatacgtatagagctttttattgtttaaagtttttatccagaaagaaagtttaaattctgctagttggttcaaaaatgcacattcacaaaaatatagcatgcgatattagaatactgaatacactatcaatctatgattgatcagattatcagaatatgcttctgagcttctctgtttgctagagaatatgctttttaggctttaagtgaaaaacaacttgttctttaagccggcgtggacgtaaaattccaagagaatatccaaaatatgttctacaattgaagtatttaacaacatgagtttacatatatatagactctacactagggcttaactactgactagttacaattatagccttagcctatacttctcttttgcaagtctttggctttgttttggtgagtttcgactgtttactgctttgcaggtttatgaagcctctgggaggcagcagtgttcatctcaggttctgaacacacaccagagtgagcaagtgacggttcgcttgtaattgagtaggaaatcagtcgatattcttttgagtcactcgggttagaagtaggtttttgtgaaggataactcttggtattttggtatattcttcctgtaatatgttattatctatttcaagtttttctagtttatgatgcttttgtatgttaacattgtgtattttgtgttttgggaccaggaaatgatctgtttcgaaacagagcatttaacagacaaaagaaacacaactgtgaacagtttaaatacttgacttgttgatataatcctgattaggtgacttggcatattggttcaacttctacctccaactatatataatagccagcttcgaaaatccagtgagttttggaaagcaaaaacagctcataatttcgccctcgagaaaaggcaccagctttggatttcgaaggttaagagcttgtctagaaaatcactgccccgggttatttgtgattttaggtgttatttgtgattgaaagacagcatcatccagcaatgggaaccccatttgggagaagcaagtagaggatacacaacatattcagccactaaagagaaaaatctaacatggtggcatttttgaaagcaaacatcataagtttattcagaagcataaatgaaacaaagggcaactaaagagaaacagaaagaaaatattaactggcatggagaaaccatcgagcatccataagagacatgtcgtcaggaacaggaaagcgtttgagggtcttggttacaagattgaagacacagatgtcaaggtcacgaggtgacaattggcagggacggtagtgacgggtgaaatagatggagtctggttcgataccaagggtatcattagcaggcatagtgaaacccaagtcaagaagcagggcctcaccaccaagagaatcaacctcaagaacagtgtggcaggcgtaatctgggagttctacattaggatcatacttgtagacgcggaagcagtccctctgccatggattactctcaaccaacaaaacctctccagaggttgtaacagcaatgctagaatcccacgagtgataacgagaaagcattgagaatggtttattaccctcggtgatgtccttgaagaaaccttgcggtccagacagatctaggactttaacaaaacgacgacttgtcgagatataaagagagtaacgccccagtaccatataagataagccatccaaaaagtgggcgtctcggaaaaacagaggaatgtcagtgtaatgagtgtcccctttcttgcaaaagcttatataagagtggccagggaggtcgaagaaccacaccacaacgtaatctgttccactctcgtctacccacaaaaggcccctcacagtatcacaagtcagatcagtggcaacacgggcactatattccgggccattatattccctttcaaatactctatctcccacacgcctgaccttactagtatctgacgcaatcgactctagagacggaagaggggatcgttttctcgctaaagacatctatgataactaaattggatccagaatctaacaacaataaccagtaacccgagtttgccaggattcgagaccctggaaagtctcgcagttccctatggatcttctttccttcttttgggttgtacagcacacaaccaccgtctttcggtaaaagcatcagccatggagatccgcctttctggggtaacgtttccgacgagctacagggtcgtttgactgaagaagaagatacattcattatcaggcgcaagggttctcgcgtttgtggcctgagattgagggaggcgtgtcaccttctgtctgtagaagatactaaaactgggaagaaagattgtttcttttgatattgatccgttctcttcttaacgattacatgaggcatagctccttatttatactaaagttaagcccttgtaaaaccctagttaacattacacatgtcatcatctagttaccataaatctattctttgttcattgtacctcttttgcttgtgacaatcttcctcttttgcttgtgtaataggctaagggtattaaatttaatgtttatttttgtataagagaataattaaagcgttttttaatcaaaaaaattaaacacctaaagccgcatcaccagcgttgaccaacgttccggtcaatcgaattcggtattagggtttaaacccaaccgtcccccatttctccaccgcgcttagctaatgttgacgactcttcgatctcgttgttcgtctcttcttctaaatcaatcatggaagctagctcccaatcgcatcttcgcttcctctccctctttttcttcatccgccgggatctctaatgtctcagagattctcacacttcccgaagtggagaagattctcgccgacgtgaaagctgataacgtgactgtgattcctacacataatcattgtttctgggctgatttcactgtcatcgccaccggtagatccgattggcacttaagaaacatcgctcaagctttagtttatagggtacatacacatttcaccttccactttttcaattccttcgttgctattgttcaattgttgatataaggatggataatgagtacgtgttttgtgttaagagtgaatttgaagactaagatgataagagtgatcattgttttcttatattctttgtgttcaatcacaggccaagcaaaagcagaaaggagctaaacatgtaatgttaccttctgtgcaagggtacaatagcaagtggattgtcatagactacggttcgtttttgtatctacaagtcttggtttttcatttttgatttgtggtggctgtaattagctcttatggatacgtgtaggaaagtttgtagtccatgcacttgatgagaaagccagaggttatttcaatttggaaagcctttggtctgctgaatcctctggtactgatacttcagatcaggtaaacaattgaacgccttacatatagattttgtatggctgataagtggttactgctaatttcgtgaataaaagctgaaacttttagcttggggttatgtctataatggagataagagatttgattatgtcatgagcattcgacaaggactgtctctcgagtatttgattgaacctagccagttattaaatgtcatatctgatgcttctcttgctactacagaatctcttttagtattgatttacatttatctcctgatctcttgaagctctttacattcttctgtttcttttgtctacctttctcatcgattcattgagaaaacaattcagtagcctaggttaatgtctttattgattccaaagacacctttttgttcttgcaggatctccaaaacgtttttgtaaaggtccgaccaaagaacaattcgaaaaggaaaccggctaaagtgagttcttgatcctgtccgatggatacaatttctcataaacttctcgagtctagacgagttaagaataggaggattttaaagcctattaagtatttatctccttaatatttttttttttggtaagttttatctccttaatatttgtagtcatctatctattttttccttaatatctttgcttaaaaaaaataaaaaatttagtcatctatctattttttttttcttttttaaatatggaaaaggattaatctgtctctcctcctcaaaaaaaggaaacgaatttatccctcttaatataaataatcaaattggcaaacttgggaacagacactcttgaatctctctcaacatggtggtatccttgtctttgcatgcgtcttcttctattaggaaatcgaaaacaaaagcaagcttatgtctcgattctttaccagaagatcttctcgtggagatttcttcatgtaccggagcttcttccttgtcagcggttcgtaatctcagactagtttcgaaatcgtttcgacgtatctgtgatgaaaagtatgttttctaccgactatccctcaaagaaatcgaatttctcccatggcatgagaacagtgcaaaattcatcgagagatgtaccgagagtagaaaccccgaagcgttgtttcagaaaggattcattaactattttcgagataaacttcaagaccgaggactcgaatatttagctgaagctgcggaaaaaggtatcaaagaagcaaaatatgtctacggggtgattctaatctgtcttggaggcaaaacaaaacaaaagggtttcgagatcttgtcttctgttataaagcagttgatgtcaactacaatgaatgagttggtggaatttcgatacaagattcaaaagattagatacggtttttggtggtctgacaacacggtggtggaacaactcaaaacagcctacgttagtgagaagtgcaagtgcgattgtaaaaccaggatgttattattagtaatgaatcgtggttggtatttattcggtgatgaaaccgacttggatttttcttctgcttgtgagttatatctggtgcatcatgaagttgaacttttcttgagatgatttagtgatcaatgatgtattaaactaaattataactaataaagagtgatttttggttttactttcggatacatttatacgaggaagagtacaatggccaatactctactgcttcttattgcatgaacctaatactaaatataaatcgtaatacatagcttcttttggttataatctcaaccactactctagattgtattctgaaatagtacataaaccgaaattttccttttgaggccaaaaaatctaaaattgatggggagatatactgggcctgtgaatttgaaccgaaccgatttgtccgaaccgaaccgaaccgaggtttggacaaatcggttcggttaaggttaattgagtataaccgatcggtaagtgtttaaaatcatttcggttaaccgagattttcggttcggttcatgagaaccgaacggttaaccgaaaataataaaaccctaacctaacctagattactagccgcctactcttcttctttgtcttttttttttttgattcaccgggagacggaagctcccggaatattattaaaaaagaaaaaagaaaaaaaaacaaagcttacaaccggactcgtcttggtcgcgttgacccaagactatcctcatgcaaaatcacctctaaatcatccggaacatcaataagagaatgaaaacctaaaggtaaagaaaatgcatagttagctagaccgtcggctagacgattagcctccctatacacgtgagttattcggacaatccagtccttcgataataagccatggcacaaccgcaccaggaacgacagcggatgttgatcaccgatccctgtcttgagaaaaccaactaccaactccgaatcaacttcgagctccacacgagtcaacgccttagtccaagctaggtaaaatccataataaaccccccacagctccgctaaaggcgctgagcatctcccgatattaagcgcaaagcctccacaccaatttccagctccatcccgtatcacaccacccgccgtcgctaaccccgggtttccacgagaagcactcttcttctttgtctgataatgcccgttccttattctttttcttctattcttcttcttcaattcttcttcttcttcttctaaatgactaatatcattcttcttcttcgattcttcttcttcttcaatccttcttcttcttcgatcattcttcttcttcgatccttcttcttcttcttcttttctgagttggattcgtcatctgaatgctttcaaattgatggttggatttgatttgctttagtttcttcttgctttttctttgtggttttggattccgttgatgatgcccttcttcttcactgttgatttggatttcaatctagaaatgaaggcttttcaccatttttcacaagtttttttcctttttttttttaacacccagacaaaccgaaaaaccgaatgccaaaaaccgaataaaccgtgtccgaaccgaaccgaaccgaatcattagtcggttctattcggaatagatttcaatttccgaataacccgagaaaccgaaaaaccgaaaccgaataacccgatcggacaaaagtcgcaggcctaagatatactatacatctgaatattacatttgcatctaaccgtagcatgaaaagtgagaggaaccaaaggcttctattatatatggaattagcagagttgggcaaacgttgcaggttctgtttttaaatagagatgatggaagcgtgcatcgattctggaccgcctttgtaggtaagctcaacgaaagtacctgcaccttctcctttcgcaagtcttcccgggtttacacaaacgcacttggctgcatcctcctcttcgccaagggataaaatcttcataacaattcaagaaaaaattcagtaattcttcttttagagtctaacttctgaatttgatggcactattaacatactgactcaccttcacgaagtacctcatgtctgatggaagtagaagaatatccgggattgatgaaatctgtagcgccttaggagcgagtgaggaatcataagggaggctctcgggcggtggatacagcggatagaagctgtttcataagaatccaatttctgagtatttggtagctgagaatctagttggatctagtagacgcaaaagttaccttcgctgacggaggagatggctagcgagtctggacatgcgatcagtggggactccacttggattttttgacatctcctccccactcagctgttttagtacatccaccgtgcagcaacttaccttcacctgagaatacccagttaacattttatgttgcaaggacttgagagaatatggcttctcagaagagaactgtcacagtgattttctaacctggtttgcctcaaaggtccccgggtttgacagactagtcatctgtaatgtatgatgagacagagacatgaaaaaagtaaatatatatccacctgtgcacagagagagttgagtgaaggaagggagacttgttaatgagaagaatcaaatacctgatgttcgagatcaggtatgtgaatgtcgaaaggaggctgcaaacacaacaagaaacttttcgaatcaaacagagaagacgaatgcggaaactctagaagagagatattaagaggaaatagaaaagagcacctgtgggaatatgaaatcatggttagcatcacgaatggatggcaccagaaccactcttacttctgaacccatgaattccacgtaatcttgcaactgagaaactcaaaaaccataaacatctttgtttattccaaagtcagtcagtattcagtatatctatttgtcctattttcagtaccttcctgaggacttccacttggaatatctcattaaaggtggcatcaacagcgcctttcttaatctctggatgctcagaatccacaaatggtccaagctgagtttggaaataaaacgtaagtgatcccgagacacaatcacacaagagacaaatatctacagaatgtgtgaatgcattctagttactcaccagcacgagtaactgtggtggctttctttttgcataggctagtagctcattcagtggctcaaacagcaagttgtctgatgtggtgaatggtccggatgcaattatctgtcaacagaaagacctttaaacatcattttgaatcccaaactagaaaattatgatgctaactgattctaaacacaccatccttgtgcttggtaatgacaacttaatagctatgcataaaaacagaacatatccatacattcatctcaaatatcatcataaaagaaaaggggaacacagcatacaaattttgtttggcattatcgaagtcagtaactaaagtagctccactccaagttaccaatctagctaagtaaaacagctttgtaatctctaaattctcaacattctgcagttatctcatctcaacattatgattatgtgtgtataaatgtacgagaaagaagtgtgccagaatcatataaaataatcaatgggttccttgacgatataggtaaaaaaatactagtacagctcccttgacatgaaggagtgcatacttacaaatgaaacctctgatttttgacaggattcttctgcaggaactaagacttcctgatccaagatttgcctcttagcaggaggtagatccacgtcaacagtaagtgttaaaggaactgaatctagcagcttagatgcagtgagataatgtccactaggattttgcccctcaatgccaactacctgcatcaaattcagacaacttccacatgaatattatgagtgttctgtggaaaaaacacaatatctaatgttgttagctttaagctatcacctggccaggaaaaatggagaactgatctagtctctttaagtccactggaacacgctgtcctgaagtacgctcggcactgcaatcatcgaatttgttggcattaggataaggaaactctggatatttggaactgaggcttcatgtttaaaagaaagttatgccaataactaactataaatggctataccctataggaccacaatgtaagtcattctagtatccaaattgttgaatatgcaactttttataacacaggattcataatccttcacgatgatatacaaagaaaagtgaagtcatgatggactaacctgctctgcaatagaatggacttatcattcaaatgcccctctccatcacagcaaatcattcccacagcaaatatacttctctgcagcaatcagtagcacaatgtaataaattctataccccaatgttaatttatttgacaccaaagtagtatgtatgaacaaacctacctgtgaagcaacagccggatccacctgttcctcatataatcccgaggcagcaaatgcatctgcatgccttacgatccgatactcgagtgcactaaacctgtcctcagttctgtcatacatgaacctgcaacctggttcagggcctgagccattgacttttagagaacaccgctggctggtttgaactctcttaatgatatcatcctcactgttttctacatcattgttgtttccattctctgcatgtgccgccacattacccacattgaacttcaccacaaacttctcgattcgtgacccaaaaggtgtcacatgtccaactgacttcccagtagaatagccataatctcttgatctacttatcgaatcaaacggatccggatgtaaccgttgagacttgtttgtaggagtagtaacaatctcttccgtatcttcttgcaccccatccaaaagcctgaaccaaaaaaccaaatctctatatcttcaaaaacaaaatctgtttaaagctaatgcaaagtaagaagaaacatggtcaaaaagcacttacatatctacatctctatttgagtaaagatgcagaccagcttcttccactctcataatagattctttctgttcattctgaagatgcaatacaaacccatccatgtcatctttcttaacagtttgatcaagaagttgtctgttgcatcaaaccaaacacaatggaaaaaacaaacaaactcaattctcttcgccatcactaacacaaccactctaatcatgaaattggtcactatttaaacatcaatacaatctcaagaggtaacaaaagctttgaattttactattgggcaatggaaaataagaaaaatgtgatttttaccgattgagatgataaagttcccaacttgaaacaagatcagaaggcttaagactgtaatttatgcagagagtaacacctgtaagaaaaaaacagtcagatataaacaaaagttaaaagatctgggcagagagatattagattaggggatagtgtctcgcttacatctcttaagaatctcgtcttcttccacaagaataaagccgcttcttttaaactcgttctttatttcctcatctgtagccattttctttcaacttcactctctcgctctctctgtgtttcctagagagagaagctttttgttgtgggcgactggtgaagacgaaggcaagtggcgggaaattgtctggtttagggcgggatgttggctaatgcccttttctctaaccttcttatttaatggacccgagttttaaatgggccttaaattttgaacaaaaacaaatgggccttgaatacgttaaacgttaaatgagtgaaaggtgaaaacagttcaacagaaactgaaacggttgactaattccgttgactttttgcaacacggaaaatagttcatgtagggaatttgaataaatattttggtcagactgaatttggctagattatcaaatttggagtatgaaaaacacatgtatataataaaataggctatttaccttattgcttagctccgaaaccaacattataaattatcacacaaatttgtagggaattaaagaatttggtttttggattttgtaagcaaattgccaaaatctatctaaatccagattttctagatttgttttttttttaaactatttttattattttagaaaatctacttttattacaattgtgaatgggcaataaattagattttggtaaataaaaaaactaaaatatttttacctattttctactaaatattttcccatgattttccttctaatttcctacaaaatttcttatacaaatgtaatcttaggaaaattgaaggaagtcgtccttaccattttcgtaccaattatttttccatgactttctttccaatttcctacgagatttcctacgacaatacatttcgtaggattttggtagaaaattttgtacgaaattttgacgactattttcatagtaatctcacagaaatttggtaagaaatatcttctactaaaattttggtaggaaatttggtaggaaaaacctatgttttcttgtagtcctacactagaaaaaatggaaccttacgaacactagggaaagtatttgatgataaaggcaagcttgtctgtttgtttaagcatcgaaaagacggagaagaagacgcaaaataaaaagcagctgtctatttgttggaccaccctatttcctcacatcgttccacttcttcggatctcattggttttggtggtgctacaccaactgtttttaaccgaacaaaggaaggttgtttggtttcttatgttgagaatgatggtgttgttggtgacttcatcactcaattccaattcaggactctccctcaagaaatccacaagctcgacattttccatattcgctttggaagtacggattgtcatgattggaacacaatatccctgatagatgcggaagggatacaccgtttgaatttcatagataatgaaaagtgcttcaataccgaagtaagtttgatttttttttatgttttagtctctatttatgtcacactaatgtcgttaacaatatcttcttctttgtgtagtataattttcgtacaaaaagattaagtcaaaacaatctttcactaacaaaatggtgaactatgtgaatgggctcgacgtggaaggtgatatcttatttttgaaagcatgtggatgggatgttccaagagagattacggtccctttcatgatttatacttattttttgaaaaaagcggttcaacatcacctcactatctacgatatggccgttattgccctgaatcatcgcaaaccccctaaattcaacctttgcaagatggtcttggaagataatgcggagaattcccaagaagatgaactttttttacgaaagacttatgagaagatagattcacggctagaggagtacccgcggttgttctttaagaagaatagatggtaaatgattggttaggtagttataaagacaataatggtgtagaaataaatcatgtcatgtcttttaggtgttcttgaatctctgtgtcagtcatttcctaatgagcacccttagattccaaatacagcttttggcctgattagtacgtaactactgatttgcggataaataaaaaagtattagtaactccatcttttgtccattttatttttgaagaaagatctttaatttgagcattggcaaagaagttccacttttgtcttgccacaacaaaattcttctcgttctttgtttcaggaggcatattcatatgagacatttgaaccgattctaaataaggctgtattatcgagttttatgaaaacatttttttgtaaaaactttaggaccggtgtccgtatttgacagacgagagaaaactcgtttataaacaaaaacaagtctcgacaaatcctatttataaaccttcaaaccccaaattaagtcatgtatattaacacaatcattctatttatataaaaagaccgcgggtatctttttctgtaaatgattttgactttagttcccacaccgcaaaacaatatggttcatagttccaactacacaatcttcttaccttccaagattccacttcttgaaaacaagatcattgctctaatcaaaccctgataatagagtctaaactataaagcagcaagtgttctaaactagtagtgaactaatgaaatttctggatatggttgtaatcaatcgcctgaaatagagagtagaaagcatcaaagtggtctaaactagtagtgaactatgcatttctttttagcaaaaaacaggttgttggaattgagaatcctagattaaatcatacaagaagaaaagcttcatgagaagaagaagatgtagaacagaggaagaagcatcggaggaagaagacgatgtcggagaagaagtcgtgaacaaggtcaacgacataagcaaagtcaacaacataaaggagttgggctttgttgttttgtaataagtaattgggctaattgttttgttaggcccaaatgagtagaagtattgtgttgtgttgttagtttaagatagagtctatgttgtgtaagagtgaattaaggagttggaagttccaacatagtagagtggctgatgtaagtcttaggacaatgatgtggtctagagtctaagtgtgtgtagtgtagcaagtggagcaaaaccactatatgtatgtgtgtctttatgttgtataatattatccaagccaatacaatgtagtcttaaaagtaaatgcgttcttgttctttctctctagaacaagtaaaccaaaaacagagtaaaagatagagagaaagtgagaatcacaacacaggtgttcatagttccaactacaaaatcttatcttccaagtaaacaagatcatggctattttctctaattgcttaggttcgaaaccaacattataaaatatttttgagaacttaaactcggatgcgtagcagttagcactacgttttaattggccgaaccactatgtttgagtatttaaccaaattttcactacacacttacacataattaagacgtaagaagctcttaaaaattaaaattatgaacataaactacctaaagatcaggtgtgagtaggcttgatccaataaacattaaaatccctaataatatgtttgactccttagaatagagttttcgtagatgtatgagatttttaatatggttaatagacataattagtgggtgctcgaactgattttaaagatgatatatattttggataatacattatatcaaattttataaaaaaaaatacaaacctttagaattgaccattaattattggccactgaacaaatggcgaaatgaaagtatatatgagacacatgaccagttgtgtttcgaaaatgaaattgtcaaaacaacattggattgatggaaacaaagggttcgaaaaataaagtggtcttcaagagaagaattcgtagtttttggctgagataataatggttctgaggccaccaatgggagctaggatcgtcaatataacaccaactactatgcaaaactgcaattacagaaccaaacaacttgttattgtcaaatatatagggtagaaataaaaacacatatttagtagaagaagatgatgagtaaaagaaaatatacccaattaatacaccaagacaatccatacttctttggtttcttgatacaaagccacatgatgcatggtagctaaacatagtacaatacaaaaggtagatcaagttgagttactagaattttcaaacaaatgaataggcttaattagtgtattgaattacttacatagtaagttgttggggcaaaggcgaatcctccgaaaaacccgagcaatccaccaaaaaatgggatgcatatggcaacgaacatcgtgaaagctgttccattgatccaatgttataaattcatatgttactatctaggagaattgatttaatatgaataagaacttaccaacatatagagtacgagtgatgaagcggagtttgaaggaaggagcgaacatcatcttctttaccaaaaaggtttcgagcatgtcaaagaccggcattgcgtatatttggtagcttccaatgacatggacaaccacgaatgcgttagcaatggcgataagccagatgggtttctccaacgtcatgagaatattgtcgtccacactgtttccaaagatatagtagcaaacaaatgcaacgggaaagtagcatatggcaacaacgatgtatgcaactactactcctttccacattgcaatctttgatggtttctcaggtgttgaaggaatagtagcttgtatctccaacacaacgttgtgacctgcatacgcaaatgccacatctcctagtgcattcaagaagttgaatacatttcctgaggttgtagatgctctagacgagtagtctacatttggatgaactcctttcttcaccgaggttgcccaagcgattgtcgagtagctgcatatattacaatcacattaataaatctcaaatagaccattttttaaaaaaagaacaacaggctatattgattttgagttgtacttacctcaaagacataacggcagcagcaagggagacgatagatatggagttaaaattagggagatgagcaagaacaaagtgtatggaagcgaagatcatgatccaatatgtagttcttatatttttgcaatcggtgcaaagaaggtcatgaatttttttcaatgacttccctcccgtaaccatgtacacaatatccacacctacttcaacgattagttgttgtggcaccacgatccatagtccgagcttctccccaaacgcgtgttggcctaattcgtggtacctgtcgaacctcttccctggaaccatctcgtgcatttgcaccatctgccatagtgtgtagaatgttatcagccatgacattatcattattgtcactccaggtcccctgccatcaaaattgagtgtaatattaatattgaacgtgtatatagagattttctaatgagatatttatatatgtagctagattggatatataccatccaagattagacatggcgtaaggtaagctgagtacaccagccccgaccatggcggtgacattgtgaaacgcagagtaccaccacttggcatttctagaggatgttatcggtaaccaatcgtctacattcttctgctttgtggacgcgtccttggttggagacgattgacttttctccatcttattttggctttgaagaacagaaaaaaatgtgggacacaattagatgatgagaaccaaaaggattcaagagcaaggcaatttctttcctgaggattgaaatgtgccttgtgacaatgattattgcaaagagttctcaatttatatatacaatttcatttcactatttttttttccttttatatttttagtgaatttcaaaaaaaggaatttattggttgttgctttatgacagattagtttcacgctctgtttcacaagatagccatgatcgttgttggaattgttgcggtgtatgatctctaattacttataccacatggcttttttgatatttttggctgatgattatggtataagtcattagtcaatgctcttttgcctaacgtgaaaagtgttttgcatgctattaatgaccaaaatagtcatttcttgattttattttgattcatctattgatctgtttctagtataactgactacccgttatatcaaaagttaatttaggggagaatatagttactgcaggtttacaacccacaccttcctcttttaatgagaaaaaaaaacaaatcttaaaccaaattacttttctttatttatatttttgtataatattttatcttattttaaattgattttaataaccttaagtgttattttaccattttacaaaatgtgagggtttaaaaacccacaaattgagtgtctttttcatgtttttagaaaaagtttggatcttttaacccatttttcccaactttccataatcatctaaagttttatgtataaatcttatcaaatcatttagaatttattttgtaatcatatataaatcacctagatatccttaaatcttaataaaatccctccaaatgtttagtttcaacacaccccttaatagttgactaatcacctaaaagacagatcatggtaaattagcagttttttttttgtaaagtagcttgcaatcattgtaaagtagttttaattttcatgttcaatataaaatcttcgataggaagacatctttgatctccgaaaaaaccctaagcagtaccctcaaacgcaagaaccttagctcttgataatgaatgtatcttcttcttcactccaacgaccccggagctcgtcggatcttcaaggttttaacggagtaagttcgacgtttaaggaaacgttcaccggatctccatggctgatgcttttaccgaaagacggtggttgtgtgctgtacaacccgaaagaaggaaagaagatccatagggaactgcgagactttccagggtctcgaatcctggcaaactcgggttactggttattgttgttagattctggatccaatttagttatcatagatgtctttagcgagaaaacgatcccctcttccgtctctagagtcgattgcgtcagatactagtaaggtcaggcgtgtgggagatagagtatttgaaagggaatataatggcccggaatatagtgcccgtgttgccactgatctgacttgtgatactgtgaggggccttttgtgggtagacgagagtggaacagattacgttgtggtgtggttcttcgacctccctggccactcttatataagcttttgcaagaaaggggacactcattacactgacattcctctgtttttccgagacgcccactttttggatggcttatcttatatggtactggggcgttactctctttatatctcgacaagtcgtcgttttgttaaagtcctagatctgtctggaccgcaaggtttcttcaaggacatcaccgagggtaataaaccattctcaatgctttctcgttatcactcgtgggattctagcattgctgttacaacctctggagaggttttgttggttgagagtaatccatggcagagggactgcttccgcgtctacaagtatgatcctaatgtagaactcccagattacgcctgccacactgttcttgaggttgattctcttggtggtgaggccctgcttcttgacttgggtttcactatacctgctaacgaaacccttggtatcgaaccagactccatctatttcacccgtcactaccgtccctgccaatgcagacctcgtgaccttgacatctgtgtgttcaatcttgtaacaaagaccctcaaacgctttcctgctcttgacgacatgtctcttatggatgctcgatggtttctccatgccaattaaattcttgctttttcggtttcatttatgcttctgaataaaaatattatcatgttgactaatttctcagtgttaggtttctctgtattattaagtataacatattattgtttacatcgaaacgtagggagtggtggagagctctgatgttatttattttcatttttgtttcttttaaaaccaagcttccaaagtcatttacatcaacttcagataaacaaaacgtttattcagagagaatgacaagataactagtttgcttctcattgagagagaatgagaagatcatttgactcaaatctggttttgccaggaagtaattgcattagctcactactacttaatttcagggctttgattagagccatgatcttgtttacttggaagataagattttgtagttggaactatgaacccctgtcttttgctaaaaagaaatgcatagttcactactagtttagaacactttgatgctttctactctctatttcaggggattgattacaaccatatccacaaatttcatagctcattagttcactactactagtttagaaacattaattgctttatagtttaaactctatttcagggtttgattagagcaatgatcttgttttcagaaaattgaatcttggaaggtaagaagattgcgtagttggaactatgaaccatattgttttgcggtgtgggaactaaagtcgaaatcattttacaggaaaagatgatacccgcggtcttttaatataaatagaatgattgtgttaatatacatgacttaatttggggtttgaaggtttataaataggatttgtcgagactttttttttattaaacgagttttctctcttgtctgtcacataatgacaccggtcctaaagtttctcagtcctcttttttttttttcatgttttcataaaactcgataatacagccttatttagaatcggttcaaatgtctcatatgaatatggcttttgaaacaaagaatgagaagaattttgttgtggcaagacaaaagtggaacttctttgcaatgctcaaaatatctttcttcaaaaataaaatggacaaaagatggacttgctaatactttttttatttctccacaaatgagttattactaatcaggccaaaagatatatctggaatctaagggtgcttatgaggaaatgacatacacatagattcaagaacacctaaaagacatgacatgatttatttatacaccattattgtctatataactacctaaccaggggcagatctagaacctattttaacctagggcacaattttttttacatcagcatattttcttacaaatttatcttactttcttgtattttaaaacatattcactactatctcatttttcattttcaacaatattatgttttaacatattgataaactaagaaatcgtttaaaatttgtttagtccaaagatatctcatatatcataactaacttttcacttgttagcatttatgtggacaatataaaggaaaaacaaaggtctcacacgtcaaaacttactaatttagtttaatgactaattaacatagagatttggtgccaagcataacttggaaggtttgttttcatcgtagacatctactcggcgatccacaaaatcaattcaaaatatagaaacacgttttcacttttcaaagaccaaggttttgttctagggcaacttgaacgttatatcatctatatatacatttttgcagtcattttgtaaaataaatcctagagttggaacttatttacaatggctgccactggcttttaattattagttttttcagcaataaattgattaacaaacgaaaaacattccaaatatattacaatcccatatatcacgcagatttttccaaaatttgaactagatttcggtaaatatttaaaacaaaaaatgtttgacaacccaaaagacaattgcaatcccttaaaatgagcaaaacgcaactaaatacatttcttatcaattcactaaatcttatttctgcaaaatttgaactagatttcgagaactatttaaaacaaaattttgtttgacaaactaaaacacgattgcaatcccgtaaaatatttattttaattataaatttaaattagcagggtaccgcggtttttttttacagtacaggtttggcggaacgggtttggaaggacgttacttaataacaattgtaaactataaaataaaaatattttatagatagatataatttgcaaaattttatatatattaatttaaaaaaataaattgtctccacggtgtaccgtgagttaaaatctagttaaactaatatatatgtaacgtataagttgcatgttacacataatatattaatgctaatcatcagcaaactaataaaaccccgccaacgtttagatagtacacgtatgtaatagttgaataatagtgactaacaaagacaaagaaacaactatacaccaagtgtatatatcggagccacaagacacgttcaatctcattgacctcgttattataaaaacatttcaacactagtcattgtctcacatcaataaatacattgttgaaagaagataatcacacaaaataaaaaagtaggaagaaaactcttcacttgatgatttccactcaagattcaatcacagtgagcatagggattttggtgcaaagcgtgacttgaaaggttttctttcctcgtacacatctagtcgtcaatccacaagaccacaacagtcaattccaactatagaacacgtttttacttttttaaaggttttatcattttcactttagtttcttatacacatcaaaacttacttgccaagttacaaagtttatagcttaagtattttattatatataaaaaaaaactccatcaaaggaacgaaagttcaattacaaacttaaaaaagaaataaaaaataaatagagaactaacagatttacaatgtagcaattgca

SEQ ID NO: 34 - DNA, 98471 bp, Arabidopsis thaliana
gaattcttcaccgtgatattaaaggctcaaatctcttaatcaataatgaaggtgtcttgaagattggtgatttcggattggcgaatttttaccgaggtgatggagatctgcagctgaccagtcgtgttgtgaccttatggtacagagcacctgagctgttgctcggtgccactgagtatggaccagccattgacctgtggagcgccggctgcattctcactgagctcttcgccggaaaacctattatgccaggacgcacagaagtaatgaactctctaacacctctttagtttgttaagaacagtttttgagctcaggctttataattcgacgcagcattcattcaaattctgagactcagagtcttacttcttatagacagctgatgagataattatccttttttgtttatcaggtggagcagatgcacaagatctttaagctctgtggttcaccctcggaagattactggagaagagcaacactgccactagcaacaagctttaaacccagtcatccttacaagcctgttcttgctgaaacctttaaccatttcccttcatcagctctgatgctcatcaataagctactggcaatagaacctgaaaaacggggatcggctgcttctaccttgaggagcgaagtaatagatcgatactaaccagaaatccatgtttcttaaacaagttattagatacatttctcatgatgagtttcaatctttcttctcttcagttcttcaccacggagccactccctgcgaatccatcaaacttacctagatatccaccaagcaaggaacttgatgccaagcttcgcaacgaagaagcaagaaagtaaagctacatacatcttcattcactagtctttctcttgggggttttctgatgaaagttttgtttgcagactaagggcagaaggtaacaagagaagagggggagaaactgtgacaagaggacggccaaaggatcttaaaacagcccagacaccagagtttatggctgcaggacagtccaaagtcacatgcataagccacaaattcaaaacagacgaggaaggtggcaccgggtttaggatagaaccaccaagaagagggatccagcagaatggtaaagctcatgcttcttcaatggttcacccaacagtggctgatacagaatggaacggaggtggaagcatcaaaagacaaactaatgcagagatgaagtctaggacatctcaaacaggagacttgtctggtgaatcttataggagagatcccaacagagattactcaaccgtaagtctctcctcttgttatatcgtgtaccttaaaccttttggtatgtaattattaagttgctttgggctgtgtcatcagggcaatgcaccaaggaaaaacagaatcaattactcaggaccattgatgcctcctggtggaaatcttgaagatttgcttaaagagcatgagaagcagatccaacaagctgtccgcaaagcacgtgtagaaaagtctgcatcaagaaaaaaccaagctttaacaggacaacaacagcagcaacgttacacaggaagaaatgctcggtagctgaaaaagggaacaagaagccatagaactcataagcgtttttgttgttgtgcctcttctgtgcttgaagccagggattgatacaatgtatagtcgaatttgtttcttaggccaacaagattgactacactataatgtcaagctaccttttgtatatacacaaggtctctctattgagttgagtcaaacaaacaaagatgtatctgcaagggaaagcaaaaaattccaaatttgctacattctatgattctagctcagctcaagtaattaaaacctaccattagctgaaaatctcataccacataacctctgcaacaattccacatatcaagctaaagctactgagcaaaaaactcacgaggaaaaaaaaggctgaattcttgagaaattagcaaacttttttgcataaacaagttcgctctgacctagctactgagtagtgagtactgagcaaacattccacgagaaaaaaaaaaccttaattcttgagaaattcgaaaactttttgcataaacttgaaaagcttaaattagaatcagataatgaattcttcaaaccagaaaaacttcaccgatattcccaaaaccaaatcatatgttttcaatcgaaagactaataaacctaaaccctctgttttctatttcccggcgaagtggccggcgatatcttgcttttttgtaacctctgttttctgtttggcccaaatccagaaaagcccaaagcccatttgggaagatattaataaaaatattttaattaaaaaatagacgggtatgggttcaaagacccgacaacgtacggtattcgggttacatatgaataattcgggtatatatatgtttttaaggattaattagaaacaaagagattacagtaatatactatgtatggtcaaagttgaaactcgtaaattgtgaatttgtgatgttactagatgagctgataattttttccttttttttttgcaaggattgaatccaaatctcttatgatgtttttatttattttccattttataagtacaagactttattatacttttaaaaaaacgtaaagtataataaaattgtaaattttcaatgcgtacttaaggaaagtcgttaaaaaaaatgtaatatttaacaggatgtcaaaaataaaacatatttggtcatacttgcatattttactattgatgatatccttacccacaaaagaaaagtaatttgtctggtttgaaaatcttataatttatgtattttttataaattggtaataaactgtgtaattatatgaaattttcttagtttaaattgttaatgatttgtaggcttattgaagtgcgaaaaagtcgggatgagtaaggctagaaatgttagtaaagaagaaaatatctgaaaacaaaataaaataggcaatgtcttgcttaccgtgaagaggaaagggcattaacccaatgccacacaaaaaaaaactgaatttcgtaggccataattttttcatttttagccttatgtatttaaattgtatagtgcatagtgagtatttgtttgggaagtccacacgctatgtattagaaatttatgcacatgctaatggaagataattttaataacataagtacataactaaaataacgaaaatctcttttggaataatcaacatattaaaagaaaatgaaaattaaaaagaaaaagagaaattgattttgtgttatcaatgggccacttaaaaaaaaaaaattataaacaaaattagtagtaaggttaatctttgtaaccgtgtcttcttctaaatcataaacttctttttttgcttcaattttataagagtatttggctatcatatctatagagagaaaattggtttgataactacgtgagtttgttgaataatttttttaaaggaaagatagataaatagtggtttgaatattttattttctttcatcttatcactatcgaatatgtttttcgttatttggattatttttttaataataaaagccacatttgtttattcgccctaagctatatttagccttagcacgacactgaaaatagaaagagaccagagtcgttagattttacgagtgacttctaacttacgagattaaccgcagactggttcaaaagaccatcctcactttcctaagatccaagtaatcaaaattcactttcactcaaatcacctctctatttaaacaacaacaccactttttcaatcctcattaacaaagttaaaaaaacaaaacaacaccatcttcactttttttttttcttcttattttttgttttctttctctatacatattgtatcaaaaaataaatacattttcctgtattttattttttttgtgagtattaaagaaaacacaagacaagaatgacatacacagcggtaactatgctctctctctgcctaataaatatcttttcatcttatggcaaagagtgtcgagttttggcccgacttgtaatgtagtttcatcaatgagactcttaacattatatcatatcattgcctcactttattacattttttgtaacgttacgcgctgttagttctcttaattcattatattaagcatgccaaaataccttgatcagaatgacgaggagaacaaaggaagatcaacggacaataacaatcaccgtcaaatggattacaacgattggttaccagtcacagcgtctagagaagccaaatggtattactccgccttccacaatgtcacggccatggttggcgccggagttcttggtctccctttcgccatgtcacaacttggctggtaattttttaagaaatgtttaaatttgtctgatcttaacttcacaaaataaagtcgtaatttaacgataaatttgttgctaacaggggacctggacttgttgctataataatgtcatgggctataacgttctactcgttatggcaaatggtacagttgcacgaagccgttccagggaaacggttggaccgttaccccgagctagggcaagaagcttttggaccaaaactaggttactggatcgtcatgccgcaacagcttcttgtccaaatcgcttccgacatagtctacaacgtgacaggaggaaaatctctcaagaaatttgtcgagcttctatttccgaatctcgaacatatccgtcagacttattacatccttggattcgccgcgcttcagcttgtcctctctcaatctcctgatttcaactccatcaagatcgtctctctcctcgccgccctcatgtctttcctgtattgtcaccaaaccctaaaccttaacaaacaaaaaattcttcttttttttgttttctaattatttataaggaaacttaaacttgttgcagttactcaatgatagcttcggtggcgtcaatagcaaaaggaacggaacaccgtccttcaacttacggagtcaggggagacacggtggcctcaatggtctttgatgcatttaacggcattggaaccatagcgtttgcgtttgcaggacacagtgtggttcttgagatccaagcaactattccttcaacacctgaagtgccttccaagaaaccaatgtggaaaggagttgttgtagcttacataatcgtcatcatttgttacctttttgtggctatctccggctattgggcgtttggggctcatgttgaggatgatgttctcatttccttagagagaccagcttggcttatagcggctgctaacttcatggtttttatccatgtcataggaagttatcaggtctagttttttccttatctttttggtcccttagaaaaactctccaacttttattaaaatgatcatcttgacaggtttttgcgatgattgtgtttgacacgatcgagtcttatcttgtgaaaacactgaaattcactccttcaacaacactgcgtctagtcgcacgtagtacatatgttggttagttctcatttaacttcttttttactcatttttttcatggagaaatggaaaactaagataattcttggtttgtgcagcattgatttgtcttgtagcagtttgtatcccctttttcggaggtcttttagggttcttcggcggtcttgtcttctcatcaacctcgtacttcgtaagttatacactacaaaaaaaagaatgaacatataactctttgcaaacactgtatgggtaatgatacctctttaatatttgcagttgccttgcattatatggttgataatgaagcgaccaaaaagatttagcgcccattggtggtgttcttgggttagtctttctttcttaattaaacgaggcttagtcacacaatctaattgacccaataacacttaaatccgtttctttaactaacaggtagcaatagtcactggtatctcgatagcgattcttgcgcccattggaggaatgagacacattattctttcagcaagaacctacaagctcttctcataggcttcaaataaaaagccttgcaaccaaacatcacaacaaacttataaaagttttttaccttttttaacttaagttagccttctagttggggaatatataaagttagttatttgattatttggattctcctttctttttataaccctttcatcaagaactgccttcggaattgttgttaaggctttacgcgcttggcttgaggctgtgacggatgatgttctctcaaaaacttcatgacaaaaaaaaaggaataccatacaatatgtggtcaacctcaggctctgaactttcaggttttttggtttttagctttttttttctttcctctttttcttaagtctttagattttctactgcaggttaaaaaaaaaaaaaagcctaaacggctgtatcagaactttttgttttggattgtaataaaacatctgaataaagagattggctttaccgttttaccgctgttgaatttgtttttaaatgcatatcaacgaaaccgatgaaaaggagaaaaacagagatgtacatgcaaaacagagatgtaaaacagagaacctgaaagatgtgattttggcatggtaaaagaaccaacttttcccacatggcttgagccaaacttgcccaaatatgaagcttcactgatgaaatcacttcagaaacattgagtgggttttggtgaaggagcttcataaaaattatcaaaaacaaaatctaatgaagtttcctagagaaacattttacaatcaaaatataaattattgactatacttttgtttttattagagtaaaaatatagtgttgtaatttgtaactgctatatttactctttaaccttaattgggacctaagctgatatgacaccacaaccttaattaattagaaaaattactattgttagtatcgacgaatcaatgcgagtcacaccaataatcaaaccacaaaacatggacaaagctacacaagaaaaatcaaaatcttttgtctctttgtcccctgaagaccataaaaaaccctttctctgcagtaaaaagctttagtaacgtctctcacttaagcacaatctctctgcatctctcaatgacgacttatctcccatttccgatgaccacgagactcatactctctagcttcgtctctctcgtcgtactcactctcttcttcatcaccagaaccggtttctcaccgtcatcttcatttcatcagcctctgaacaacactctccggatctccacttcctccaccggcagtaaattacagagtccaagaagttgtaataagatccctccttccctcgccgatgctctcgtccactatgcctcctccaatgtcactccccagcaaactctctccgaaatctccgtcaccaagaaggtaacaaattaaagtatactatttaattatcacaaaaaaaaagacttttgacatgcaaattaaattgtaaactgtagattgttaattgatatctaaatgaagaactcaattcgtcatctaaattctggaaaaatcaaatatgattagcaaattaaatgaatctagtctaatcttttgtactaatgttgctaccgtaacataagtttagtagtccggtaatgatgtgaatttttagtcttttagacgtcacaaaaaatgagcaaatgaccgtagttaaattttattttacttttttactagtaaattgttgtcgtattgtataagataagtgtaaatgtgaattatagatgatacaaattaaattggatcaggaattagagaagaaatctccgtgcaacttcttggtatttggtcttggtcacgatagcttgatgtgggcgacgttaaatcacggaggaagaaccatcttcttagacgaggacgagtcatggattcaccaaatcgctgagaaattcccgtctcttgaatcgtaccacgtccggtacaagaccaaggtaagagacgcggaagctctcatggctgctacgaaagacagagaagaatgccgccgcgtgtcaactgatcttagggtttccacttgcgagcttgcgttgaagggcttaccggaggtggtttacgagacagagtgggatctaatcatggtggatgctccgacggggtttcatgaagaagctccgggacggatgtcggcgatttacacggcggggatgatcgcgaggagacggaaggatgaggaagagacaacggctgtgtttgtgcatgatgtggataggaaagtggaggatgagttctcaatggagtttttgtgtagagattacatgacgaagcaagagggaagactccgtcatttcacggtgcctagtcaccgtaactatggtgtctccggcgttaaattctgtccttaaccctatccgccggtataaacaatttctggttggatgatgcttaaatacatatcaagaactgaatctccgaagctccataggcttcaggattagtgtgatttattaaaaaaaaagaaaaagattgtgtgttttttgtaattttataattgatgatatttaagaaaacaaaggaagcaacgatgagtacattgatttggaccgttaagtgtgacacagtagacgttttcaaaacgtcttaaaaggaaaacagatttgactcaaaaccttacaaaaaagaaactacaaagacaacaccaagtttttatgtcttgttgatagtcttcataatcgttaattgagactagccaattgctgaatgttgatcgggtacgcgacagtgcggtcaccagcaaacgctttctttgccattatgagattaactttctctgtaggatggaaagcatcccaaaacacatactgatctctgttaggacaaggcgtttcaaagggaagacaagtgatctgtcctctgttttttcctattccacaacatcctttgtccatagtagtaagacctatagaacaacacaacattaatagctatagatattagttagaggttatttagctagcttaacgtttgttaattacgtaccataagctgcttggttagcaacgatgtcttcgaacatatgagcgatgtcgaggtaaataaatttagcatccgggagattctggttgagattagagatcattgttttaacgtttgtgttgaaaggaagaacaagttggttcacttcttccgagcatttaccgtcgtttccttgagctagaatgctgggaatgcaccccattcttccaagtccggccactacaaatttccgaccaccaagattatatagtctctgcattaccaaaaaaacaacaacacattttgattatattttcgcttcttactcgattagtactatcaattaaaattagagatcattcttttgtttttgttgtattacggtgagctgatcggtgtaatgttgaaccaagagatcaccgaactgttgggagttgtattggttacgggtagggaaattgggcatcaagtaattgttgagatagtcgttgcttcccattccgatgaagaacaagcttcgagtcaccgaatccgcaatggccactgcaccaccggacttgctcgccacctgatctagtgttgtctcgaagttatgaatctgctggtcgaaaggtatgcgtcccacctgaccaccagaacataaactccacgttacattattaattatcgcatttagcaggagcacccacaaccatttttcttggtacaatatgaaaccacaatgttgctcttgaacatagctcatgtgatgtgaccaccattgaaaatatattttctttctcaagaaaaaacgaaaaaattgaaagtattttgattgattttgaataaaaaagatttgtcacaatttttctttatgatcactaatttttttaaaatcaaattagaaacgatttcattaagattttaaaatattaattaattttttgatgtttactcttgtttattcacaagctcataacagaaaatagatacacttcagaattatgtaagttatttatagtacatttattagaatccatttagaattatttaatacaaactaaaatattggtcggctgattagtagatacaagtatatctatgcttaaaaaaaaaaaaagtatatcaatgctcttcggataacttacatttcttacaacaaatagtaaaaagagagtgtatatgtaactatgtaagtatgtaacatatatgcaaccttttcttgttaaggatataacatgcaacttacgaattgatttacttttttgcataaaagctacttacaaagtttcctccggtgtcaggaagaatccccgcggctgcggaagcatagttgacaccacgaagtacttgatctccggtagcttccgagtaggccggaatcagtggcagccccaatagttgagctatacgatcaatgcatgcatgcatcatatataatacttatatcagcctcgttccagttttaggaggaaggaaaacttattataatgcatagagtgaaaacttaccaatcccatcgaccatcgttaagccattgcagaatcgaccggtcggaccgccattgaaatcaatgccataaggaaaataattggctttggcaaaggaaggaatgttattgttattcccattgtctattagagagtcaccgaagacaaacagcgccggcacaatgccatcaccggtgtttaggtcgaccagcggaggcggaggagcagaaataggttcctcaaccacaactagttggccagagacgccatgaaggagttggagaaccacggcaagaagagctgagaagaagcaaagtcgccggaagtggaaagccattatgaagttgtttgtgtttagtaaggtgtaacttttaacttttgtaggttgattttggggtgaagagacaaatagatttggacagatttatagatagatgagaagggtttggtgaagagtaataaatgtatttatccgtcttctaccacaccgtaataacacaatcagtggtaggtgagttgtctacaatattacttaacattattgtaaacatgtcattttccatagccagattttttgagaaacgtttaaattgtagctatcggaaaatttagcaattagtgtattttgaaaattacatatttagaattgagatgcaaaacaaaatgtgtgtgccaatttatgatgtgtttactgtttaggccgtatcaccaaaacaatcattcattcttttttctttttttattctataattaatattagtttaacaaaagtatttaagttgaaatatatgatcaggatgacataattattgatttggtgaaatgcaagccagcacaactaaaaaaaatatcatttacttaaacaatcgatttcattaagctcattatataaaattcctgtattttttttttcacatataaaattcctgtacatgatgaactatttgatcgaaagaggaaagtaaaccagggagaagcgatttattaaaaaacatttcttaccaaataaaaacattgcatttaaatcgtcgttattctcaaagacgtttaataagctgtcacggtcaaatcgtgaagaccagttatgtcgaagacgagggcagaaaaagcaacaaataagcctcttctattacaaatgatggttgtagattttagcatgtcattaaatttagggttgactttaatgttttgacttcatcatatacgcgggacccaataatatggtagtctttttaaaccaataaaatgtatagtcccatcgtatgttaagaacttaagatacaaaaagttttcacatttctagatttgtttcaaatttcatgacatgatcagttacgttatggaatcgaatcagagaagctttagttgtgtcgaatttctattttccataaagtatgagttgtcgacattataattttcatcatggataacaatgtaaaattattaatttaaaaaaacattgtaaatatacactgcaaaaagaggctaggtatcttcagttaaacccaaaaccaaataatccataaattcaaaacatagatagaaagtagaaagagttataagtacacaccacacttgcagtcatttcatcttcacaccaacaaatgtaaaacaagaggataaaacatacggatagattttcaactgcctagcgaagttccacaggctttattttaattatgtgtgatttaacaacactatattatacttaccaaggttatttaaattcgtgagacatagtcttcaaataccctatggtctagaactgaaatatttcacttggcattgttagcggataggaatagtttgtctccatgactgcgaagttagcatctaatatgctattgttgttttcctctatctgcatttaattcaccaacaaaataaatcattagacaatagctaagcaaaacactctaaagatcatctgaatagtgcgactagataattctgctgatagaagtttcataagttgtgctatgatgagatcatacaactgattttgttaccttttcgaggagatacttgttggtgtttttgaggactccttcctttaaatacaaaaaaaaaaaaaaaaaaactgttaaaaatttacattaatttaatataattgctataaagctgaatatacaatgtgttttttttttttgaaaaacatttgttttttttgcttaccttgttcctcaatgactgaatttcttgaagcataacatccatctgcaaattttacataaaagcttttctagtcaatcattttatattcactctccctaacatttgcactaaatatatgcatgaaaacatgtatacataccttagcagagcgaatctgagaaatccaatactcaagatgcttctcaagcaaaagaagttcttcaagattcatagccccatctcctcctccaaacatatagctgaaatccattttaaatgcatttactcatatatgtataaatttataacccataagtaaggagatagcatgcaaataatcagtataccttatccctttctgaagcatctcaatctcttgcttaagcacgttgatctcatctttcggatcctagagaattataaacttttatttcaatgtttctatacattatttgtaaacatatctaaaagcgggtgaatttttttgaagatgtcgaattacaaatagtgacccatgttggtacacacacacacaaacatgaaatacgtatatgcatcaatatataaaataatagttcaaagcgtgtcaataactatagtttaggccttagggcaacctttataaagtggtcagatcaacttttattaaaagattgtgctgattataaaccaataatactacttcattccgaaacacaatgcgattgaataaccagagatataaaatattaattaaagtgtaatacattgtctctaagcatcttttactttaacagtaattactttgacttgtttcgtaactattttatgatagtacaacgttccacaacaatgtcagttcctctcagtagtcaacaaattaaaaattcggagaattggagagctaggtgcaatgaatgttgtacttcactaactattttcatgtatagaatcagaatcaggtgccctacctaacttccctgagtattttaatttcaaatcaattaacaacgtccaacagattttccctctgcatgtcaacacgtgttagcatgttgcacactaaaataatgtttatggaacaaaaagactaaactaccccttaaaagaatgaaatggaaagaagtgaaactactgacgacgaggcactagttttaatatcaacccaaaaattctatttaaaaaaacaaacacatacgataatcaatcccaaaaataaagaaaaactcgatgaaagtagatactaattaatgagaatgaaagagaaagtagacgtacaagatttggtggttgaagttgttcttgagcagtaaaagtagcagaagaagaaccacgaccaccaccagtacacttcatgtacttatcaatcattccctccattgttctgaatttataatcagatttacatatataatatatgttactctttagtcacatgtatatatatgaacactaagatatatatatgatataatacgtaccctttagtagcgagctcaaagagcttgccctgaggagagaagatcacaacaccgatctcggcatcacagagcacagagagctccttagccttcttgagaagaccagttctcctcttgcaaaaagtcacttgtctgtgaaccgggttctcaatcctcttaagctgaatctttccacgagccatctctcaatcagaatatttccttctatctgatgatttgacgtttgggtttacgtttagagttggatttggttttatgacttgaaagttgaaacgtgaaacaacctcccactagtttgaactagcttcgaggttccccacttaactctttggtttctctgtttcttcggagacaactgtgaagttattaccaatctcatgccaccttcttgtctttatatataatctccattatcatattctcccactaacttcactgcttcttaaagcaccttttccacatcagcctcattttcccttatatatgtatgcgctcatatacgttatatgttaagtatgcattcatacaatagtatatagctttacatgcgaaagctccgtctttctttgttattataaggggtttgtattgtactatcccttcctcctctagcttgtagtataatttcctaggtttctttttgattgattgatgttacatctgatgtgacatatgacctgacatgcactattgttacaatatccaaatatatttaacaatctaatttggtacaatttacattctacaccaagagatggaggctggatttgatatgtgcaagactatatatataaaaaaagattgagttcccaaatggcatgcgattcactttcttaaaaaaagaattctttgttttattttttataaacaaagcgttattatgtgaaggatttagagtaaataagagttcaacaatgaaacaaaaactagttctgttcctagttaaacattcatagcatctttattcatagcatcatttattttgcctcttatatttactaatgtatagttctgaatatatctctgcacgtacctctcatatcttatttactttaactggatccaaagatcgaatatatttattttgggttgatgacttgatgtaaatcattaaaaatacataaaatttcatcttaaaatcaactaataataaacaagaagttatcaaaaaaaaaaaaaaaagtgggaggtttttgctctattgattaagcaaaagtttaatgtatttacactatcgaattaccgtccgaataataacaaaatatattatatgtatatatttttgttattattaaaacgaaccatatttgatctagagttgaaactcacatgatctctatttagtgtctaaatatgaaattcgattactagaaaatataaagcagactaatagaaagaagtttacaaagaattttcattgtggtatatatagaactgctcatcattattatgtcatgttaaaaatccatggtgagctttttattctgtattttttttttttttttcgtccgagctttttattctgtattgaattatacatttctcacatttaacgacgtggaattcttaacccattttaacaactaaaaagaacaattaagtgatggtcattaagcatacttagcccatattaaagcgggtatcatgtgcatctcatcgtggtggagaaccaatgacctgcccatgttaggtgccaatgtagccttttttttttgttaggtgtattaatttattgaatttcacctttttgcttgttaattgattaagtaggtcgtttttctcctttctaaatatttttttgaccatcttgctttgcctttggtctacataacaaactcctgaatcttattcttcttcaacattacggggtttttcaactcacttttttcttggaatatgggatttttctcttatttctgagtagaaaatccaccttatattcgacatcaatatttcaaagaaatacataatacattgaaacatagattgatactctgtaacgatggaacttttttggttaaggtcactaactggtattctgtgagcggtttaactcatcatataacaaaagactcacagcttcttttaccaaaaaaaaaaaaaaagacacagcttttagcaacgttttttacgatggtattttttagcgtggattatatcatcaaatttaaatttcaccatgaagaaagtaaggtttaatcaaactagaattaaataacattttccatggactaaatccccttagcagctaattttttttttttttaatatagctaatgtaagagtatattccctttaactaatttaatccatctttacagaatccataactaaaaaatatgataatttcgtggtgattgtacacatttcgatttattttttttgttgaaaaggccaaggttagtattcaaaatagtattagaatgggattcctctataaataatttacatttgccattacaacataaactggtgtggaaccaaagttctaaactattgaaatctagtcaaaatatttcgctgtcaaaatatgtattttggacattttgatttcgatgcttccaaaattgaaatgattgatcgttctaaaaacagtttaaactttaagaaagagggtcagcttaagtaaggaagaaggaagtaaataaagaatctttgtcaaatcaaaatgcatcaaacatgcaaaacgcaaaaagtgtgtgatcgatctgttgcttctttttcctcgcatctttgcgctcattggctcgatcaagatcgtatctatgattgacacttgtttgattttcatgtcttttaggggcataaagtttcttttgattctccactccctaaaatttatttatttctttgtatattatttatcctaatgcatgcttttaatttaactatgagcttatgtgcattgcgatctgagaaagtgggtttctttagataacattaatatatgaattaattgatatatgctagaaaaatctaactagtattgttagacattctaaccaattatttcttcgaatatatggatcttacaataagaaaccaactaaactttcatattttaatccaaagtaattccaaactttcaactattaattcttatttcccaaaactcaacggaaaaaaaatcagcctcaagtttaaagttcatttacttttttttttagctcttttaatggtcaattttcgtaaaaattagttatatacactgttttttttgggtaaattagttagcatatctatttcacttaaagaaaacacaatacatatgtatttaatatatatgatgggtgtgtgtaagaaaggattaaaagaaatacaacttagatattagttaaaatctttgaaccaaaaaaaagaagaagaaaaagatattattaatatctaatcgacatggagcactaaaattatggtcccatccaaattgaatctttaaaagaaaggacaagatgccttatgataattaaggttgccctttaaactctatcaatccttagttaattatgcactatttcttgacatatatttattttggggcaattattttagaattgatttattattagattactacaatgctattattgcaatttaactgctatacctttttatgtgcaaattttaactgctatatcaaaacatgattttatccttgttaggtcaaattaaaatacatacatgatattgagttattggtataagtgacatgagtagacaagattcaggaatgattaaattgaaaaaattatagtttgtagttttgtacaggcattaagaaaatatagctaagaccaaggagaaagctatgacgtacaaaactgcatattaccacaccaaaactgcaaaatatctttatgtaattggggaaacacataataatataattatcataaaaaaattgattcatattttctaattgaaaatttagatttattaaaagaaattagttggatcattaaaaatgataatcaacaactgaccgaaatatacaaattaacgaacatagccagtctttcacaaaaacttttatatctccaataaacatgtagaggtcaaaagtgtacacataaagtttatagataatagccaaagtttattcttgataagagaattttgaccacaacatagcgatcttgctcagccattggagtttcgtgtaatgttaatagtgttttatttatatataaaaaatgagaattcaattctctttaatttttgtgttttctttataatattgaagggtcttaaaaataaatgtatggtttagtttagcttgtaggctaagagcaatgtcaactgcgttaaaattttaaaagaaaggatgagacgtttttcttttaggatgaaaatattaagtgatataacgattataacaaatatgattggtaatcattaccccgaaacacatccaaacagaaatcagttttccactgattcaaattttgcttaaaactggtgtgtatatatatattaagaagttggtgtaataggtacatgttcagttatatattaaaaagtagttataaatcatttattcctaagttcttatgatgtgagagaaaaaaaatatctctaaattaaacgttctaacacgatcagaccagacatatgcatgattcaaaagctctaagacgatttgtatataatttagatgttaattgtaattatcggtaatgatgcgaaattggatgcagtggagcatctagccgtccacaatatggtttaacagcttatagaatgaataatccgtacaccaagttggtatataataaactccaagttgatttagttaattgaaatttacgtacgcttttgctttttttctttcgttctattttatggaacaatgttttatgattccaacactaatattttgggacatatgccgtatttgggcaaaactataattcaaacaaaaatatattattttccttttctcccaaaaatcatgacatattgatatttactttatgcagctatattttgaaatcaatgctcttccatactatataacgaagtaattctattatgaaccattaatgtcagctgcaataaccataatttctgattatctgttatgttatttaatattatttttataaaattctaaaactacaaagttatgaagatgaactcataacaactccagtctccagtgtattcgttttatcatagtttctcatttccaatcgactgtaaataaattgtgtagctaatttgatctatacaactattatttttattaaatatctatatttaatcttattgtataaactttttgttttacagccgacaattttttttttttttaatataaaaacatcaggttttgatgagtgatctgttaacagggaacggtcctacaaaaaggaacatagtatactcttgattttattaaatttaaaatctcaatttcagaattttcttacaaagacatattcgaatagagtataaactaccacgtgtcatctttcagtcgattcaataagatgatatcccaaaggcttatagccaatcaatcctgtgattctccccggctaatgtcctagtatgcatgtgatcaattaaaatctattacaagtttccaactgtagacaaaattagtctaactaaaagatgttggagtccaataattttttgtaatgtaaaattaatacaaacaacatatagtattggtctacctataatatgtcatgtaagacatcgttaaatcatatttaatatgttgacaacaataaaacatatatttttctttgttaattaaaaggagttcggacctaagctttaattcctccacggttcaggatcaattattgttaataccttatattttctatcagaaatcgaactagtaaacatatgggtctaacccctgcatttaaaccactagtctgtccaactcaacgttgatagtaactaaatgcaagtttgatgagagagcagcttaagtactcttgtagaactgaagttttatattaagaaaaaaagatttttttttttaaaaagagaaaaaatatggttatatatatagaaagcgagaacgagatcaagattttgggtgtgttttacaatatattttcagcatcgagagtgagggagttggtggaagataaactaaacacagtgcgttagaatattgaacatcatcacctatatgagtcgtattgagatgactgattttggatggtttccacaatgcgtctagatgtgaatatgtgatgaaggaaaattataactatttgatggtttctccataaatctgattgatttaattagtgacagacatgagagaaaattataattataagtggaagatacttttttttttgatcaaaagtggaagatacttaagaaaattgattcgtatcccaaaaataagttaccatagatttgttgtgagatacttcttgtctagttgtcttgattacaacatataatacgaattatgaaataatttgtaagaggatatgatacccaaatctaacttctgtcagcagtttttattataaaagtttttttaaaaaaacttgttaacaattgatatcggctactattatgcaaaacacagattattatttttttttttaatacaaatgagttagtacgtaacttaatatcttttacaaaaaaaaaacttaatatacatacatatttaatatcttatacaaataagttagtgcgtttctatcacattttgataagagagaattcacaaaagaattttttttagtgttttagtgccaccgaaaaattacagcctcagtttcatgtaggtgggttttgagacttcgtgtttttagaagatctcatcccttaatatgatatcatagagacattttttgtatgctcattcttagtctgttccacattttacagttaaaacatgaaaacatattattgagaaatcaataggcaaatactaattggagctcgtctgatgatgaggaccaacattctaagcgaccacgatcaatatgcaaacactaattcaagggatatctgtataacccttttaagaaaaggcttttaagctagagtccagttcacttgattgggctcaagtggtgcctggcccgggatggagttcgtaattagttttctttctggtgtttactattttttttttttttaggagttcttatattttctttttccctcacaactctcttaaatgagtttacacataatctttctttctttttttttttttttttcacatagtctttctatatccttttctacttcatctttatctttatttttatttttttctctttatcaatagtcttttgacttttgttatcaacaccttttatcaacttttaattggtctttagttcttaagtcgtatgactctaatttataaaaacttggctcgtgggctgctaatttttacaatttgcatttttttaggaaaaaaatgatgatcggtctttttttgcatatatatttatagaatttgctttcggctctttttcgttggttgatagagtaagggaatcaatgtctcatacgtttctaatttttttatgacagctttacaatatagtttaatgtgcatgttatatataacgtaatcaaagttgctgttaaaaaagaaaagaatttatagatgtaatcaaagaccatgatagttcgatcattgtacattttgcatgcctggagccattatccttgatcattacgtaccaaaacattcggagacatcccatagatttaaaacgatacaaaaaatggtaatttcttttccactttccacgaaactcttagcttaactccttgtttttataaatcgttcaaaatacgttcatcataaacatagagaaaaaaggacgtgatgcgagttttatgaaactagtcccattaaatgtctgcccacacccctaatttctgcaaacctaaataagtttatagtgttacttagtcatctgttcctagagtaatcatgtggaggtaaatgatttataaccatatattaattgttttaacccaaaaaaatagagagttacatatactatttttccagcgtgtatccacatcatatgcatcaatataatttttttaatcaaattattaatgttgtccgaagtattagaaattatgcacaaacattaaatgaattgaaagaaaataacttaagtttttttttgtttaaaaatgagataacacaaaatgtttctaaaatcggatagaatgcgaacaataactgtttcggaagtccatggtaatctatacatgttttgactacaatatatgttataaatatacgtatttttaatatatatatatatatatatatatacgtatttttagtatgtatatgtatatatatatatatatatatataatttgtgaaatgtcttgttatatagaaaacaaacttattttcgtccaaaattattttttcacagcagttcatacacatttatgggcatgtactagtttttccgactataagcaaaatttatgtcgatttttctggatgtaacgtatatcttaggaaagagtaagcatatgaacgtggctgaaacaaactaaaagtgtctatctacacatacagatgctagcctctatgaaacacacttgtttggtcattggtggtggctactctcacgtgctcgctttgcattagtttagtttttttcaaacttcaaaagtcttttatcctttttggttatttcaaatgtccccaccatttctgcaaagtcacaatcttcataaaccatttacgatcctctactgactcagcgaatatgccaacacaagggcgcgtgattgtcttgagattcttccactgctatgcgagtttcttcaaaaattcctcatcgatcgacgcacttacctttttttttaaatggatcaaattgtttttgcatcttagaccaataaaaccatattgtatatattacgtaaacataatcactagtccatgatactatttatgaaaggtcataaagaatcctctctaagcatggaacatatgcaattcgaattcgggttcagaagcactaaaacaatactctttttaaccggttaagtatttgaaatagtgcacacaaaaataactaaaaagtttcgtgttactctaattagtagtagtactatatatataaccattgtcaatatagtctaactgatataataggtggaccactgtcacgaacttgaatgccagcgggaaaaaaaaatatactcgatcgcacgtatttatttgctttaatgtttgatccgaaaaagaatctctttggtaagaaaaaaagaagcctttttctattgacaatagtaattggtacgttgaacacagggtcacaggaacgaccgaacgagaccagacgcaaagcttccacttggatattttttttcctttttgaaaagcaaagaaatatactctcctttaatcacaataaatatatagaaggaaaagacttcagtattcctttgccttttaacataagaaaaatatatatacttaaaagatagaaataagacacacaaggactgaaggaccaaaattgcctataaaagcaaagtccatctattccacaagaacaagaaaaggcagagaagagagaggctctgataaaaaaaaaaacaaaaaaaaatgacaaaggcttattcaacacgtgtcctcacgtttctgatattgatctcgctaatggcggtgacactgaacctttttcccacggtagaggcaaagaagcggagtagagatgctcctatagtgaaaggtctctcatggaacttttaccagaaagcatgtccgaaagtcgaaaacatcatcagaaaagagctcaagaaagtcttcaagcgagatattggtttagccgctgccatccttcgtatacatttccatgattgcttcgttcaggttcgatctttttcttccttttgttttgtttcttgtattaaaacctaagaaaacttaatttgattcttaaagcctagtctaaacagttctacgcatgtaaattacatattatttcattaataaaaatatcattttttaatataagaaaccatatccagttatccactcatcactcgttatacccacacacaaaaaagattctctaggcatgtccgaaatgaaaatgaaatattcataaatatcaataaacttgtgagttttcttattaaaatccgaccaaaataaccttaaaggaaaacacaaagtcgcctcaaaagtctcatgaacaagatttaagggttgtccgattcttacttcacttttgtttttttttcaaaacaaagggtttcttagtgtaaacataactaaatgacatgtattattggaatagtattgtttattacaaaattactacacttaatatacatgcaagctataaaataaaattaaaaaaatacatgcaataggacatgtcgcattaatactatacaccggctttccgtatgttagttggatctcagttatggaacgtaaacatatcttaaataattcaatatccaaccaataataaaaataatacatatccggatatgatagcatatgtgaattatttatatcaacatttaatgcatccaattttctgaataaaatatttgatatttctcaagccaaatactaaacctaattttgtttgcagcaatactttaattatgattatcagattcttagaacttgtaagttgcaacacctttatatacttaaaagtaaatattatcaataatgatgaattgtggcataatttgattagatatacaatttcggaagaaacttcaaaatgtatttttcatttttaatctttttgttatgagaaatatcttcttttttttttgtatgttatgagaaattttataaactaaaataaacagggatgtgaagcatcagtgctgctagctggatcagccagtggaccaggagaacaatcatcaatcccaaatctgacactacgacaacaagcctttgtcgtcattaataaccttcgtgccctcgtccaaaagaagtgcggtcaagtcgtctcttgctcagatatcctcgctctcgccgctcgcgattccgtcgtcctagtaaccacatctatcactttttcgtctataactcaatcacatttagtttcaactaaccttggattatgacttgcggttacatgcaataatacaaaccattagtctacaagtcacactaattctctaacatgataattatttttgtgtgtcaatgtagtcaggagggccagactatgctgtcccacttggccgacgtgactctctagcgttcgcgagccaggaaacgacgttaaataacttaccaccaccgttcttcaacgcgagtcagctcatcgccgacttcgccaacagaaacctcaacatcaccgacttagtagcactttccggtggtcacaccatcggaatcgcgcattgtccgtctttcacagaccgactctacccgaaccaagacccaaccatgaaccagttcttcgccaacagcctcaaacgcacttgtcccaccgcaaactcgagcaacacgcaagtgaatgacataaggagtcctgacgtgttcgacaacaagtactacgttgatctcatgaaccgacaagggctattcacttctgaccaggatctcttcgtggataagaggacacgtggcattgtggaaagctttgcgatcgaccagcagctgttttttgattattttactgtggcgatgatcaagatgggtcagatgagtgtcttaactggaacacaaggagagattcgttccaattgttcagccagaaacacccaaagtttcatgtccgttttggaagaaggcatagaggaagctatttccatgatctaaataaccataaatctcgacctttcctttgtcaactctgtttttatttagttcatgcacttgtggttgggttgtcgaatgcgtaaaactatctgataaataagaacgtcgcttcatcttaattaacttcatccaataccatgcactccttcattatttatgtgccaatcgagttactaaaatttaacgggctaaaagagaatttaaattaggcccactagttacaataactcacgaggctatgacccaatatttgtaactgtctaaagcccaagttttggtcaacgatctctgactctctaatgtcccttcttccttccctccccattgtacctttcacctatcccaacaatggtggaaatcagaaatcccggtattgctttaacgaatcaatcagcaaggaagtgagaacgagaaggagagatctgtgtttcattagagatgagcaagctcagattcttccaaagtctcctaatttcgactgtgatctgctttttcctcccgtcgatcaacgctagaggcggccactccgaccatatccacccaggtccgtcgccattttagtcttcactatctaatttttgttcatagcgcttaatgaaaactatttgcagatttaattacttacgtcattaattgctcttaatttggtaataagtttaacaattatctttttgaagagcacatactaattgaggtgtatgcattaatttagtgattttgttaatctggttttatgtgttaattattaggtgatgggaattatagttttcatggtattgtgaggcacttatttgctcaagaagagcctacaccgaggtaatgtcgttattaggtttccaagctgttattgggatgtgattactgttgtctgtgtaatgataaatgtgtttgcattgttcaaagtttggaattaactcgaggatatatgactaatgatgatcttgagaaagcaatgaaggatttcaccaagagatgtagtaagatttcgagattatacaggtaatcaccatcatcgttggatcaatcagtagttgtattcatcctagattcagtattcttggtttctatattagggtcttatggtgttgttgattttgttctttatttctctctttgagggttttctggaacgtgctttcagcatcggaaagagtgtcaatggatttcctttggtaatacactcttatttatcagaaatgaatctttatgtttaataatgtgtgactcttaagatcactgtcgatgatgccttcttctgtttgtttcatgctttgcctttttagtgggtcatagagatttcagacaggcctggagagatagaggctgaacctgcattcaaggttaaaactgctcaattatttgtgcctatacatgcaatctttgagatattagattgtggtgatagcctagatgaatctaaatagttgaatatttggtcatgcagtacattgggaatgtacatggagatgaacctgtagggcgtgagctcttattacgccttgcaaactggatttgtgataactataagaaggatccattggtaagtgatttttgctttttgtaattgcaccatgccatggccatgaaagttgttcactcatcttcaataaacttgcctaagaaaaaggttatgtgcagatactgatttttttatgctggtatgcaggcccagatgattgtagaaaatgttcaccttcatataatgccatcattgaatcctgatggcttttcaatcaggaaacgtaataatgcaaataatgtggatctaaatcgcgacttccctgatcaggtgattgtctgatgacgcttttgacgatcataaattttattttcaccgatgctgtgattttcatgatggtagctagattcggttggttttattcatagtcacgtttgacttacttaactcatacctgataatgcagttctttcctttcaatgacgacttgaatttgaggcaacctgaaactaaggcaattatgacttggctgagagatatacgattcacagcgtcggctactctgcacggggtaattttcctgtagcagacttgtgcatactataacgtcttaagtatgtccaatttgaaagtttactttcaagattatgggagggggttttcaatgtaatgtcaaggaaaatcttgattcaatgtgaaaaaaatatttgctaaaccagcttttgttttagggtgcgctggtcgcaaattttccatgggatggtacagaggataaaaggtatttacttctattcaaatggttttgaggctaatatctttgctcggtccttgaggaaatgcaaacgtcatgtagttgttttgcactcttcttgcaggaaatactattatgcatgtcctgacgatgagacattccggttcttggcacgtatatatagcaaatctcaccgtaatatgtctttgagcaaagaatttgaggaaggaatcaccaatggagcatcctggtatcacatcaagtccccttactctgtcttattcaacaaatgagtttcttggttaatgctttaagcaaaacgctctacaggtacccaatttatggtggcatgcaagactggaattacatatatgggggatgctttgaattgactctggaaataagcgacaacaagtggcctaaagcctcagaggtcaaatcttatattcctatgtgataactgtttctccttcgcaaggtagttagctgatactaatagagttcacacatgttacacagctttccaccatttgggattataatagaaagagcatgctgaatcttgttgcaagcttagtgaaggtattatttaacctttgtttttagaaccccaacattttaatcttgttgtatcattttagattaagcctccagagattggttacattaatggaagtttgcacctttgcttccattgttatataaaatattttctgttttgtttttttaagtacgcctttatcttttataccttagacaggagttcatgggcggatcttttcattagacaagggaaagccactgcctgggcttgttgtggtcaagggaattaattatacggtagacacatattaaccctgccttctagtatttccttattccaaaatctgaaaaatcttgttagttcttcattgctcattgtaatccttatgctctacaggttaaagctcatcaaacatatgcagactatcatcggttgcttgtacctggacagaaatatgaaggtctgatgttttttcctcatattcagcttaaaatacgtgtgattaagttcttatcagtatgttattagagttgtccactgttataagattatgatacgagctgattttagtgattcatccttaagaaccgtggggcgtacaaatgcactatgatatatccttcataacttgtgcagaccaatgccttctgttataagctgacgctaacgatacgatatctgcatttcatctccttgttattgttgattacttgcctcattttgagtttcctttactgattcgcagtcacagcatcatccccaggatacaaatcgaaaacaacaactgtttggttaggtgaaaacgctgttaccgctgatttcattctcatcccagaaacaagttcccgaggcaatcaactgagaagcagctgcgactgtagctgtaaaagctgcggtcagccgcttctaacgcaatttttcacagagacaaataatggaatcacgcttaccctattcgtggttgtagtgttcctttgttttttgttgcaaagaagggtgagattcaacctatggaagcaaagacaatcctctagaagatcaataacagtatgatttataggtataataacacaactctatatactctaataagaacaaccaaaatccaaacaattgagtccaattattcaagtagttgttacattattttataccattgaacatttctttgtatcgttgtactttatgtgtttggtggatcttatcatcttacaagtcttgtactacgtcaagagtgcaacattgtcgccaaacttatgtcaccaagggacattaaaaaatgtaaccggaagaaaaagtcatgcttattaagtatttgaagaatgcgttcacaaatgaaatgtgaaagtcaaaacaccaattaggaaaaacaaacaatataaagcagaaatctatttatgctgttatccacagctttcatttagatttcttaaagacttttatagacatgagatttttttctatcttatctgtgtgtactttatttagaaagtagtaatctgttttatcatagaagatctttcttttaaaagtttaatcatttccataatagtgattactacatcgaatctatgacagtaataggaccactatatatagaaaatagtgtttactacataattttctacatctgagtttctgagtataataatatcgggatattcactgcgagacaacggttaaagaacctatcacaaaaactgtataagaaatctcactgctgtctcatagtaaaaaaacaaagacgactatttggatttgttgactttgacctataacaatgaccgtttcgttacgccgttgacttctccgcgccttaaatataccacgtgttttttcctcattggttccgacaaaaccgtcggtcacaataaccgttttttaaaacaccgtcatttgaaaaagccaatcgcttcacgagacaaacgacgaacaacgcaattacgcgttcttatctttctgggtatttcttaattatattactctatataaataaaaatacccagaaacgtaatttcgtcgagttcaaaaattcaattcaaagaataatttctttccataaaaagattgttgtggattaacttctttcttaaaagaatctcatacccgtcgaatcttcttcttcaacctttttctgcgtttttaatattttccctacaaaaagattctcaaaatcgttttacataaacccgatcttgtcaatctccagaaacaaaaaaaaaaaaatggcgatcaagacaaagactagtctaattccaagttgttcatcacctgaggatctaaaacgcgttttgcaaacgctaggttcgagctggggagatgtagttgaagatctggagcgtcttgaggttgttccgttaaaaggagctatgactaacgaggtttatcagattaattggcctactttaaacggtgaagatgttcatcggaaagttcttgttcggatctacggtgacggcgttgaccttttctttaacagaggtgatgaaatcaaaacgtttgagtgtatgtctcatcatggttatggtcctaagcttcttggtcgtttctctgatggtcgtcttgaagaattcatacacgccagagtacgttttcttctttcttttctttaaagttttgatttttttaggaagaacagaggaagataggtttagttagtgagattagagataagaattgtttgcgtttcaagaaatctcgtgatagagagagattgattgtgtatgattggtttggtccgtttaccagactctttctgcagatgatcttcgtgtagcagaaacatctgatttcatcgctgcgaagctaagagagtttcataagcttgatatgcctggtccaaagaacgttcttctctgggaaagacttaggtaaaagagaaaagaaatttcatttctttatgtataagcataacaacgtttcttgataaagtctttgttgattttttaggacttggcttaaggaggctaagaacttggcttcacctatagagatggataagtatcggttggaaggtttggaaaatgaaatcaatttgttggaagagagacttactcgggatgatcaagagattggtttctgtcacaacgatcttcagtatggaaatgtcatgattgatgaagtaaccaatgccattaccatcatagtaagctttttgaatcaaaagcttatacccttttcatcaagaaagtgttctgtttttaataagtttttgattgcaggactatgagtattcgagtttcaacccaattgcttatgacattgcaaaccacttttgtgagatggctgctaattaccattcagacactcctcatgttctggactacactctatatccaggtccatatctgtaaatgcaagtgtatatatctcttatgttactcaagggtagtttagagtctgattgtgtgtatatgtgtggaatgataaacaaacaggagaaggagaaaggagaaggttcattagcacatatcttggctctacaggtttgtgtcctatgaagcattaggtacttctccacacctcaagaaaaactcgtctctaaatcatgtttttgtgaatctcagggaatgcaacaagtgataaagaagtagagaggttattgaaagatgcagagagctacactttagcaaaccatatcttctggggactatggggaatcatctcggttagctttctctctctttctttcccttctttgtccaaaaaactccttaagactctgatgttgaaactggtagtaatctctagtgtctgttaatgcaaagcagggacatgtgaacaagattgagttcgattacatggaatatgcaaggcagagatttgaacagtactggcttagaaagcctttgcttcttgaaggatgaagcagattcgcattgaaaagccgatatacaactaaaagtttctgcaattaggtcaaaagaaaaaaagaaaatttagtagactatatgttgctattgttactctcatcagtttgtgtgtttcttcccttctatatagaggtttgttaactctcaaaacagttaaattgagtaaaacttgttctaaacaaagtattatatgataatagaagaagcaccagtggtctagtggcatgatagtaccctgccacggtacagacccgggttcaattcccggctggtgcaatttatcttttttacaattatttttgccttcacagtaaaatcaaataaagaaaaaggccttttctcttctttttgtttatttttaataattatgataacaatattgatggatgtaaaatgttcttgatttcattatatatatcaactaaatttacaagagtaaaccaacacacaaaacaagaagataaaaactataagaatatgaacgttttctcagtgtgatgcatcagtataacgacatgagattcaaaaacctatccgtagaaagagaatgtctctttcgccaatacttcatatgcaagatcaaacaaacaaacaagcaccaaatctcttcttttaaacgagaacggctacaagtccctcgtcttcaatctctgcatccgtaaatgtcaacgctcgctgaagtttcctcgcagaaaacacttcgacttcagccatgtatatcgctgtaaccggacgatgatctgagaatttctgttcggttctcctgtaatgaaccaacctcattcctttcccgtaggatagtactctgtcacaccaagctggtgttcttttcggcgcctttccatcgtttgcggtgtactcatcggaattcgcttggtacttataagttggtggaaaatgtagagttccttctgaccatccatcaaatgctctaccttttctgtattcctttaccagctgcattatataataatcataagtaacaaaatgtgtcacaacataagttgaataaacttcagagctatggtcggatttgagacagtgtgtgtgtatttttatttgcattagacgtcttctaaagttatatttgagatccaaatcctaacagtaacaaaggtaatccaaataattacctggtcatattcaagtaatttagaccattctctcttggaaatgaggtctctggttttctcatacgatgaactaagccgatagttgagatcacctagccagattattcttctgagaagtggtgaaaacacacaagtaaagttagacaaatcgaaaccgtaacgggttttttgagttaaagatttatttggaagagagaaaaaaagactgactcgtgatcatagataagcttgggaagtccaagagctgagacagagtgaaagactgttcttttatgtatctcgtgtacatcagcattcctctttatctgatcaacctctctttctcctgccgttaaatgcgtgtttatgaaacaaaagaacgtctggtttatcgacatgctcacagacacagctccctgcagagaccacaaaatcacttcacaatcctgaaacatattgtaacataaatttgatggaaacatctactctttatatatataccttgttaccaatatatcccataacgccaacaccaacagtagagactcgtacgttttgaatatgtttccgcaagcttcgtttaacccaaatggtcaaaagaatcccaaccatttgtttactcactagcctcacataagccggtcttcgtttcctctccattagcaacttcaggtccatttccgctagagctaaaacctcagggggaatcccgttgttgtttccggctacagacttaaacgaactataagccttgaaagacttggctgtttttaaagacttcactgtctttatcgacggctgtctatcgagaacacaaggtcctaacatgttcaatggtggctcaggccaactcaaaccgatccgttctttcccgcttaacatccggtttatcgttttcataccggtttgagtagaatcatcgtcgcttatccccttaaagctatcagcacgtaaacaaagttgtctgtctagcttcttaggaatcgaaaactgtctcttgatctcaacaaccggcaaaccggtattcgggtcaacaagagtcttaacttcgccgataactccaccgtcatgttttaacgcccaaagtctatcggtttcctcttcttcctcctcgtcaatcggatgaatctcaacaccagcatcactatcactctcaaaagctacttcttcctctataatatcatgtgtttcctcaaaaggtttaaacctacccggagatggtggatcactataactcttaaccccggagagttttggtctaactctgttcaatgcttctctaatcacttcttcccatttagcaacaggacgatcatcttcagctccaagaatgtttccagcatttaaaggaacaatctcttgtaaccttcacacccaacaaaacaaaaacaaaacataaataaaaatctctaacaaagaacatatctgaacagagttagttttgtccatgtcgctgacaaagaaaagtcaagttttacccaagaacgtagatatcagctggttggttaatttcaatccagtcgtcaatgtcaagatcagatggtggtgagattcctccaacgttccacgtaccaacacaaactctacaatatacataattccgacatgttaggtctccttttacccaaccaaaaaaaaaacttacatgttgaaaaagactatgataacatccgaatcttttactatatagtactgctatatataaaatatacaaatacaaaattgtaccttatttctttgttgttaatgtactgtgctcttaatgtttctgaattccttcttcttaacttcattggagcatctgatccaccccaaacaaaagaataaaaatacattaaattcacaaaattcgtatactttgtttttttaaagttgaataatttagttttaaaaaaaaaaaagatttgaaattcaacaaagggatctcaaaatagatataaaaacccagaaacaccccacagtgaatctcataactacctatgcaatttcggcattaccattgctaataaactccgccgctgctgctgctgcgtctacaacggctgaagcggctgcgattgcgtcctccgcgttctcataaacttttgattctcttcctctcgagccactaccacctgttataaaccggttagctaattaaccgtaaaaataagaagaaccggtgtttaccagagagagagaagagagtaaccttcttcatcggagctagagtcatcgttgtcttcacgagcatcttcgttttcggattcgttatcagtatcagcaccatactcaggatctctaccacttatgttcaaccactttctcatcactagctttgcccataatctctgttatataatataatccacacactttaaatccaattcaggcaacaaaatcttttttaagtacacaaaaagtttcttttttttttgtttacctgagatttctgacgatgagatttcttcattataccggcgggttcaactggagacataagaaaataatcgtaattttcttcagaccagaaagagagaatttattttattttatacaaagaggaaagtgacgaagcttttttataaatctggatattttttaattttgccagaccataaatccaaaattttacttgaagagttccgaaacaacgcgtgagtcagtcctcgtctttcttttcatcattttatgtaagaaaaaacttttttttttttaatagttgtttttctattttaataatggcgtagcaaagcaatattgattttttctcttacgatatggtcaatttttgtattttaataatctagattttcaaaccaatgtttaggcttatttttggaagcttaaagatattttttgaaaatatctacaatgattaattatgattaaaaataactttcaggaatatccgcacaaattagttttgttacgttatggtgagtgatcatcaaaggccactaaaacgagattacatatataataagattagtaaagaagtgtaaaaaattatgaaatattggacttggtataacaactctgatgggatcttacttttaagttatctgaacctttttaacataaactagtggtctcagccattttggactttaacttttggaccccaactcaacattcaacaactgcttctatagatattaaactgggttaatgtattttagaggttctttttattattgtatagtgtaggtttcacattattcaggtgttttaattaacaaataaaaagttaatcggacatgttaaaggaaaatcagaagtggtggccactggccacgcaggtgattgtggcgtggctcatttgcatagtgggtatataataataaccgagcgagaaaggtgcactaacatatcaaccagatcttttttttttacgtctatcaaccagattatttaaacgtgaataatacgaaaacctttttgttttgtaattcaacataaaataaaataaaattaggatatgacagtgtcaaaaaaaataaaaaaataaaaaaataaaaacaaaatataaaagaatataaatctaaatcacatatttataagaaatcatgaaaacacaaaattcctaaaatataatcacaattcacaagtaatacatgatactttaaattatacatatagtatcctaaccctacggtgtatcagtacatatctcaatgggtttataagacatataaaaaaaaaattgatatataaaaccaaaccattaaaatggggaatcggaaagagtgttacagcgccggaatcggccaaagcaccgggaaaatactgaaagtatgtgactaattaaatgttttataaaacttttctttatcatgcaattaagaaaaaactcttttcaattttttaaaaagaaaacttatcaaatttaccccaaaagaagtcaatgttaagtgggcttcgataacctaaaaggggttgaaaactgaaacaagagaaagaaaaaaaaaggtttgatagttcgttaatcttttcataaaacaaaaacaaaaataaaagtaaccatagctctttaacaaaaaagaaaagaaaaggtacccatgcagtaaatcatgggcatttctttgaccaaaaaaaaagtaaatcatggggattacatcatgcgatagatattttgatgaacgtagggcgaggaaaatgtcactaagcaagtttatattcggactaccgaaaagaggaaaaaaaattagaggcaagtacgttgtgccgccgcaaatttggtcgagaagagatccggtccagaagtccggttagagtccggttaatggataaggtgtttgggtcggtgtggtgtggtgtggtctgtggtgcgagaccccacgaaatacacggaccatggaagaagcctacgaaggagttttggactctattgggtccacccacttttaactagacttggatctatgtgttgttgtacccaacctatttgtttcattgcttcgatttctcacctaaaatccaaatcagttaaatcaacgaattaaatttacttaagttttcctttttattgtttactttacaatttaatataagaaaattcaacaaatgtacatcacgtctataaggattttatattttaaatatatgaaagtaaaagttaatcctacatctagcaagataatatatatttttagtcgtttcttgtctataatctatggttttacttctctttaatttaacataatgttaagagcaaaaaaaatgcataatattttctttgaatacaaattttatttaaaaatagagttagtaagtgaaaattttaattagtttgtcataattattacgacctaacaagtgcattgtatttaactgagtagatttagattcaattcgttgaaaacatcacacgcctaagatttggaaaaataagggtgcaagtcacatgaagctccatactacattcttggatgatgtttttgtacttcagtatttttatttatttgagaccctactctctttttttgtttccttttttttttacaccaatttgagagtaccctatcctattctataattatcttataaccccaaacaacaaaacattgttacggaaacatctattttttggtgtggaagttagcatgaagatggcataatatatcatcaagtatcgaatgcttatgctagccctttagccaatatatagataaacaagtagatagaatatatttttaactagatgtattaaaagggaaaaaaatatcacgaggatggatcagtaacgaaagaaaaatgaattaagagagcaaaagaaaacaaaataaaagagaatagagataaagagatcataaggaaaagaaaacatgtttggtcccctttggcatcacatcaattttgattcttgaccacaatccacaatgttataggcaaaatgcaatggtcgatacccaaatttgtatcccgtcatatatattatttatatttgacaagattttataagataagatgacatttcaacttaataaaattaaataaactatggtaaaagaaatttgcaactaacccgtagacctaccagttttaaaaaccaagtgcttcttcattttctcaaatcaaattaattatctataataaaaaaactgaaaagctcatgcttttaattaaatggattttaaataataatattttacaaaagcatatgcaaattataatgatacgtttgtcaaatcactccaaaaatgagttatactcttttacagatttgttagtgattttatctacgtaggtcattttgcaaattttactgatatgtttgtcctttttagcctagtggtatatatatgccactttaaactcagctttatgtgaattcgagaactcactcatgttgaaaatgacatgaaagattaaagatatttgtctagtcaactactgccttcagattgacacattaacattttagctgaataaatattttaaactcaatataagcttaatcaaaatgatttaaatatatatattcgtttaaacatgtaatgccatgaataatgtaaaaggcttcaaaaaattccctttaacgaaaaaaaaaatgtaggagaaagacaaaaacaaaaatcgcataatatcaaagctatgatatacgagttttatctaccaatagttgccaacatatattcttatattagagattgtgtagataacgaaaaaagtacaatgcaaatgaccaaatatacctttgaatatatggtcccaaataacacagtaactcactgttcttctctgtttttattccttgtttttagacttttagataatggtcatacaaatattccataccattgttgacaaaaaaaaaaaaaaaaccatttctaagtaattacgaatgtatttttaatttggttagtaatgtatagaaataaccatattggtaaatggttattggatacggagaataaagtctttagaagttagacctcaattattggaacaagatctatgttttaccgaaaaaagatctatgttttacttacagagacagattaaacctatccaaatgagaggaccaagttaatttgaaactaaagaaaaaaactacaatataataatgagatcagatgaaagtacctgtgactttgtgaagaggtgacgaaacgaagaagaagagaagaagacgacgagaacagaaaaacgaaagagcgatagcaattaatgcttctttgggtgtcttgtgaatatggatgttaatgtgaatgtgagctttttttgttggaaggtccaaaaaacaaatctctttcttccactggcccttttgcttctccatttatatttgtgttttacattcacatgtaatattatcatatatgcatacatttttttatttattatattttatacattttctttcaatgtacacattcttgccacgtgttcttctcgtaaagttttttgtttatgtttttatattcgcaaatataaagtttttctcgacatcgaaatttactaaatctaacgaatcatcatagtctctcatgtagtcctaccgtttcatacaagataataattaatgtcatggcctaattatttggctctgattgttttcggagggagacatgaattttttaggcacaagacaaaattttaaaattattgaaaacgatatatgaaggaaatcgttaggaatatcatcttctatatttgtattatttataacataaagaaaattatttttctttttctagtttaggtgaatcttggtacaatttggacatgaagtcaaaagttgatttcccatttaatctagaaccaacgcacaagaaaattaggtttcaactattacgtttaggggaactttttaagaaattatgacgaatgaaatcaaattaaatgtaaaaaaatatagaaactaaattagtttcttttctatttacaaaaacaaagtaaataattttagattggtaattatattaacagtctatactctatacttaccacaatggtaaaatatgaccaactacagttttaagttttgactaatttgtttgtagcgtcaaaagctggaacataactttttatttcctcagtgagtgacaactggtaaaacagatctaaaggtaaatagtgtttatctctataaaaaccagtccattcacatctctagtttaaccggcgagtaaaccaaaaaaccaacgtaaaccggtggcacatcgagcaacttattaacgtttggactttagacctccgggttttgtaaaccacagccagtcctgactacagctaaggtagttccttaccacatgtaactgacgtaaaaccaaaattaattagttgttaaacttttgtcgtgtgtttatttgatcaggattaataaactatgagaattgtcttacctcacaatccatcttcttaactgctatacgttattttattaagttatctttagagcgatgattacgtcctcataatctcattcattattcacgtacctatcaccgaatgataaaactgataccaaagttttaatgcaatcatatataattgcactaatttaaaaaattaaaataaaaacatataaatgcacttattttggtatttcttagtaagaaatataagatagtggtaacattttggaaacttctcgatcgcccaaaataaataaaattgcatctcatacaagtctaccacaaaacgttatgaaagtttgttagcggaatagagtctacatatactgtctacgatttgtaaccactaatcttaatctatgaaactattaaatcattgtactatgaaggaataatattaaattcggatgctaatcagcgagcactaaattattggattatgtaacaagtggtcttcgacgaatgaccagcatttttaaaggggattttgtatacgattgacaatgactcactgattaattaagcattcagcgcataattaattatttcatttctgataggtggcgaaaatcggcgattaatcataataatcaattagagagattttatttgtatagttttcatgatagtcacaattatgtaaataaaatcgagatattaattagtttgcgtaccgatgggttgtcgtcaggttagaactttgatcatcataaacaaagtatgaagcatcatcatcattctcatctccatctttttaaaataatttacgatttgaaattatgcactttgtctaatcgctgtctactgtctattactttcactatatcccaaatccaaatttatatatgaacaaaacttctttttcatttatttttagaaaaagtctttcagaaattttcctttatcgaaactgaatacgaatatattgtttttattggccgacttaaactatatgtaagctatagagtagtctgctcgtttaatcttgaaaactaagccgacagaaaatattgaaatctctggatagaaaattcttaactaaaataacaattataaaaaatgatacaatcaaaaccgcaaaaaccaagttttatgaactatatctgaatcttattgatcgttttttaaagataaataattattttgttgttgatgaaaaccacaaacttcgagtccctattaggctcccttaatataaaccataccggaagttcgaatctaaaccaagaatgtttatcaaaagtctagagacgtttatgcattaaatcgaatcgccgaccacattatttaaacgttactactatactatcatgagtttaataaatgcgacggtccatttaaaataacgggtccactattattatttgacacataaccacaaaatttattaggtccattatcaatgttgggcctatcgttagctgtcgtcaatagctggttcttaaattttgaggagtatgggtttcattgtcacatttcaaacatcatgcccaaattgatagatttcgtaaataatatggcaattttgataaaactagagaaaagaatatggataaaaagaaccgtttgaagaaatttatcttacgcggcggataagaggaaaaaagatgcaaacgcttctctgtcagccatgtaagtctcttcctatactcactgcttcgtcgtcgtcgtcgttgattcgtagctccggtgatgtgcgagaatgtatcgattttagagcgtcggagaaagtctcgaagtttcaatttcatgtaaccctaagcccctttgcctttcgtggtttctcaatatgtcgcgaatttgctgttcgtggagcttatgggattagattttgctcacgagaagatgtttccggtgttggaaatggaggaatcgtggcggaggaggagattgagctattgaacaagccgaatcctttaccaaaatcagaaaatgaggagagtggtaaagcagacgatgacgcgattctggagccgtttttgaaattctttaaaccggaagaagaaggggaaggaattgaatcggaagtttcggatgagacggatagagtcagcgtagagtattatgatcctaaaccaggtgattttgtggttggtgttgtggtttcgggtaatgagaataagcttgatgtgaatattggtgcagatatgttgggaactatgttgacgaaagagatacttcctttgtatgataaagagttggattatttgttgtgtgatttgaagtatgatgctgaagagtttttggttaatgggaaaatggggattgttaaggatgatgatgaaggtgttgagattgcggagtttgctcggcaaggtaggccggtggtggagattgggacggttgttttcgcggaggttttagggaggacgttgagtggaagacctttgctttcttctagacggtattttcggagaatcgcttggcaccgagtgaggcaggttcttttcttgtgccttgatttattcattctttggattcaagaactgttcttggtttgaagtattttgtgtcattgagaagcatctaatgaagagtgaattgttatgtggcagatcaaacaacttaatgagcctattgaagttaagataacagagtggaatactggagggcttctcaccagaattgaggttgctgaatttttcgtgttgattttgaggatttacatcttgctcacaacatagctcattgttggcttaatttatagggcttgagagcttttattccgaagcaggaactggtgaagaaagtgaacactttcaccgagttgaaggaaaacgtaaagcaagagtttcatcttccactgtaacaattttgtttttctgctgaatcgcagtaggcttttggctttactgttctgcgttttctcaggccttttttcgtgttgcaggtgggtcgtagattccttgtgcagataacgcgattgaacgaagacaaaaacgacttgatactgagtgaaaaagtagcctgggttagttccttcccctttttcatgtcttcataagaaaaaccaacaatgaggctaatgctttatcacataatgcctcaggagaagctgtaccttcgagaaggaacactcttagaaggaacagttgtcaaaatcttaccatatggagctcaagtcaaacttggggatagtagcagaaggttagttcattgcctattgtttccataaatttgtccttctcagtgactactagttttgaattcagtgcgtttgccataataatgtttcgacagtggactgctacacatttcaaacataactcgaagaagaattggatcggtgagcgatgtgcttcaggtggacgaaagtgtaaaggttctggttgtgaaatctctatttccagacaagatctctcttaggtaaaaacaactaatattccaaaatcaactaccacctcagtagtcagtaacaactattttgttttctacagcattgctgatcttgaaagcgaaccaggattgttcatctcagacagagaggtacaacttgagctatggacctaacttatcttttctaacctggtacaaaattgccattcatgcccctcttctagaagttaacaccatgatgttgtcgatgcagaaagtgtttacggaagctgaagagatggcgaagaagtacagagaaaaaatgcctttggtggctacaagtccaatttctgatcgtcctccgatcacaagcagtttcccacagggcaaggatgaagaaatctatgctaactgggagtggttcaagttcgagagtcagtgacaaattcacaaatccagttaataacatgttgtacaatgactttctgtatttgaaattttgatactatgtactattatgagtaaatgtctaagttctttcttcctcctgataaagcttgttcttttacagaagtatgtaaatgtaaagaatcaaagatcaacacactcaacgaagctcactgcaatagaaacttataataaactgtttcaagttttcttttcctgtaatcaaaagagtacagtcacaactcacaagcattgcaaatgctctgaatttgacctaaatggagtagatttattaaggcacacacagatgataatcagctaacaacaatggctcggtgaagaagaggaaaatttctgctaacctcttcgtttctccacggaatcaaaatcagcaatcgatcattcgttcagctgttcaagctcagcttttagctgttcgatcttgagtcccatggatcgttgcagagaagctttctccttctctgttactttcccgagcaaaccttgaaacatctccaaaacctctgccacggcgtctctcgcgcactccgcttcttcgttgaagtaaaccgtctccttcgcatccatagccatttcgatctcttcacgagcttcagcgaacttgagattaatctcgtccactaccttgtttacatctggcggtgaaccgctgctggagccggtgctgtatctcctctgattttccaggaagaatgaagcgttgtttgggatctggaaaattagtgagctagatgatgatgatgacgcttctgagagactagatttcgaatagtgagacgttgatgaaggtttgatttgaccggagacatctccaatcaataacggggaagcggtaatgcttagattctgtgggattcggagagactttctggtgaacagatttcggagagtaattgctgagtgaagacgcatggttcccgccccgccggtaaggtttctccgagattctgtaggtcggcggcgcagataagtgggcaaatgagagagattgaaattgttcaaaacttaagattccatatatgaggaagatgaagatatcttttgggccttataattaggcccaagagtaggtccacgaaagatcatgctacggcacagaagtcaaaagaagacaggtgaaggtcaaactatcaaccaaaccacagaagcaactgaaccataaaacgaagaacttctctcactgaccactccaatggcgaaccactccatttgcattgaattttacgcaaaccagactcctacataaacctcagaactcaaagacagtattgaccacaaactcgcaagccgcaacaccaagaatcttgccttttagaccatatccaatggctcagaccgttccaccatctcgaacgaagccgcttacaattttcaagatgggtttagcctctgcaagcgtccgattggttaaccttgcttctcattcgaagaggaagcttcgtcgttgggctgcctgttatggctctagagattatgaacctgttatatatctccaaaacgacatgacgatgatgaacaatggtggtgtttatgaatacaacggagacccgagcatgttgctgagtggggatcagagacgaggtccgttgtggcagaagaacattctcatgggaggaaaatgccagcttccagatttctcaggtgttatattgtatgatgctgatggacaagttgttcctccggccaagaactctcttcctttgctcacctggaagtgaaaaaaaagatccctaagaatggctaaacctacttatcatttgtttgtttgcatctgttattctatttcttggattgtaatgtattgtaccgttttatggttttctttctataactaaaagatttatggaatatgagttgtatgaaggctcttgctcaagacattcataatataacatatcatacaccaatttgcattagcttttacatcagaatcactgtcaaattgtagtataacattggtgctactgctttgaacacctaacagaggtgcaagtcatcaaaagatgtcatgattgcccagttcatgcaatattgtcacatgtaatattcaggcttcaatacgccaatgtaagataggttgcggtattgttctgcaaaatccatgccatagcccacgacaaattcatctggacactgcacatattcagaagatacaactcatgttcaacacaaagccatgaaatatatattcttaattcaggctagttcctaacaccaacaaatacttttgtttaccatggtttagctaagaaaaggcataacagggcaaataagaacggaaagcataatgtcatggtctcacctattctataaatagctgtatactctggttaaggtggcttaaacattccaaaggccttagacagacgtataatgataatacatatattgaacagagagaaacaagaaacagcttacttcaaaaccactgtagaatttcccctttccaaccagcttataatgaacctttcttctcgatggcttgtcgaggagagtgcaaaccgaaacagatgacgccttttttgctttcatgtgctcaatcaggcagctaagtgtattgccagtatccacaatgtcctcgacctttaagaaaacacataactagtgaatataaaaagtagtgaaatttcgaatgcttaagagtaaaataattaccaagacattatcaaatgagaatgtgaagcatcagtgattcagtgtggtctcctttctaatatattcatcacatttttgcatatcacaagtgttcttcaaacgttaaaactcagaaaccaacatatcaattttaagctgtaaagactcaaacttcatgaaattcaaatgaatactaaaactcaattgctaaagaaactgaatcaaaactgatgcaaaacacatattacccaaatccagatccatcacgcataaagagatggagattaccaagacaacgtgcttgttcgtgatgtcaagctttaagtcaaatgatactctgggaactccactggatacagtaccagagccgtaagactcagctctaatgaaatctatagctattggcaagtcaattcgcctaacgagatcggccaagaagaggcaagcaccagtggctacgccgacaaaaataggagtttcctccgagtcaccggagaaatcagaagtaatatcgattccaagctgattcacccggtgcgcaattacttcatcgctgaagagtaccttctctatgtgcttctctaacgccatcgtcttcctcctacttacctccacaacgaagctttttgatttgggtttttagggtttgattctaattgctattgtaaaaaaacgcgggagcttaaccgaaactaaccgaaactatttaccgtcttctgttaaacagacccggtacaaaataatttggaattgccaaattttttgaagtatatcaaattggcgctagaacgaaatcgaaaacacaaaatcgaaatccctagagagcagacgacgaagacgaagaaggagaaggagaaaaaatggcgagtactctcttcatcgctctccaatgttacgagtgttcaactatgcaggtattaaactctctcgctccctcctcttctatctctgtcaatttatatattggttagtttttagggattttgttttggggttcgaattcgcaggtgaagcagaagaagaaaagtagtaacaagtgggtttgtgtgatatgcaatcagaagcaatcagtgaaaaaggtgtttgctcaaggttataaggctaaggagcttcgtttctttgtccaatcgtttaatatgtctcgcaaagttgccgatgaagaggcacatgctgttggagattcgtttccagaggtttatgttgaaggagaggttaatgaggaggttaatggaacgaagaagcgatctgattggagtcaatacctcgatttcgattcagtaaatgatcgccggagattagctggagaagaagacggtgagtctaattcgagaatcaagcatcttatgagacaaaatagataaatatgtacttggttttgcgattttgttgcagatgtgaagattgtcactgagatgccaagcaatatgttcaaaaggccaaagctgaacaaagagtctaatgctggtggatcatcatcaaatacaggaggtgagaataaagacagtaatgagatcttcaagccttctttctccagacgcagcatcaaaaagccggattttcgatccggtaagaggagttctgctacatatgttggccatatatcagcgtttagttcaagtaaagccgttgcgaatgttgtttattaaaggcctgaatggttttactaaaacaatattctcctatccttcaaatgtgttgcagatgaagtagtgacgaggaagaaggatatggaagagaggaatctagagtcagaaagagttactaagccagcttcgaaatgggacgcctacttaatcgatgacgaaggagaacaccaagcaccaccgcgatttggtgttaaaaaggccttgaaggatgacgaagtaggaggatgggacagagcagtaatggagataaatacggaatatcagatagtagacgacgaggtacatccagatttcatgtgatcagaatgtttaaccagaatgccgattattagataaaatgctaaatgtaaagtttctgaaacgaatttggagttgcaaaagagttgacacattaaatagactcctaacgaaactagagaaagtgctaaagagtaaaagtctcaatgctaagggaaaaactcaaaacaatctatcaaagagatgtagaaaagaaaaagctagttttaaaggtcctaaaaggtattaaagcaactgtctaagaaagcgagagaaacatagtcttgagtaaacagtatgttcactcggatgaggatagagcaaactggtcatcaacagatgacacagctgctggatcagcagagcgtctgagaacatccagagcctcggacactttagccttaagagcttcaggtgactcaagaaggtgcaaaatctcagcttgatccatctccagcaacatcccggtaactttagcagcatttgctggctcctgctgctccacaagtgggtaaagatgatccccaagcatctgtcatcaattcacaatgcaatgatattgttaacaaatataggttataatgcaagtactaaatgagataagagaagaaaacacaggagatcactaacccgtgggtgtttgtcggggctagccaaagccaaatcagatgcgagcttagaaatggtgaggggagttggcttgtgagagcgttgcggagcattgtgagagtttgcagatgcattcaatggcaaagggatgatgccttgtggagcagatgcttccattccattcctcctgttgcctgcgcctcccatgaatctgcttgcattttgctgcagcatctgacagttccaagataataacaagccccaacaaattcatattcgtatgattgtgttaaagataataaacttgctaaaagacataagaactaatgataaaaactttacttgttgttgctgaaactgctgctgcatgttattagcaccacgcctgaacccaacacgagggccaggctgagtttgcctttgaagagggaaaggcatcatgaagttaggcgggcctgcacctggacgcatcccaggcatgaactgaacttggtacccataccccataggctgtgaaggtaccaaaccttgaccgttatggcctatgaacattggatggtgtggtcctgacattggcccacctggtgggtgatgatggaacccagacatcggtgatggaactggtgacattgttccaggtgatctgatttgagtaaatagactctgaaacacgtgaaaacatcaagacagtttaagaactcagtgtcacaacacaacacagtacagagtttgatgttcaaagagtgagagggctaaaaagaacctgaaggtgagcctgtctttcttccttacgttgtgccaaagcaacgtaaagaggtttccttcctatcatcttcccattcatttctttcatctgcgtaatcatcaaccccaatgaacattttagtaccaattttataaaacatttatgtatatgtaaaaagattgtcaattcagttgaaacttacagctaataaagcttcttcaggattggagtaagcaacaaaaccaaaacctctgcttaaaccttgtgaattcatcataacctaattatgaccacaaacaaaacattttaattcattatattgtgtggtataaacttatgtataaagtttagagatgtttagaatcagaaacaaaccttgcaggaagtcacattcccatactcagagaacatctccttgagcttctcatcattcacactatcatcaaggttcttcaaatacagattcgatccttgcaatttctcaaacctgcttatcctctcttgctcaaacttcctcctcaattcctcttccctatcagacttcttctgtgccctaccaacatacaacacatcctccccaaggctgataccgttcatcttttcaacagcaactgcagcagcttcagggctcacaaagttgacaaacccgaaagacctcgagttcccactctgatccttcatcacaaccgcactagaaatatctccatatttcccaaaagtcttcttaagctcatcatcagtaatctccttaggaagattcttaacataaacgttagtgaagctcggcaccgcaccactctcactacgtgccctgtcttgacgacggacaaaatggccaacaaagacttgcttatcattaagcaacataccattaagcttgtcaatagcagcctgagcggtttcctctttctcaaactggacaaagccatatcctttcgaacgtcccaccacatccattgcaaccttgcaagagagaatcgtcccgaaagacgagaaagtttcatacaaagctttgttatcaatcgatgcatcaaggtttttgatgaaaacattgcctttcccactcaatctagtgctcggatcacgattagagagcatgatccttataggcctgtctctgatcggagcatagttgagactttccatcgcacgactcgctgatccaataaaaaaacacaaaactttaattacaaaacagcaaaacaaaacaaaacaaaacagcaaaaagaacaaaaccacaaaagcaaacacatgaacaatattatattcctgtcgtaatccataataataatattaaattcctgtatgattgtttataatatttaccatcttcagggttagcgaaattgacgtaagcgtaaccaagagaacgatgagtcagatcacgacaaaccctaagattgtgaactggagcaacttgattaaagagatccaagagatgtgactcattgacactcggatctaaatctccgacatagagagacgagtttggatgggtttgcaaagcctccgcggcagcagcagcagcagcaaccgccgcaacctgactcacggcagggaaaggaggaggagcagcagcagcaaccgtgggttgattagggatcacttgatcaaccatggccgtcgtcggggcaattccagatgcaaccgccgcagccatagcgataagatttctaggtttttctagggtgagacagagagatttctgtttgtggttttccaaaatttttaggggagaatatttatttttatattttttcctttttttttttgggttactccggtgaataagaagaggagtagagagactcgaaagggtgtgaaagaatgagagttggtatttatacattcgctaaccaaccggtccctacggatcagagtttgatttgacgtggcttttgagttttgactcagctttttaattcacatctgggatctttttgtgggccaatgggctttttctgtcctggccaataatccaatgccacatgttttttttttaatgataatcaattatattatattataaaaatttaaatttatatgatatataaccatccaaatacaacaatcattaaaacaaataaagaaaactgaacacaattttgacgaagaagtagaagggatcatgcgttctaaacggaagccgcaaccgaatgaatctgttaagtctgctcttcatatactcgcaaaaaactacgactaacgtcttatagatgagatctagtgccacatagatatttatgttttttcttaacatcttattactctactttttttttttttttttccgtctacttctccttcttaattattttgttgttatcgtcatgtctgttttttttgttaaaagaggctttattggttcataatttacacgaaattttgatgactttaataatatcatagaaagtaaataaatgaaagattataaactattgctagagagttttttataatcttgttgatttgtttttcacaatctcgtaaaaaaatttaaacaatctctcgattttgatgatactttcatgattttattttgtgaagaaaaatgtaaaaaatcataaaccattaacagaataatttaattcattaacaatcatagattattttgttttaattgaataacgcaaaatatttaataattttataaaaatataaatcaaataacttcagatttatgaagattttatattactttttacaaattctaaactaataacatctacaatagtttagaatctttcatttattcactttcaataatattattaaaatcatcaaaattcttagtaaattaggaattccagatagtgtcaagcaggatgttatcagcaacgtcaacgcagccgcgataaactcaattttatacattaaatcaatatcaacatatttccatagaattgtttaaaacatgagacagatttttggtatgccacaaggctaatctatagaattcatggacaatattttgtggatgagacaattttgatctttaaaaaattccatcatcaataaatacaacagttgaaatctattgaacagagattgctaagtactcgtgattaatagagtaaaatgtcagactctagtcgactaaatattttctaccaccaaaaagtaagttcgatatgggtgatgttgtcattcattttagatatttctgaaacactatctgacatatgtacgaaactgagcatgtcatgcgttacaagactaaattttcatattatcagggaggaatgtagagattaaatatggacaggcttgttgccaaactattgggttttagaaaataagtatcagtttccatcaaaatggcaaaaaccaaatcgcattacacatggaaatgcataaaactataaacttcaacaaaatgcaaatgaagaaaatgattgctctctcttagttctgaaagcaagcaatttggcgcctcaaggcgtatcaaagacgaagagtcttgccaaggaagggaacttgttgggttaaggcaagagaacctctatatatatggtcgatgaaagactacaaatttcgaccacattttaagcgagacgagtgttagggtctgcgaaactaccagccatacttcttgaagaagtccctggttctctttctagctcgagtgaaaactataactatgcatgcgagcacccatggaggaaaggtcccaatggagatgttgttcttgatccaagctggagggtctttcaatagaaatgttattaagagcgtaacaatcacaactccgagaatgattctggtgatgggtttgagcagggaatcctgaaaacaaaaggtgttcaaattaatagtgttatcagatgaatcacccaattaaagctgcatgttttaatgctttttttttctgttcttgcaacaatattatccaaagactttttacgccccaacgaagtcagaataccatgacatccattctagtttctacatgcgtattctaaatctatgagccataggagtgattccaagaaattgtttactttaagtaagaatacaagctttgacctaaacctaaggttccatgagacaccgaatccacgttaattgatattccagggcaattgaagagtaaagaagcctagaaagtctagagacatgtatgaggtttatgagcacaatcaaaagaaaaccatcaacttatctaaatgcagaacgccaatgtagagtaattctacaatccaagggtatgaagaacatgtaaaggagacaagaagcagattgggtcctatcctattccttaatcatgcgttcagagaaggtccaacagatgcaatgcaacaatattcaccgtgagtttattcattcaagcatcagtagggaactataactaagctaaggagatcgttctctgtccttttttcctattgcgtaagtgaaaactcaaaatcaaaacaatcagattacctgaggttcaccgtcgatgtaaatgacggcaccatccctataaggcaacacagaccgaccattcctagggtgaaatctgatcggaacagcacgacctttctcaacgttgaaagcgaagattgctttcaagccatatttctcaagaatagatcgaacctcgagctgatcctgctcataaccgccgagatttgacttgaacacatcgatcggaccttttccacacttatacagatgaatctccacctcaggaaccttcgccgccgcggtcgtcgatctcaattcactttccggttgagaattttcgagcaacggagtagtctcttcaatctcttgatgtggtggtggtggatctctctccttctccttctccgtcatcgatgacatgactaacaattcaccgtccgatggaaaaaaagatttataatcccaggaaagcaaaaaataaatattctgttcataacgacgtcgcttagtaaaaggcctcgtaatgtttgggccttatgatgggcctaaagggtataatagacaataagagattggttattcggttgttaccttttagttcgtcttctcagaggagaagtgttttttttctccggcgaggttggaaaaaaatggaggcagctttgggacttctccggagaatgccgccgaagcagtcggagacggctctatctgctcttctaagcctcattcctcaacattcttccgatcttctctctcaagtcgatctccctcttcaggtattttctatctttatcgagatttgaaaatgtgattttgttgccttagtcgtgcttatctcccaatgtttggtttggtgatgtaatgacaggtgttacgtgatattgaaagtgggaaagatttcatcttgtgtgagtataatagagatgcagattcctacaggtacttttttgctctatttcattgtgtagagagaaaattcaaaatattggatcgctttggtttgggatgatacagtacttcgtgttcatagctaaattgctatttgttggttcttgtaatctttacttttgcaggtcaccttggtcaaataagtatcttcctccgctagaggatgctctttacccatcttctgaattaagaaagcttgaagttgaagccaacgatatctttgcgatctatcgtgaccagtgaggttctttacctacctcgttcaacatgaaaaccatgtagtgaaagtaatttgagttatctaagacggagacatagttagcatctgatctgaaaaaaaggcttgcctagtcgtgagatttatctcatggtttaacaatatatgatatgtgtttcattcttctaatgtatccattagactggagactgaaaaaagcttgcaaagttaccaaaagaacacctgtgttgatcagttttcttttccaggtattatgaaggtggtatatcttcagtctacatgtgggaggatgataatgaaggctttgtggcatgtttccttatcaagaaaggtacattctttctgtagagttcaataacactgaatgttaggcaataaaaactctttacctgagctgttctggtttttatttttcgaagatgggtcaaagtcaggtcatggtcggaggggatgcctggaggaaggagcgtgggatgccatacatgttatacaggtgactctcttaacataccattaccaagcgtgccttatgtgttttaaaatgttgcccattttgtaacacataccaccctcaattgcaactttatcatagtttcctaagcagctctttaatgagacttcatattttgcttctaatgcctgaggttctcaactaggttggttcagaggaggaggaaatggcacaatattgcttaacaagtaccatcatgctttctctgacaactgatgatgagtcttcgggcaaattcggcttatctggatcaattagaagacaagtaagtattagcttctatttagcccatgccttcatagataaatagttcctggtatgaattgtgattcaatggaggaaaaccaaatatctgtaaaagaataacattattctgctactgttgaaattagatgaaaatggagctagcagtagctgacggacacctgtgcaatatggggagaatgattgaagaattggaaggcaaactgaggaactcacttgatcaggttctacctccaatccctgcaccaattccacaaactccgtctacttgtgtaaccgccatatatgctgaaaatggtttcttaattaccggcattcggattgcttagttagttaaagctcatgctacagttgttctgtggtgcttggcagaccccaaaataagtaaacgagaattgtaggataagttttagatcaaatcactttctaacatctcatgaattaatctagaccaagagaaaagaataacgtaatgtgcgtagcttcaagggtttgagaattgtttggtgaaaagcgcaggtttactttgggaagacaagagaaatggtttgcacattgcgtccaccagctgagattgtacaaatgagattgcctgacacctgacctgatgctcctccgatcacgctttatgtaagaaggtctcgatatttgtttgttttggttggtctgatcttaaacgcttctccgagtgttttgtgtggatgtctcttactcccatgtttttctctgacttcaccatcatgtgaccatcttttcccataaatataacgaatgatgcagttttaaaagtcgtataaatattatggaaatgcttggttttctccaaaagtatagaatagcagaatcagtggtggctgcgacatgttgtgaacttaggacctaaagcatcaaacctcatttagtgatatcgcactgccttcgacatgcataccgaatggacaaagaaagtaagaatccttgatgtaatcgccatatgagtccgtttagcgcctaggtgccatctagacggtcagtaactaataacaacctaatcaataactatacaaatatttttgtccaacatataaaaaaagatattaaaataaatttccttttaaccaaaatatcagtttcctttttcggctttcttttttttattcttgttgtagagagagatataaataaatatcgacgacgacggtactaatcgttttgctaaataatttcattcgtcttctcttcttaactctttaaaaccaaaaactgaaaaataaagacaaaaagtctcctatcgacgacgaatacgaaagatctctctcttcagaagaatttaacgaaactcaactgtttcgaattcgatttgaatctcgacccgttacttagcaggaagaagatgaagcagcgcttcaccttcttcttcgttatcttctcttaataatccccaatggcttcatcatcatcccaacgacgctgcgtttttggtaactcactcttcttcttcttcttccattatcactctgtgaattctcttcgattttggattcaattggcttaaagttttcgactttcttcgtctattttagttgggaacattccttacgacgcgaccgaggaacaacttagagaaatttgtggagaagttggacctgttgtctcgtttaggtcagttttatcgttcaattatgatttagggttttgataaaggaaacacttttcttcaaacaaacgaaacacagaagcctaaaaaactttgctttattggattcagattagttacggatagagaaactggtaaaccaaaaggctacggattttgtgagtataaagacgaagaaacagcattaagtgctcgtcgtaatcttcagagttatgaaatcaatggtcgtcaattaagagttgattttgctgagaatgacaaaggcactgacaaaacccgtgatcaggttactcctctctctctttcttctttcaatgttggatggtttttaactgttgtcaagaagttataactaaagatggtaaatttgggttttcagagtcaaggaggacctggtttgccatctactactactggtatgttttgttttcagtctctgatactttactgactgcaattgtgtttggatgaacacaaacttatcgttgttcttctttcttttggctgtttagtgacagagtctcaaaagcagattggagggccagtagattcaaatatgcatcagccagttggtctccaccttgctacaacagctgcatctgttatagcgggtgcgctaggtggtcctcaggtcggttcgcagtttacgcaaagtaatctgcaggttccagctagtgatcccctggctcttcatctagccaagatgtcaagaagtcagcttactgaaattatatcgtccattaaggtgtgaatcttgatatcgttttttctttctttttttgggtgcattgttatactattggaagcgagttgtgtgatgtgattgtgttctctcaatgtcagttaatggctacacaaaataaggaacatgctagacagttgttggtttcaagacctcagttgctaaaagctgttttcctggtactcactcatcctcttattgtgcaaatcatttttcattattgacaaatatttcttatgatacttacaccatatttgaacctttactttgtctacccttgtaggcgcaggtaatgcttgggattgtgagtccgcaagtggtaagttttccatcttatcgaacagttttgtgctacttccttctttatctatctgtcatgtcttaagaggactattgccattcttgaattgtgcagttacagtcgccaaatattgttcaggccccaagtcatatgacagggtcttcaattcaagatgcgcaattatctggtcaaaaccttttaccgccactggcacaaaggtcacagcagctaagtcgtgctccccatagtcagtatcctgtccagcaatcttctaaacaaccttttagtcagattccacaactagtagcacaaccaggtccttcttctgtgaatcctcctcctagatcccaagttaaagtcgaaaacgctccattccaacgccagcaagtggttccagcttccaccaacataggttatagtagtcagaattcagttccgaataatgctatccagccatctcaagtaccccaccaagcattaccaaattctgtgatgcaggtgagtttccacaatatttttatttgtttttttggattcctctgaacataacttctcatgtgtaatttacttacattacagcaaggtgggcaaacggtatcattaaattttggcaaaagaataaacgagggtcctcctcatcaatcaatgaacagaccatcaaagatgatgaaagtggaggataggagaactacttcactccctggaggtcatgtgtctaattcaatgcttccgaatcaagcacaagctccccaggtattatcaatcacatcatctaatgtcgcttagaatgccctgaataaatctattaatcggtaaaatccttactcttcttccagacacatatctctcccgatgttcagtcaacattgctccagcaagtaatgaaccttacgccagaacagttgagattactgactccagagcaacaacaagaggtcttaaagctgcaacaagccctcaagcaagaccacatgatgcagccttcatagcattgaggtaggtttgttatatatatatcatcgacctgtgttgctgtcattcttctctgtgatatttgaatctaatactcgtctcggtttcacctctctgatatatacaggggaaagcaacacggttggtcgatttcattgaatagatcaaaaaggatatttttccgcatacaaatcaccatagaaagaagaaggctctctcacctgaattgaggtgagtgattgtacgattagtgtagcatttatttgtgctgagtttgtcttatagaagaaacattcagccatcaaaatataaaagaaaggaaaagttataagttcaaagtctcagaccaactgtgttcgcctctctcttttgatttttattttgtttactgtctttgtttcctgcattaacacacaactctcgtactcgttcgttggttttaatcctgtggcccctggtttggtcactggtgaagattttagtattttaataaacattttattttcactacacatgtatttcggctacgcttacaagttataaatatggggaaaaaataaggttgactaaaacgagctttgacaaaacaaaaactgagattgttttatttgatgaagaagatgttgatgcttttcttttataaatatgctgttgtgggatcaaaacagccattcctctgattctcttcaagtttatgtaaaaattataaataactcaaatcacagtagtcttgtctaaaatctgcaagtttttatttgtaatcggacatcaaagaaaaatcctgcgaatggttctagcaaaagcccgagtcaccaatcttccaaccaagtcacctggcaactgaagcaacctctgttgtgattcctgtggaagctgccacgtttcattcaaaccccaaaaaagacgttaggacaattattctagtatcacaaaatcttaaatactgtaatgaactcgtaaaatcaagttcagttttgcaacatctgttacctcaggtaatatggagagaatcggaagcatctcttgtgctgatggaagctgatacatgaccagtgatgcttcgtctagaggcgtgagcgcctcaccatatttactcaccgcttttacttgctgcaattttgttgcccaaaacattaattaaagataaaaatagcagaagaaaagagaaatttgttaccgtgcttacgcttttagccttttgcatccctgagaacaatgagatgaggcgatagaaagttctaaggtttgtcatgtcttcttctgtcaaggaactcgatggtcctgaaccagaaaatgtaaaagagtccaaagttgccaatccatatgcatcaagaccctgttgaataatcaatccttttgatcaacaaacaatgatatttgcacacacatattgcaagggatttcgattattatcaaataaacataaatgttcaaatagtaatttttgtccaatatttgcttctcaagccaagcgattgaactgttgtacttttattgaagagctgataagacatattaaatgctcaccttagcgaattctcgaagaaggatttctcttacaaaagaaccctgttcaatgtttaaagattttaagtagttgtaacatcagttttacaatccgtagtacaaaaactaccacttaagtatacctgttccgtgaaagtaaaagcaagcatttgcttcatggcaatattagattctgtccccaccactggtttctgaactaatgctgtctctgtcctaagagactggagaaagtagatgtggataagaaaccaaatgctaatatttaaacagaaaaatcctataacacccaagctattcatttccccaattatcatgcagctttcacagtctttcgttggctcttaggcagtttggttgtatgattattcagctgtttactgactaatttattattgaacaccacatagcccattaactcaaagacacaagcttagaaaccctaataacaaacaacaacgtaactgaggtgctaatgtacaacaaaaattagcacatataaacgataacgaccaatagacttcagtgcattttgcaatagtcaaacaaccaaaaagggattaaaattcagtctcacctcagaaagcaaagactcaagacggtcaattcggaaaacaccttcctggcagagacgcacatataaatgatagcgttcaggaagaaacataatgtgaaacaagggtgaccaatctgattagacaagatagtttggtacctcatataaaagattttgcagagagcttttcagttgtggagagctgtcggttagaatctttctagcaatccaagggtatgtactgcctagaaccttgtagtttgggcttataccgatggcaatgccctccaaaacagcaagactggggaaccaaagatgagaagccaaaaaattatgtgaatgctgcctcagtagacagaaaatggctaatcacatataagccgtggttgagtacttgccaaataattgaataaagcataacgcatagaccagttggacctacaatcttgtgcaaaagctctgagcatttttctatgtttatttaaacaataccatatctacatgacttaaatatttgagaaatctcaaaagctcaaaacatttaagtggctactagagcaaaaaaaatagattaagtacctgcggataactagagaaaaataagggggtattctgaatttgaatcggtacctgaaagtttgacaaatgaatatcagcatctaataagtaagcacaaattctaagtagagttcttttaatgtccctctgtaagccacatattagttgaagtaaagtgttactacattgtttttcccaagtcgccaagcaggtcaccgaagcttatattgcgaactcctctagaaattgcatcttgaaaaacatctgtagaaaagaaagtggaagcaattgtttcagaacagcacgatcaaaactttcaatacaaacaagtaaatacctgcataaaaccaaaagcaaaaacgaaccggttaaagcctttgtcacagcgctcttttctgctgttggtggaagaagcctatagaagttttgcggataaaattaggaaatgttgacaattaaaagttcagattcagatagacaccagtgactagagtaccccagagttacaaagtctttagccagcgctttgaagtcacgatttacaagatgaagacatgcttccatgaatccatcacgtaattctggcctaaagtcccccatcataccaaaatctggcagcaaaaaaaaaactaaaagttcaattaagttataaacaaaagatacttcttgggacagtaaaatctctctttagtttgtagatatcaaacacaagtatatatacagaaaatcagatatccagagtcatcgaaagtcccattcgtatctggagcgtataacatcgaatcatcgaaaatagaaaaaccattcagcaaaatagtacataggtattcacgtttctggttaattcgcggtatgatgacatagattagctgaaacacaggtagaattgaactttaaccaaagcatcagtaaccagtcgttattctttgaacgaaaaacaagtatacaaaaacattatctggaattctggatcatggagggcagcataataacacataacgttagtatcaagatcaacgaatacctaagtatgcaagttgcccatcatacgtgcgaagaaaattcccagggtggggatcggcatggtaaaatccatactccagaagttgattaaacgaacagtaaacgccaacctcaactaaataaaggtcattaacttcattaagcttctgaccctgccatacagaaagtagaacacacaaaattatagtgtgcttaagatatataaaattcctttgactgagaaaacatatacaactctttgacgcaaaccaaaaaaatgatttgtcgattgcgaatgtttgacttcatacctccacccattccattacaagaactttgctggtactgtactctgtgtacatctttggaaccaagacatctttgatgccaccatacaacttcctattcaagcatacagaatgttactttagggaatcccttatagaagatttaaccattagatgagctaataatgttgtagacaaaaatatcatgttttccagtaccaagattacgcaaatcaattatttataatgaaactacaatgttagtcaaaaccataacaaatataggatatcaaacaagggtggaaaagactcaaaccttagcaggatttacctaaattttattccgttttgagcttcattcaagtaatccatctcctgcattcaatttgatttacctgtattcaatataaagctctaagatattcctcgaacacgaattaaatgcaacaactagtccatctaaacaatctttcaagacattaaagaaatcgttagcatcgtcaccttaaccgctgaaaatttctatggaacagaaaagcaggattgcataaagattaaagagaaaacagtcaagtgctcttttttgttaatgacgaagaagagaaacatcaataacttaccaaattcatcaagcaaaatatactcttatgaataaaaatgaaaatgtctacgaaaaacatggaaacctacttgtgataagagtgtatcctttaccttaaacagacttgttgcccattcatcaacaactgcctgcaaatggaacatcactttttagcattggaacgggttaacaggacactctgattaacttaggctccctttttttctctcagacagaaaatgagaatcaaaattctttaaaaaatttcgactagaacaatctgaaatggattctagagtaagtttcaacaaatttaaatgttcttcttctgcaaacctaaggaagtttcaaaagttaaagtaatgttgacataaaacaattttttatcagttccaaagaaggcaccaatttacacacaaatttcaagtcacctcgagatcagagttgaatcttccagcctttttaatcaaacccgctatataccgaagaattaatgtgtccaaagcaattgcagctcgtacaccagggcgctgcactttgacagcaacaacctttccacttctacggagcctagcttgatatacctgaaacgtggaccagagtaggatccacataatagaataagctctcatataaagattggaaataagaaactagcattaggatcagctttagaccatcaagaacatgctttcccacgtacctgtccaagggacgctgcagcaacaggctcaggagaaatctcagagaaaagctcatctataggaagaccaagttcatcctcaatcatattgaaagcaacttcggttgaaaacggagttatttgatcttgtagcagggagagttcatccaagtatataggaggtatcaaatcctagtttcgtgaataaagctagttcagaaaccataatcttcatagcaataacaatcacaaagctccagaaaataagaatcaaacatgttaagaaagacgcttacaggacgagatgaaacagcttgagcgattttgacgtacgcctaaaaacaaggtcaagacatgataagaacactagcattgagcaaattgatggactgatgatgaaatctcaaagaacacgtgagagataaccataccggacctagctccacaagcaatttcctaagctccgctgctcgtacctaatgataccaattcgtgaaatcgaaaacgaagcatgagaacacaaaatcatcattatcattgaagagcaaatcacgaaattggaaaaaagaccttgaacatttgatcagagcgttccaaagcctcatcagctaagcgaagcccaaaccaataactaaacgtagttccgatctgagctaatctacgaagcagaatcagaggtttcttcttatacatcccatcaatcctgggaaaattgtactccgacaaagaatcagcctcatcggcactgagactgaacaaataaccggatttactagtgaaactatctacatctctagacgcagcggagacaacaacggcggagtttcctcttcgcgacggccaagatggttgtggattaatcagcagattgggattggcgggaaaagaaacgattggcatagaagaaggaagccgaagcatctctttcaaaatctacagagttatcttctttttcttttcttcttcgccaatggttgttggtgagattttgaatatcatgcagtggattcttctaagaaatggcaaataatatggttctctactgttttatctcttttttgccggtcacattctttatactttctctctctctcgacatttgctgggattttctgtgtcacacaaatggcaccaatctttttgtacgttttttaagtatttatatgtcatataaatgtactttatttagctactaatcatattttttggttagtgactaaaactgtatcattccaaactattcataataattacgtttaaaacttaagaaaaacatatgaaaaagtttgtagattgtctgtttatttatctgtccttggatgcttcctttgaagaaaaagaaatttagtgtatatataaaagagataaagaatatatcacatccacatatttggtaattgatatataactctgtagatcttattccttttagataccaatgactcttctttttatgtaaaccatcaaaatctgaaacaagctgaataatgaaatacacatatcttaaaatatatttttactagtagtagtaattagtaaatatcataatatcagtttgtggagtattttagaaagaattcgaacataatatattttcgattttttcctaaatgtaaactttcgaattttctctagtatgttcttaatgaaaaaatgtaaacttaccaaatgttgctgatatatttacaaaaatgtaaagttagtgtcgacgatacatgtatataaatataatcagtacacgaaaaaaaaggttaagaaagattagagattggtggtgtggtgaacaagaagatggacatgtatcatttgacagaatacatcggcgtggtatcgggcgtccttatggtagctcttgcttcgtgcttgtatggccattacctacgtcgcatggtatgtccatgttgtgaacctagactacctagtgactctaatgcctaactattatcattttgctactgattatatttatataaatgtattgtcgaaaattgtgcgtccgtttatcctctacgctaaacggactctagatgaataattatttgtttcaaaatattgtaactctattctattgatatttatgagattttacaaatttcttttcaaatagtttgtacttggaagctgtcattttcttaggctttgtttttctttttcgtcgagttcaatattccatccatctcatcgatttatttcttatatattacatgtactacgttatgtgcaaaactttgatgatatcacaactaatatatcacatccaagttttgcaaagcatgtcgtcaaattataaacttatcaaaacatatgcaaccccattaatatcaaacgtatgtaacatcgctagataaccaatcagacccctacgactaatattttcgaattcgatacgttatggtaagatttaaaatcgatgatattttagtgacatttcaaatgattaaacatataacaaaaaataaaaaataacacgaacccgagcatggggttaagatttgcgttttgctcaacgaattagcgttagcgtttgcaaaaaaaaaaaaaaaaaaaataggtttgcatcaacagctggcaaaaaagaaaaagaaaaatcaaaaccggcgagacggaaaatttcagcgtttccgaactttccattagagtcgcgagacgatagatgagactcgttccagaaatttaatcgttgcttctcttcccagctgatctgcgtccaacatcactgtttccaggatcttcagaatcagcgaaggaagaagataagaggacgacgaagtaattgaagttggagaatcgcacatttggctctcgatatttgctcaatgacttcttattcggttgcgtccatttttcctctacgtttctgtttccagatctcttgattctcctctgcgttatcgtaattgtgctggaattttgaataactttgcagaggtagccttcaatttaggatcggagttcgtaaataaggtgatttagcgaagatgatggtcgaagatcttggtgtggaagcgaaggaagcggctgtgcgagaagtggcgaagctcttacccttacctgaacttttgcagtctatttcttcaatcaaggccgattacatcgctcgtcaacaggtttgacatcttgcttttgaattgcaattggaactgaattggcttttgaagtatcatttgcactgagtattagtgattcctgagcaatgctagatttgagttgttaggttttgatatgctattgttatcttttattttcgattttctggaaatttttaatgacctgactagtgatgcttgctgtttcaatcaggcaaatgatgcacagctcagtactatggttgctgagcaggtacagctttaatctggccttctttgtactttaatgtatttcgacttttttgttgttcttaagtaatagctgttgacaaacttcaggttgaacaagctcaagctgggttagagtcactttcatcatctgagaaaaccatttatgaactgcgggataatttcatttctatcgacaagtatgtttttgcttgactagagattcttgaagctgagttaccaacttttgcatttctctccctctaacttctcttcttgtgccacaggctttgtcaggaatgtcaaactttgattgacaatcatgaccaaataaagctgctgagtaacgccaggaataatctaaacaaaactctaaaggtagatatgccgatgagcactgattgtattgcttacagtatttggttcagtgttgtccttctaacttattcttgaacgcaaatatatatagctctgcatggtcgtctcagatgtttaaatgctttccaagtttttgtcaacttatttttacctcattctcttttttcaaggatgtagaaggtatgatgtcaatttctgttgaagctgctgcggctagggattctttgagtgatgataaagaaatcgttaacacttatgaggtagcatgagttcctcttcccatggattccaggcatttctgactgcatcactttgaaaaaaagaacgtttggtgtaagacataatattctgtttttcttccatagagattaacagcacttgatggtaaacgaagatttgcattagcagctgctggagaggaggttgggaggctgaggtttgtatatattccactcgtttcctttctttgctttttgtacttacatgaagtgagcccgaaagctttaattcaagagttactggtgtgctatgaaagaaaataggtctctatgctaaagtaatgagcagtaggtagagctgttactcttttggtagtgcatatgatgatttgatcccgcctctggactgtcttttctttttacatgagcatgcataccaacttctaaagagttgttttgatgggttcagggagtattttgaagatgttgatagaacatgggaaacattcgagaagacactatggggtcatgtttccaactattacaaactttctaaagaaaggtattttgagtaaatatatgattatgctcaacttctccgtgtaattccattttttttaattatttctactgccttattttagaactatgattcttgctggttttttataagagtaaggctaggaagttagatcaaggatgcaagcaatgtcaaaagatgagatggacatagttggactgtaccctttattctgtagctatatatgagcatttatatgataatacatagtttatgtaatgctctgttctctgttttatgttcttagccagaccttggggattaagtacacgtttagactttgctccatgttgaaataagctattttcctgttgttaagctcttaattctgctaagatatcaaatcttacatatccttttggtttatcttaaacttactgatgtatctttgttctgcagtccgcaaacactggttcgtgctttgaggtatgatcccccaccagagacattctttacctttgtctatggcatatattcccaaattattacgtttcagtaattttgttgcaaacaaatctattttaattagcaaggaagatagtgtatacctattttctggtgattagcatcaagatcagttcaaactggtttagtaggacagcgaagtcattgtgttactgtgacaatcatttttagacaagcaaattgtttctttttacttcctttaatgcaacatgcattgcaatatcatggattttattttggcattagaagtttcttaaacacaaagtctcctatccagaagaaaatgagtagactaatttaaagtgaactagttaactagaactggtactaactttcaatggtttattctatcaaagggttgttgagatgcaagaaattctagaccaacagcttgctgaagaagcagcagaggctgagggagaaggtgcgatggcatctgtagcaaatcctcgaaggcctggcaagtgagtctgatattttttgttcgtatttgtcttgatttgttgtcttatctgttattcaaaatatctttcacttttttactaggggtttgactaagctatattttgcattgatttaatgtcctgaaaagcaatggaattttattaaagtccccataatcatttgtgacatgtcctatatttattctgttgaatccaggaaatctactacaacgtcagcgtcgtcaaagggtcttgctcaacagaaattaaaagtccaagggaaaggctacaaggacaaatgctacgagcaaattcggaaggcggttgaagatcgattcaacaggcttttgacggtgggactttctttttgaaaatttcatttgatggcatagctacaagtaatgtgtttctctgtgtggtcatcctaacactgaactattgaacagcttgtctttgaagatctaaaagcagctttggaagaagctagaatggtttgtgcgactgtttcccttgctttcatacacttttcttcattttttcttttctgcagtttatgaaattatattcaactatctaatatatttttgtttctcagtagatcacctttagttgactgaattagttttttttttggttcttaataaatatggttgatgaactagtagtatgttactgttctgatacaaaagttccaaattggcctgaccgtcttatattactgttcctgttccataatgattgatgtcaacctcgttttcttctgttatctttcacaaatatatatttatcaactgggttttcactttctttttatggtgttccacaactagattggagaggaacttggagatatttatgactatgtggctccttgttttcctccaaggtttgttcctatctcgttttcctcaagtggacaatgaaagattacagcttaaaatttattctgttccccaagtgaaaaagggttccttagcaatcttctttgctggcagatacgagatatttcagcttatggtgaacctgtataccgagagattcatacaaatgctcagattgctcagtgacagagcaaacgatctgacaaatatagagattttaaaggtatgtaaagcatgattcttagttctcccatgttgtgtcgcaactcaaactttgcagatactgcttttggtgctttggctctgtgttttctgactgaatatcaaggacatttttaatcaaccatgcatgatatttaagtaaatgtcaagctagtccgagttatttgacagggaacaccatgggaaattataagagggggtactaatattatgtgactgtctttgtgttgcctcatcaaaatgcctcattcgttttttaccttgtctctgtgcattaggtatcctttagagagtgatgtatcttttctttctctcttcgatcttgctaggtgactggttgggtggtagagtaccaagaaaacttgattgcacttggtgttgatgattcactagctcaagtgtgttctgagagcggttcaatggatcctctaatgaatgcatatgttgaaagaatgcaagctacaacgaaggtaatgacatacacgtttgacctactctgctagtttttgacgttaaaaatttttataattctttttgcttaaacttttgttgccaattctttggttgcagaaatggtacatgaatatcctagaggcggataaggtgcaaccacctaaaaaaactgaggaaggaaaattatatacaccggctgctgtagatttattcagaatacttggagagcaagtgcaaattgtcagagataacagcacggatgttatgttgtacaggattgctttagctattattcaggcaagttaaagaggttgcaaagacatttctttgttcggctatgaactgaaaatattccatttccttactcaggctatttatttactatatatactcagaaatttcaaatcgttctttgctttcttctaagactcgtgaaagttaatgttggagactttacccattcccagctttttttttcatatctcacccaaaatcgttgaattccgtttacccccttttttctcttttctattttcccccctctttcattgtgtctaacttttatacttcttaaatttcgtaacttttgtagcattgtgcatgttctaaattttgattcatattgtgaattacttcaggttatgattgatttccaagcagctgaaaagaagagagttgatgaacctgcatctgatattggtctggaacctctatgcgctatggtatgtcaaaagatatgactcttttgatgacactatttctttctcccattttcagacgaatatttatatgttaatattgactacagataaacaacaaccttcgctgctacgaccttgccatggagttaagtaatagcactttagaagctcttccacaaaattatgcagagcaggtaatccagctgccagtttctgagctcaatttcgttgcaattgattattttgtttggatatgtcaaattccactgcatcatgcccactctcagtcccactatactccacgtctatgtgcacatacactcttgtttgcatactaataaaatgcttctctaatgtggtgtttctgtcaggtgaattttgaagacacttgcaaaggtttcttggaggtggctaaggttcgtcaaagattcctttttctccctggtcttcaatccaaatatagtttttgcatctcgatttatggccttacagttgcccagatggctgttgaaatgaaatttcaacttgatcttgcgatctttaaagttaaaatttatgttggattttacacaagtcccatctggtcctttgatttcaggaagcagtgcatcaaacagttcgcgttatctttgaggatccaggagttcaggaattacttgtcaagctttaccagaaaggtatctactattctgaagaactaatctattagctttactaatgtgtgaatagaggcagtcgagtcgttgtcacctccttgatactgttgctactggtttccattgatttttaatagataaaactattctcatatgcattgattttctacatgttatataatgtaatagttgtgttctttataacataatcatttcagaattaagatatggtcttctgtccaacttaattctcagtgagatcactaattttacttgatacgtgttcttgacttgttcctcctatggtaatgtaaataacctagctattttactttatagaatggtgcgagggacaggttaccgagtacctcgtggcaactttcggtgattatttcacagatgtgaaaatgtaagtttttctttcccccttttgtttaacaagagccaaaaatgctacaagtctattgaagatgtcgtggtgaatactggatgcaggtatgtcgaagaaagatcatttagaagatttgtcgaagcatgtttggaagaaacagtcgttgtctatgttgaccatctcctaactcaggttcccccatttattctcaagcatttttaccttttatatttcatcagcatacacaaacactgaacctttggggttgacgtgtgtaattccagaaaaactacatcaaggaagaaactattgaacggatgaggctagatgaagaggttctcatggatttctttagggagtatataagtgcatctgtaagttggtttcagcacttaactcatttttaacctgaataattttatatttctttgaagtattgcttaatatttccactggaactgtgttacagaaagtggagagcagaatcagaataatgagcgatctgagagaacttgcatctgcagagagtctagatgcatttacactcgtgtactcgaatattctagagcaccagcctgactgcccggtaaatattatctaaacaaagcctgctctggctttttacaatatcagtatacacagaatctctaatatatggtatgcaggccgaggtcgtagagaagcttgttagtctgcgtgaaggcataccacggaaggacacaaaagaggtaaacataccaaactctcttttttggaaaatgctgggttataattgtagcgaatcacatggatttttaaactatggttacgagacttcaaatggcgaagaattcttaaattgacgaaatggttatggtgatgaaaacaggtggtacaagagtgcaaagagatatatgagaacacactggtagatggtaatcctccaaagacaggatttgtattcccgagagtcaagtgcttaactgcttccaaaggatctatgtggcgaaaactcacttaatctgtaaaacagcgttcagcgtttgcgtccgtaactgcttttctagttgagatgatgttctttctccaaattatggcgtttgcgtccatgtcttctttttctttgcatggtatctttcctctgtaaattctgtgttttctcttgttttgttctttttcttacctttattcctggatttgaaagttgaaacgctcggtggccacttgcactaggatattatcccgttgtatttaggaggcgtatttttttgtcgcaaattttaattctactgtttcatttaattttgataaaatcttcttaaagttcgtttctctttcataacaaggtagctcttattgtttttagaattatttctgatttgtgaaattttgaatttgaagcatatttttatcatgaatataaaaaatgttggggattataaaaaagtttgtaaattcactcattggcagctgatttagccactcacaatatctaaataaataattgtaagcattatcttgaaatattttctgaaatgactgtttcttttttactttaattaaattttgttctagaaaccttttgatcataatgaaaataaagagtccatccaccacatggggtaagcataatgtgtgatatttaaagggtaacaaatgtaatctgctttttattttactttttacctctactcaaattgtatgggcagttttttttttttttttaaatgataagacaagtatctgtttaatggtattgtgatgaaacagtagtaaagtcatatcgggcacgccatactacttccacagtggaacttggccaaattttgtctttgccgtctctacagtttcttccaccaaattttttgttgacaaaactcaaatctttcaatctcatctctgccaaagttgggtttagaaagaatatcagcaaacactaatatctttattgttgcatggtttatcaatcacaaaattcacaaccattgtaaaaaaaaattcacatttttggtatgagattgctcacatgatagtgaacctctttaacattttaactttactttcataaatacgggattacgaatcttacttgcattaaaaatttagaaaaggtttttctacttaaagaaaaaagggacccaacagagagaggtttgaccaggagaaacgggtgcatagccttaagagctttcaactactttaccccaaacccaaagcgatgtcactttcaaccatctcttctctcccccgaacccgtttttttgaccggtcagttcgggcagcagcaccgttacgggcagcttatattcctcgtcttcctcctctacaccactgcatgcccataaataaagcccgttgagatctttaaaaatattaaataatatatcaacgaaaaagctattttattcataagaagaaaaagagaggaacaacaacaacacactaatcatagtttctctggcaggcttgttgttgcggcttaataaaaagctcttttgttattattacttcacgtagattttccccaaaaagctcttatttttttgtttaaaaaaaaaagtttcatctttattcaacttttgttttacagtgtgtgtgtgagagagagagtgtggtttgattgaggaaagacgacgacgagaacgccggagaattaggattttgattttattttttactctttgtttgttttaatgctaatgggtttttaaaagggttatcgaaaaaatgagtgagtttgtgttgaggttgtctctgtaaagtgttaatggtggtgattttcggaagttagggttttctcggatctgaagagatcaaatcaagattcgaaatttagcattgttgtttgaaatggagtcgagttatgtggtgtttatcttactttcactgatcttacttccgaatcattcactgtggcttgcttctgctaatttggaaggttcgtggttactcaattactcagctttactcgtttctcaattactttctcgattcttttttatttggaggtgaatcgctatctttagtgtctgcattttgatttatgaaaattgttgttgttctttgtatttgtaagatttagtggctagtactttgaatacactgttttgcttttcttgttcagatcaactttgtatattgtaaaggcatgttctttgggttgaaaagctgggttatttgatatcttaagattgatgttgttgatccaaacattctctgaaagacttcatttgtttttggttttgtaaagaatttgtttaattattagcctctaatctcagagaggcctgtttgaatagttctctcttgaaattagacttttcaccaattgatgctaattgtgtagatttgttgttcttgttataggtgatgctttgcatactttgagggttactctagttgatccaaacaatgtcttgcagagctgggatcctacgctagtgaatccttgcacatggttccatgtcacttgcaacaacgagaacagtgtcataagagtgtaaagctttcttctactaatcccactttttaaactttgacctcagcgtggttaccgacatttttgtttcttttgtcaaatacagtgatttggggaatgcagagttatctggccatttagttccagagcttggtgtgctcaagaatttgcagtatttgtaagttccacttatgcatcatgctttaacaaaacaaatccaagatttgacagaagaagcactggagttaccttttgtaattgaaatctttttaacaagtttcttattttcttacagggagctttacagtaacaacataactggcccgattcctagtaatcttggaaatctgacaaacttagtgagtttggatctttacttaaacagcttctccggtcctattccggaatcattgggaaagctttcaaagctgagatttctgtgagtatacatatgctttaccggctcagttacagtctttgtttaatcttaggttttgttccaatttttgactctttgctgaaaattttacatgcaagaatagccggcttaacaacaacagtctcactgggtcaattcctatgtcactgaccaatattactacccttcaagtgttgtgagtcctctcattaactttcatttatgtctacttcattctccctcagttgatttgttgagttaatgcacttaaccttgatggatgcaacacagagatctatcaaataacagactctctggttcagttcctgacaatggctccttctcactcttcacacccatcaggttctatgatttatcctcttcagttatttcagttgttgtgtcagtgtctgaacttattctgaaactttcatttccttgtgcagttttgctaataacttagacctatgtggacctgttacaagtcacccatgtcctggatctcccccgttttctcctccaccaccttttattcaacctcccccagtttccaccccgagtaagcctcctctttttagtttacattataggaaacagaagatgaaatctttgcttctctgtcaatcctttttctcatataactcatcttgccaataaggcaataaccaaatgatctaatttgatttcaggtgggtatggtataactggagcaatagctggtggagttgctgcaggtgctgctttgctctttgctgctcctgcaatagcctttgcttggtggcgacgaagaaagccactagatattttcttcgatgtccctggtgagtttattattcgcattagtttctgttcttagccagcaattttgttttgcagaaaagtattggaacaactgttaatgaaaatcaatacataagtcattgttttttaagttacaaactcttttgagtaaaatctcgattgcaaaatctctttgcagccgaagaagatccagaagttcatctgggacagctcaagaggttttctttgcgggagctacaagtggcgagtgatgggtttagtaacaagaacattttgggcagaggtgggtttgggaaagtctacaagggacgcttggcagacggaactcttgttgctgtcaagagactgaaggaagagcgaactccaggtggagagctccagtttcaaacagaagtagagatgataagtatggcagttcatcgaaacctgttgagattacgaggtttctgtatgacaccgaccgagagattgcttgtgtatccttacatggccaatggaagtgttgcttcgtgtctcagaggtaaaaactaaacatcttgtgctctctctcaattactttgacgtgaagtgttttttcatgttttcctttatgggttcataattgttggttacactaatgacacagagaggccaccgtcacaacctccgcttgattggccaacgcggaagagaatcgcgctaggctcagctcgaggtttgtcttacctacatgatcactgcgatccgaagatcattcaccgtgacgtaaaagcagcaaacatcctcttagacgaagaattcgaagcggttgttggagatttcgggttggcaaagctaatggactataaagacactcacgtgacaacagcagtccgtggcaccatcggtcacatcgctccagaatatctctcaaccggaaaatcttcagagaaaaccgacgttttcggatacggaatcatgcttctagaactaatcacaggacaaagagctttcgatctcgctcggctagctaacgacgacgacgtcatgttacttgactgggtaataacaacataaaacttccatttgaccccaacaaaaaccattgaaacgagaatctaatctcaaatacttgtttgttggtttaggtgaaaggattgttgaaggagaagaagctagagatgttagtggatccagatcttcaaacaaactacgaggagagagaactggaacaagtgatacaagtggcgttgctatgcacgcaaggatcaccaatggaaagaccaaagatgtctgaagttgtaaggatgctggaaggagatgggcttgcggagaaatgggacgaatggcaaaaagttgagattttgagggaagagattgatttgagtcctaatcctaactctgattggattcttgattctacttacaatttgcacgccgttgagttatctggtccaaggtaaaaaaaaaaaacataaaattattgaacaataacaaattttacaaggtaggtagtttttttacccgtaagttttcgttttttttaattgttaatgtaaaatgaaatctagcattcaaagatttgtgattttgtgctatggttcgattaaaagggaaaaaaattgtaatctaaagatttgtgtaagattactgtctattgtatgaagtatgaactatgaacacaatatatgtacatccaaaaatacgttaaactaactccgctgttttgctacaaaaaccctttcaattttgttctactaaacgtcgttagaatacacaaaagcgaaacagcgtcgtttatttataatgcgctactcacatgacgccgtttcacttttgtgtatacaaacgacgtcgtttaatagaaaaatttttggaagggtttttgttgggaaaaaaagagaagaagggtttttgtactttgtgtcttcttgttccatcatcgtgacacgtcacacctccattcatctccgccgtcctcttcctgttcttagtcgcggctggaaaaaactgtggtgagagagagaagaagaagaagaagaagatgagtaataatactaataatacagagatgaataatctagcgatggaagaagaggatgaaggagagattttccttggtgaatccgatgtcctccgtgaaatcgatgtcgacgaagaaggtttttttttatctccttcaatcgtgatttttttatcgtatgtatatatgtgtatgtgtatgtgactcttctattttcgattcagatcttcctgaagcagatgatgatgatatggacgatgatggtgaacaatttggtaacagattcaccacctcgtgtttcctcaatatgaaattttatggttgttaattctaccaaatcttactttcagatgaaaacgatgactctgttcacacattcactggtcacaaaggtaacgtttttatcattttatttctcaattaaatgttttttaactttcatgaaactaagaaagttttgtcttttacaggtgagctttatgcattggcttgtagtccaacagatgctacacttgttgcaactggaggtggagatgataaagcatttctctggaaaattggtaatggagattgggctgctgagcttcctggtcacaaggactctgtctcttgtttagcttttagctatgatggacagttacttgcttctggaggattagatggtgttgtacagatctttgatgcatcatcagggactttgaaatgtgttttggatggtcctggtgctggaatcgaggtataaataacttgtcctatatcatcattgtaattgagatcctcaggtccaaatctagtacttactgtgtggtatttttcagtgggtgagatggcatccgagaggacacattgtgttggctggatcagaagattgttctctatggatgtggaatgctgataaagaagcttatcttaatatgttttcgggccataatctaaatgttacttgtggtgacttcacccctgacggtattgatataagcttctaccttatatgcttctgtggattatctaattgagtctacctgttttaattgtattgtttgactgtgtgtgggtactgtaggtaaactaatttgtactggctctgatgatgcaagtttgatagtatggaacccaaaaacttgtgaaagcattcatattgttaaaggcaagcgaaatttaaacatgttactactgcacaaatactaaatctttcgccttctttgactggtttaaaatgctaacttcttgctttgtgtaggtcatccttatcatacggaaggattgacatgcttagacattaactcgaactcaagtcttgctatcagtggctcaaaagacggttctgttcacattgtgaatatagtcaccggaaaggttcgtcctttactgtactgctgttaccaagctttcactggattgttttatgatctatatcatttcaataagcaagttggtgcttctcatatctatttgacatatcatctaactttttcataatcataccaacaggttgtgagctccttgaattctcatacagattcagttgaatgtgtgaagttttcaccaagctccgcaaccatccctttggctgcaacaggtggaatggacaagaagcttataatctgggatctgcagcattccactcccaggttcatctgcgagcacgaggtataaacccttatagtttctctgagatagcatcaaaacagatattgaaactaaaacaactcctctcttcttcttttttcgattacaggaaggtgtgacatctctgacttggataggaacctccaagtacttagccactggctgtgccaatggtacagtgagcatttgggacagcttattaggcaactgcgtccatacctaccatggtcaccaagatgcggtccaggccatctcagtctctaccaacacggacttcattgtttcggtatctgtcgataacactgctagagtctttgagtcatctgagttccaaaacaaagtgacataggcaagtgaggagaatacttgcagatactatccagacatgttgctatctgtgttcgttgttgtggtcttaattctatgctttgtgggggaaaattttgacaagaaagttatcaatgtctaaaattccatatgtacacggcttaatttattgataaatgtagtctctgtttggaatttgtccttcattttacagttcttatggttcgaatgagattgataaatgttactccttacattgatatcgttaatgaatgagattcatgctaatgttccactagcaattgaactacttgatatcatgagtctgccaaatcgactggagaagtcagatttagggtctgagcatcaccatggaattataaccgaactctttataaaaactcttctcccttgagaagtaagaatgaaacgggcaagctatagagtgagattactacacaggagaagaaacgaatctgctgaaaatgcagccaccggtaaagttggattaagtctctaatacatccgactcctcttcttctcagtctttaaactgatcttgctccgcctcgattgtgccttatctcttgaacctgagtttccaaaactcctcctaccagatcttggacttgaatttctacgaccacgctccagatcctggttttgatccacttcatcatcgtcctcgtcatcatcaacaaagtctccttgacgatcatcctcgacatcagaaccagaaatgtcatcattctcagccttcgcatcagtatcacaaacttccccttccactttccccttatcttctttcttgctgctcgaagaaactgccttgttatctttcttaactgtattcatgagtttcatgtaacggttcctgcttgtcaccaattcattactctctatcaacatccccctcttgtaaccatctctaagaaccacagtgtgagtcctaagcttactagacaagtaaaagataccaggatgattatggagaactctcttaaacctcgatctcaatcccataaactcaccaagatgcaaaatagcatctttctcaaccttcttcgacacaaaaaggttcatgatctcgtgcaaaacagccgccgcccacttatcagactcatcgctagtcgcagacagatgaagtgcattctcataaggagaaatatacggcaacttctgccaatcatcaatccatttcttcatcttcttatcaaccacaaaaccattcgaaaacttcatcggaaaagcaatcgccgatcctttcgtatactctcctttacgtaatgttctagctttcttctccaacacagatacagcatgctcattgctccaacaaaccagctctagctcaccactacatcctcttaacttcgatttgataactctaaagtaatcaggaaactcaggtaccatagtttcaacataatccttaggtaaacctaaatcccatttcaacaaatctagaatctctaatggaattttgttaatcctattaatcatcagcaatttcaaaagcctatcagctaatccttgcttataagtctcactaccgtaaaccaattgctcatcggcatcgtggtttagaatctccggcgtgaggctgatgtgaggatgaataccaattcctccggggagaaactcttggaaaacggaagggaagctacgtatgaactcgattggacgaagaggaactcgtagtgaatctttctgtgaggtgataactgagatcggaactgattttgctggctccgatctgattaggtctttgatactgagaagtggtctgagattcttctctctttctaccgcgtggtcgagtcctctgtctcttacgaatttgtaggtatcttccaccgccgacgtatcggcgaaggttcggtggccggaatgacggcggatagaaatggaacggaaaatggatttcatcggcgatttgattttttagggtttaagagggttttggctcatcaatggtgtttcgaagacattgatgtggagctgtgtgtgtcactcgagactcggaagtgaagagtttttattattggttatgggcttttaagttgggcgttttaggcccactgtagttttttctgtgacgttgcccatctttttttttataatgatgagcccatctaaaatgttattctacaaaacaataaaagaaagaccaggattcctttgcttaaaagaccagggtcctttgctaaaactatattataatgaccaatgaaatcataattaataatgaccaattaaaatgatgacaaaaaaaaaaaaaacccaattaaaatagtaaatttatattatagtcatcaactttaatactttgttgcaaaataaaaggaaacagtcgcataataatccactaatcacaaacctttaccctttcttctcggggccaatcaaaaacttcaattaaccagaaaaggtcagattctccgccgcctcacacgacgggcaacttcagttcctgccgtcgcgttagatcccgccgtcaatcggtcatggcgaccggtaaaacctcttccgccgcgaatcttttcactggctcgacgcgttttgatttatcatccgctgattcgcctccttcaaaactctctctctcctccgatcagctcaaccactgccaccaagctctcggcgttttccggggaaagatccaaaatcctgactcgatcgctcatgagtttaccggtttacaggttatagatccatcctctaaattgagaatattcctcttcctagtgtttcttccttaaaaacaaattggatcataatacactctcttcgaacgcaggctaataggatgtggccatcggagctgctgctaaacagtacagtggctatgaacagtgtcaatgttgagaaaaacagatacagtgatgttgttccatgtaattttcctctctttttttgtgtggatttgctagttagtggtgtacagttctagattttgattttgctttggatatagttgacaagaacaggattgttctgaatccatgtaaagactcatctgcaaaaggatatgtgaatgcaagcttaattaaggtacacttcttattagtctgtttatctgtatctttttgtggtgatagatttttgaaggttttacaatgtgttaatgttatgtagacgtcggagtctgagagtatttctcagttcatagctacgcaaggtcctttaccacacacgatggaggacttctgggagatggttattcagcagcattgcccaatcatagtgatgctcactcgattggttgataataatagggtaaacttccttgtcttgcttgtgtatatgagtctctttttagacgattggatattaatatgatctgttgcaaatatactagtacaagcgaagttgttgtgagcatttgtttctcaagttaaatttcttcgtattaaattttagcaagttttaaatgttccataaacagtgatgaagatagaaactatctcgttgatattgattgttgaacttatcttgtttgttttttcatgctaacttatctaattacttgttacagactgttaaatgcggggactattttcaagacgaagatggacctagagaatttggcaacatatctcttacaacaaagtggataaagactactgacacttcattgatgttacggaatcttgaggttaactacaaggaggtaagaatcttgtatcagttttcttctgtttatttttaccagatcaagttatttcttcgagggttaagcatgtttcaattattgatattgtgttttacagacagaggatcagcccatgtccgttttgcatattcagtatccagaatggcctgatcatggagttcccaaggatacagtggctgtccgtgaaattctaaaaagactatatcaagtaccacctagtctcggcccaatcattgtgcactgcaggtacgatgcatgtcaatgagggatacaagtgttgttcaacgtctcctgagagaattgtttttttctctctcagtgcaggtataggaagaactggaacatactgtgcgatacataacacaatccaaagaattcttgctggcgatatgtctgcgttggatcttgctaaaaccgtggcactatttcgcaagcaacgcattggcatggttcaaaccatggtaaatctttcagcgttacaatttttagctaccaaatttctgtatctcaccacataatttgttctgaattgttcaattccttactcttttttgaaggatcaatacttcttttgctacaatgctattgttgatgaattagaagatctaaccgcggggacaaatgctggaacgagttcctaaaggtacgcaatttcaacaatcaaatctgagtgagccatacctgttataatctatgaatactcttatcttgtctatcttttgatccagctgaagggttcgtctgcttagagagggaaaaaggcttctacccaactatatcaatttcgtaatgtgattcaagaagaaacccgcgtgaatctctacattcaagacttttcaatttctgtaaatttccatatctgataggtttcattgttacttttgttgtggaaatgctgattaaaaagcaaatgaagtcgccaatgcgagattcttcaaagactatgaattcggtttgatttggtttgaagtgtaaaagaaccgaagattaatttaatggtttagacttaaccgagtttctttcgaaaataaataaatcagaagcggttaaaattggcgtaaaatgtcccgagtcatcgttgctcgcgggaaatctagctagtgtcggcgcgtgtctggcacgcgcagtaaagttaagctataaactcccaaatcgagacgcgagtctttcgcctttggcttctggatcctcgtgatgatgatgatggagaattcgaaatcaaagtaagcaatcatcgtcacttcttcgaatacccctactcaaatcgagaatcacccagaggtaagtttagcttctccagatctcaacttatatctctctctctctagcgcgcaattggaattgaatttttgggggatctttcctttgatcgcacgaatttggtcaccaatttgatgcattttagcggaatattgtgtatctaggtttaaatttggcgttgaggatacaaatttcgctatgtcgagagtttagtgtagtatctcaagactctgagccctagcagtcattactaagaatccaggctaagttagagatggtgtttttgtgggggaatcataatttattcgcgttaaattcttctctcagtgaaatgtgatgatcccttctctagtctataaagctttttgtctagatgttgaacatatgagtctggttctgattgatggtttagtagctatatcactcatgattgtttcaggtactccgatcggtcgcatagtgaactttgtcatgttttctttttctacttgtatagtggttagtgaaaattatcctcaagaagaaagttttcatcatcttattgatccagtgtcagctacctgaaacgggtcagattttgcttattatgcggtctatttcgtgagtaaaggaatttgctttagtgatttggtgaacgcgcttagcttagttcttgttcgttttttctcccctgtgaaggctccttttaagttctttttccacagaaatgacatcactcgcagttgctgaaacctttggattttgtcaaaatgcaggatttctaaagagaaagtttgcttgtgactgaaaacccgcatacaagataatcaccggggcaaaaaaatgagttttgcatgcctcgtgtgccatagtgtagagagcccatcccactcatttagaagctactctgtttctagctcagacaacgagggaagatgctctgtgattgcaagctgcctcacaaggaaatcactcattcaagctgcaagatcgaaccctttccctgcatcgtcatcaaaggtaaccccacaacccaatttccaagcaggtgaaggagcctcaccacggttagtacgaagccgtgcagtgagaagagacattgtcagagactggaacttcaacgaaattgagacagagctttgaaatcagatctgactcttctcttaggaatagtattagtttgttcatcaactgttcttttgtacctcgtgttcaaagttttgtatttggcttagaagaatgcttttacaaaccaataatctaatattttcctggccgtttattgaattgtggtattacaaatcaagcacacgctaaagtgagagtagtcaataaactttggaaaagcaacaacagatcgatcattgcaatcgttaaggaagaagtgttcacgtgagatgaggaaggattaggtgagggaaggcacgtgatagtatttgcctttacacaagcacttgtagacgagagggcaagcctcggaggcggagcacgtagaactgatcacgacaagcttgcatggtttacatggtccacacgcattcgaacagtcaggtatgcttgatccgctcgccttatctacaacctcgcaaatcacaatacaacaaataaaagaaccaaccaagatgtatataacacattcattgtctctatttataagccatgtaatagccaaataatacttacagtgaaaaagatccaactggaaagtatcactactaacaaaaagatggagaagaagaatcgcgattaaagataccgatttcattccgaaaagattgaagggtattatttttagaaatattcttaggttctcatacatagaaagggttttgaacaaaagaaaatgtggtgaagagatatataagagagtgagagtaaagattgaaagggattttaaatgaaacagtgttggattcacatgatccatctctctcttttcaaaggctttcacattctttgatcctttctcattaatttgaatcttgttactattttgttttatctaatttggaatactgataggcacaagaatgtcccataataaaaccctattcgaaaggtactttttaaaaatgaagtaacaaaatctcagatgtctcgtcatcatcaagtcctacatgctatcaagcgtgaccctttgagaccttgcttttaatgaagtccccactcttgttacaacccaatataattcactctcatttactactccattctttcatataaaatgtttataattaaaaaaaaaatcatgtagaatgagatttctacatgagagtaaattagaatgagatatcttcaagattcgtgacttggtgacaaggacaagttaagaacttgtagaagaactgatagagttctctttatttagagtgaacataatatcaaattaaaattctaacctttgaaatattaccattctttgtcactgtgttattcacctagttccaagattgatctgaatttgtagctcatgacacttggtttacaacaagtggatatctaaaccggtcattacagataaaggtatgaatcggataggtccgtgtgagacaaatttttataattccatagttgagacttgaagtgcccgacaaaaaaagagtcctttgtatgggaaaatctggcaaaggcatgtcctaaagttttttgggaacatatgtgtctatgtcgggctttaaatcattgcgattttaaatgcaaaaaaaaagaatgtactctacaataatgtaccctttcctcatcatcttttttgacccaacttaacataatttacacaaataagatcttctaaaaattacttgctgattatgaaaaccacactagaaagtggaataaatgactatatgcatgcgctcaattgtgtttggcttaataatatagtcaaaaaagttctcttacaagcttttattacagtcctctttttcaccatttctagcaaaaagccaaatccgataatttaactattttttaatcttattttcaaggactaaaaatgattgagcttccaagatttgtttcaattagaaaaattcacttaaaaaaaaaacgaaacggatacaaacaaaacattgaacaaacgaggtcaacactcatcactaatgaagacaaaaactaaaataacccttcaaataataagaataagtcgtctctcatgtttttgaccccacaattatccaattttattacaaaacatcacccaacttctcatcatccaacaataacaatgaagactcttcatcttgtccaactttcctcatctccaaactcgtcagtctcattgccttcacggcttccccttcccaatccgtcctcgccaaaaccgcatacaatatcgaaaccacgcaagccgcttgagctgaaagcaacccaaaccacaacccactaaacccaattttcaaccaaaacgctagtccaactgccacgggagtcccaacgaaataaaacgacccgagattcacatgtgccccaaccgcaggccgacctgtccctctaagaatcccgcagcccgtggtctgtggacaattccctagctcgcatagcccgacaattggcataaccgaagcaaccaagaccttgagtggctcatagccagtgaatagtccagcccaacgctcttttagaataaccgtccaagccacattcaatgctcctactacaaacgcgcaagctagagccacgttcgcggctagtctggccttgtaaggtctacctgcaccgagctcgttcccaacctgagaaaatcaatgaaaccaaatcttaaaaaagttattgaagccaaacttttgtcacgtgtaaaggaaagataaggacatcaatgaggttgaacagtatcatgagattggcaacaataaaatagaccacacttgactactctcttttcaaccacttttttatatatttttatttttaggtatgttaacgtccaatcacataccacggagtgacctattaatggaagttgatgtaacattttcccattacattgcacgttttttatcatctcttttcttcttttcgaaaaagcgttaagaaacttataaagaaaaaaacaacaactaggaaacaaagagccttctaagaacttcccttgagtaaatccataattagatacaagaacaaaattcaaaattttctcgaacaaaatactaatcactaggaaacagagaaccttctaaacacataataaggtcctcgaaaaacacacacagaaaaaagaacttatgtcaattacaagaacaaaagttcatatctttcttgaataaaacattcttgcatctactgaaatgttttggtaccttcaagttccaagacttttgtctttttagtctttaatttaatataattacttccactctttccaatatcaatcataaacaccacataattcatttttaaaaaaaacgaaattaatattcaaaagtttcatgattttgaaccttcaaatgcaaaacccaaatcaacttagtcaaatagttttctagacttaaatcttcaccacttaatcactaatcattagtctaatcatgactcaaatcaactttgtagctttgactcaaattttgaccacttaatcatctttaatttaactataattttgaccatttacattcacataacagaaagtataaagatacatacccgagcagagacgcatccagctaaagccataggaaccgtatacataagactagtagtctgaatcaaaatcccagtggcagccacagcaagcttaggattctccaagtaaccacccatcacaatcacaatctcataccaccaccattccaaacatatccccaaacaactcggaaccgccactctcatcaacggtcccaaccctccaaccaactccatcacagacgacgactgagccaccaccgccaccatcgtagtagacccaccatcaccatcaccactcactctcttctgcaacatcccactaacccaaacataaccaaccaaaagcacaaccatgatcaaattcgtcacaacagacgcaatagccacaccaggaacaccccaatgcttcaccatcacaagccaataattcaatggcacatggaacgccactgctgctagcgtacaccacatcatcggtttcgtcactcgctgcgaccttagataaacacgtaacggctgaaggagagtattggtcaaaagatcaggaagcgcgtagagacaatattcagccgctgtagcggttatctccgggttttgacccatgaaaagcatgatgggtccaaggttgatccaaaggaggcttatgggcagagaggccattaagagaatcacgaccatacggtgaagagagagcgtgaggagatcccagtttttgctaccgtaggcttggctacacactggctcgagacccgaggcgagtccaaccataacagagtatcctgtgatgttggtgaatccgatggagagagctcctccggctaactcgaggctaccgagacggccgaggaagagaacagacacgacggcgcgcacgtagacaagacagttcattgctgtgattggtaaaaccatagcccagagctcttttagctcttcaatgacttgaggaagagttgggtttttatgggaagtgaaatcatctgactggattttgtcttccattgaaaatggtggatttttagtttactgagttttctgagattcgaccaaatagtagtgagctgataaacggagctagaggaagctagccaaaaacagagctttagaaagctctggatattttaaagaagaaggaaagccatgggaggtgaaaagttgggagttttacgagtgaaacagaggaggagatgggaagacgtgaaacaggggagctagaaaggaaagtgaaagagcaaaaaagaaagaaagtaaaattcgcaaaaaaataaaaatctgttcgtttgtctcctgaaagtgaaaggaggaaagctgcattaaatagaggcgaaagagttaatatatggttttaaatactaattcaaaataaatagacgttttagtagtatcgttttttatataataaaaaaatatttgtatttaattctataattattaatattctttagagttttttgtttttgtttttctgtcatcattctttagagtttttattataagatcaaaatactttttatagttgttttgcaaaaaaaatttagttagtgtgtatatatttattaaatactttttatgcaagagtatgtagtttaatacaaaaaagttaaaaatatatagttttgattgtcattatatcaaaaaattaaaataatttaacggttttctgtcaccattcatcacggtaacaaaatgcaaaagataagaattacaatcttaaaaagcggcaaaaagtgacaaaatttgaccgttcaaaatggtttttagcggtttattgtgtcttttgcatctttaaactaaattttttaatttcttatgttttcactttatttaagtatttgttttgtcacaattactctaattgtttcaaagttatataaaagaaaagtctatttggatatgaaatttttattaaaagatatcagttttctctagatgcttcaattttaaatttgtgaaagcatatatatagaaacattgataatgaacttacatttgattttatttaggtgttgccacatatgattttgttatctcttgagacgttaacatttgtattgattattgattatatgtacgtagttatgaacggaatgattaagtttcgacttcttgccttttgtttggatatccgatcagtaatgaagatacatatgtatatgttattattatgtctatatctcacagcaacaaaaatcataacctctaaacattttgtggtgaactgaattatcaaattaaagaaaaattattttatcgaaagttatctaaacagagtctaacactattcaataccattcaatcttcttcaatatttacaatttggttattcatttttttctaacattatagatatttgttttgttaatcttttgaatatgtttttttcggtaaatttgaattttaaaacatacataataaccctaaaaaatagtgttcgagttcatattcattgttagtttaatggtgaactagtgatgaagagtcgtggttttcattgcaaaaggatcgtggattattttttttgtactttgtagattactctctccattttctttataaggctgcaaatggttgtcttaagatgaatagttggaaaatattaagttggaaaaattgagttgagtattattcaacatgttcctctacaaaaatgtagttgaatgagttgaatattgttgaatttgttcaatttttcagtttttaaagttgaattggttgaatcattttttcaactcctttatctcaaatggtaaaaaatgagatgaatgtttatttaactttttcaactttttcattttaatcatgaattaaattgcaataaaaagattttgaactttattttttccaacgcatgatattttcttaaaggcttaaactactaaaccactataaattaattattgttttggataaatatatttacctatatatatgggggcaatggcaacttttactgacagcaccaaatgcatgaaacactcaagcctttgtatgtaattaacacacttatcagaagtccattgggaactggactattaacatgaaatctagctaagaccctgagagttttaatagatgtgtaagagccgacacgtgtgggaggcaagagataggttggacgtgcgcagccgcctgacaaaataaataagtgtggttctgttaaaagttggacattacaaatcaggtgttggggatagatcaaattaattttttacaagttgggatacggaagaaaaaaaaaatcattttacaagatgttggttttcaaaacaaaatttattatttttattagtcacgaggggaatctttttttcgtcagacaattctaaaatacgaattcgtcaaatttattacatgtctaaaactaaaacacagttgaatgtgaatgattgagaccatcactatgtagaattaaattgattctcctaagtaagtattttaataactaggcttgaatgtgaatgattgagaattagaacttcaaatttcgttttgttttaaaatttgaacaaaacctttaaacaatacgatacgacgctgaaaatatgcctcataagtcataagtcatcatcactcataacaaatcaacaccaactaaattagaagttaatccattacagaattattttggattaataaagacttaaaaggcaaagaatgcacgtacggctacccataaacccagtataagatagtgactggtccgataatacgacaccaatcaatctatttcttaaaacatcactaacactagtatgttttttgttggctttataggcatttgtttatatttcggcttgtcgatcacaaaacatagaatcatttaaacaaatcgaccaaagcatgtgccttccgaatcaacataaattatgtcgttagtgtctcctacgtcataaccaaagaggttggtgttgcctcgtggccaattccaaggggctaaagttccacaattttactgatatcatgttaataatataatccttcaaaatcgatcaaataatttttaaaaatgtttttggctcctatcctaaaatcatatagattttttcaccaaatttttaattaaaataaaatattgtaggtgtaataaacaatgattgactatgtgtagagaagaatcttggatagggatggagaagggaaattgaaattggtcgtgtgagtgtaatgtagattgtattacataatcacataaagtttttacaaggttaaattatatagtttatgtgtggctaatatgcgataaacgagtattctttaggaaataggcatatatttaatttaagtaaatggcagacaacacattctttttatttaaagctatgcgttttatgaaagtagattcctatattttagtacaattttattctctaatctaatattcctcatttgtgatagattagctaaactgtttatctgtaacaaaaaataacttttttttgctaaaaatcttcttttgttatataaagcaatgatgaattagtgtagtagccaccacgatgaattctattccggattgaaattccatagacaaacaaatatgttacgcgagactcatatacaagatgataaggttgatattgttgtaatgtggatcaaagaaaaaaaatagaggatttcaatgatttcaaatatatagcataaatacaattatattctacaaacgaaaaaattatatataaaaattgatttagtttgtgcgagatgagatattcaacatagtaaagcatttggacataaactttcatttatttgttttcaagctaaacttttaagatacatcctctaattttgagaatattatgagtttatgatatatttatatatagttctctactaaacagttcatatatgaacataggtggtatacttaaaaaacatttttaatatattctggtaccaggagaatatctttatatatatatatatatatatatatatatatatatgagttactaaaaatttccaagaaataaaacgtaataaaataatgtgaccctataaataataccataggatttgaacgatcggattcagctccattatatgagaaaggtaaatgccaaactagttaggtaaggaatagaatatatttcatgattattggaacactttaaagagttagtatcaagcataaattcgattaagaaaaaacaaaaaaaatacaaacttcgtactcgttgacacctccctatctaaaatgcgtttatagttaaaatcaaacgagtgttgggaacataaaaagttataatcaaacgagtcaaacaaaaaagaaaataaataaattcaaacgagtcgtcagggcaactctttggaattc

SEQ ID NO: 35 - DNA, 105937 bp, Arabidopsis thaliana
gaattcgtatgaactctctttggttagctgtaaatgcattggagcttatgtgagaaacaaaaagaaccagaaccaggtaattggcctcttcatcttttagccaccctttgatggtatctcttataatgtttggactcatatttttcgaaaatttcagatatgctggctttggcagaaagtcagttcggataatgataggggcttccaacgcttcttggacaatgtccagtataagtctagtggtatcttacgctatgagcgtgtctttggagaagggtttgttagcacagggggactcggtatgctctttagtcatcgagtttgtatcaactttgcagtattgatggttctgtttttgaatttaagttatacagaaccattaagtgaagctatcttttcttcttattatacttgtttcttttgatatagagacaacaaaggaattcgtggatatgctggatctgaaacctggccaaaaagttctagacgttgggtgcggaataggaggaggggacttctacatggctgagaactttgacgtggatgttgtgggcattgatctatctgtaaacatgatctcttttgcgcttgaacacgcaataggactcaaatgctctgtagaattcgaagtagctgattgcaccaagaaggagtatcctgataacacctttgatgttatttatagcagagacaccattctacatatccaagtataagcttccgctatttcttcttcccttatgactttaatttggtatccattttgtaatccctggtcttactctcaggacaagccagcattgttcagaagattctacaaatggttgaagccgggagggaaagttctcatcactgattactgcagaagccccaaaaccccatctccagactttgcaatctacatcaagaaacgaggttatgatcttcatgatgtacaagcatacggtcaggtatacagagatagaacccgtctcctcctatacttatttaaaaatcaccaaaagtcatctaaactcatatgattcaacagatgctgagagatgctggtttcgaggaggtaatcgcggaggatagaaccgatcaggtaagaaacgattttctttcgagaatgactcatatgctttaaaaaagatgttgaaaccaatttgctgtttgccttttaatcatcagttcatgaaagtcctgaaacgggaactggatgcagtggagaaggagaaggaagaattcatcagtgacttctcgaaagaggattacgaggatattataggcgggtggaagtcaaagctacttaggagctcaagtggtgagcagaagtggggtttgttcatcgccaagagaaactgattatggcatttactataagttggaaataaatttgggtatgtatgtagatcatcaaaacccagtaccctgctattatctctacaagctatatatatgtggctgtgaggttcctttaatgtctccattttacagcatatccagtttggtatttaatatatgtgatattttgaaatcggtttgatcaagttatacatagaaaagctcgagctcgatcaccattattgaatagaaacaaaaacaatgagccaaagtgatagccctgttattttactagtcgtcagcaactgcgacttgttatattgttcttgatagtcgatgtgttgttgttttggtaatagcttgctacatatttttttatttttttatttgtatgttattcttttttcatttttttttcatgttattacctagttattctataaatcttcttttattgtcttttaatgtttcaatcaaatataaatatatatatatatatatacatacatgtatgtaaaaatattcgtaaacttaaataaataaaatgtacatgtgcatgccaatattacctaggtattattctataaatatttttatttagtctctcaacttttcaataaaatatatatattctactagaaaaacgaattaatttatcaaatatcatatacttttctataaataaaacgatttataaaatcaactataaatattttactataaaaagaattaagttataaaattatatatagagtttctataaaatatatttacaagtaagaaattcatatactattctataaataaaagatttataaaatcaaacagatctcgtttctataagtccgtgtgttcatgacacatctagttattctataaatctcctttctgtagtctcttaatttttcacgtttaccaatatattcactatttagtatacgagtaacgaaatttaagagaaaagaaaaaaagaaaaaaaaatggccaaggcaacttcttcacttgtcgtccccatcatctttcttgtgatatttgctttaggtatgcatttatctttaaattttattcatagagtaatgagttgacatatgtatccaatattgtagacttgtaattcatcgtggtgttagccttagttatacatttacctttgtggtttacttcaaatatgttcacgtaactctaccgtagtttgtagttttggctagattcattggcaaatatatcatatatatatatatatatatatatcttagttcagtatattgatatctcctaaatcttaatatatatattttttgttaattttgtctgatatagttgagcagaatatgggatgtaatgattatattgttggcgatgtgtgcgttcattgtcgagaaagatgcctcagatattatccagttacaagaaaagccgagtgttacaggaatcattgtctttgcatcggcccttgtccggatgataggcctcataagcgattccaaatgttaaactcttccaaaaatgtaaaagcacaaatcctaagttgaatgtcaaaatcataatatttctaaaaaaactattttcaattgaagctttgattataataaaatttatagaacacaaattttgaaatatgtttgttgttgatgtggtgagcccacattttttttccacattttttgtcttttatttattaattgatttaattcatattgtgaatcttgctacttccacgacaagtacaaagcagaagaagcagcaatacacaaagattgacccataatttctgtttttcttctttcctctataaacctttttctttttctagttttggtatatgtgtaacattatctttttttgtgtgtatttaaggattgattggttttttcgctaccacccgcaaatgatatggttgcggacgatcgcagttgttaacgtttaaaacaatcacaaaaaacattttaaactgctccgaatctctataaaactctcaaaatcgccgaatttcaaaagcttcttcccgatagcgtttgtagttgcagacggtagtggttggcaaaaaacatttttttatccaaatcttttatttactactaaaatatacataaacaacaaatatattaaaaaatagtatcaaaccctctatatattaacattaattctcaaaatcctaatatttttctccatcaaaatcatatagtcaattcatcaacaatggcaagatacaaactaagtattgtaataatactattgatccaaaagttttgaagtaattcgaaacataatttatttattttgtaattttgtcatattacttgatgttggtttttatgaaccaaaatgcatgaagtaataagcatttaactgataaatttattcgttttgaataattgtgtacagttttatatggtttttattataaattatatttatattattttttattttatcataataatataaacttttcaatcaaatatgaaatatgtatatatatatatatatatatatatatatatattcttttctataaatatgtttacaagtaaaagattcatatttttttctaaaaaataaaaagatataaaatcaaatatatatatatatatatatatatatatatatcttactataaaacgtcgaattatatatatatatatatatatatatatatatacgttctataatatatttacaagtaagagtatcatatacttttctattcataaaagatttataaaatcaaacagatctcctttctataaatccgtatgtgcaatgcatgacacctctataaatcttctttctgtagtctcttaatttttcacgttaatcaatattcactattcagtatacgagtaactaaatttaagagaaaagaaaaaaagaaacaaaaatggccaaggcaacttcttcacttgtcgtccccatcatctttcttgtgatatttgctttaggtatgcatttatctttaatttaatcatagagtaatgagttggcatatgtatccaatattgtagacttgtcattcacgtaactctactgtcatttttagtttcggctagattcattggcaatatatcatattgtatatatctttgttcagtgtattgataactcctaaatcttaatatagcttttgttatctgagtataaacgaaattaattaattttgtttgatatagttgagcagaatacgggatgttttgattatgatgtttaccaaccgtgcgatcattgtcgagaaagatgcctcaaatattatccagttacaagaaaggccatttgtcggaaaaatcattgtgtttgcattggcccttgtccggatgataaagcgattccagatgttaaactcttcaaaaatgtaaaagaacaaatcctaagttgaatgtcaaaatcataatatatctaaaaaactattttcagttgaagctttgattataataaaatttatagaacacaaaatttccagacatatgtttgttattgatgtggtgagcccacaaattttctcacaatttttatttatttaattctactactatcggtattcttaatattctaaaacaataaccaaacagagtattaaatctacttatcataaatatatatttcaaatttttaaatattgtcttatatataaagaagttttctgtaataaatgcattgaattcatgtattggaatattgttctgtcatcaactagattaaaaagctaaaacttataaaatatatgacttacacaacttatttaatttttcttctattgttctaaaaagcggtttagacgctaggtgctcaagctaaacataataaaatatatattagtatattatcccaatttttaaatatgttttattttcatagacatagttataaacatttatttatattttaatataaattattctttagttttggtttacaattttatattgtaattttctaatagatattttatgtaatttttatgtataatatcatacttttagtgttttataattataaataattgaatcacttaaaccgcttatatcacttaaacatcggttaaacgttctcgacgctaggcattggatcaccgcatatataacgccttgcgctttcttttttgaacattgcctataactaaaagatttacattgtgtcgttgttcaacataaattttttcttcatatgagtttttttataccttctatctaacttttttcatttgactcattcaacaaaaagagtgacaacgaattaccaattccatatctaattccatttggatacactttcaataccctacacaagtaatacacacccttcacattaaacccaaagtgagccctcttggtgaagtagagggtctaacattaaacccattttttcaaaactcgaaaataagaatttattttgaaaagacacttttaaaactcacataattaagggtataatagtttcaattaatataaatcatagttggacaattctaataaacaaagatatatatggacaaatcacaaaaaaaaataaaaaaaattcaatgttccccaaaaatacccacaaaaaaggaatatacagaccaaatataaaaaagagggaaaatacagaccaaatataaaaaagaggaaaactacagaccatatacaaaaccaaatacaaaaaaaaaggataaatacagaccaactgccataaaagaagaagagaaaagaagaccaaatacatatccattgcttgactagaggagagagattagctttctcatttacattcatactttaaattcgtgctaattactatataaattcgttgaattgcatttttctccataactagaatacagtgataacatttatgaacaatcaatccagtgaatatgatgaatatttgatatctttgaaagttatcttgtaattataaacctgtataaatacctactctttccctaagatcagatatatcttgtatcaactttcatcttctgatattcaccaaaacttctatccaaaaccaagttcaaaaatatgaattgcctcatgttcttcaaaatgctattagcattctctttcattagtctattttatgttggtaatgcacaacaatcatatggcaattcaacggtttcggcacttttcgcttttggagactcaatacttgacacaggcaacaataatcttcttttaagtgtttctaaagtcaatttttatccatacggtagagactttataggtggaagagctactgggagatttggaaatgggagagttttttctgatataattggtatgtatatatatattgatctctacttgttgatatacttgtaacggatgaattcaatgtttgtaatactatgacacaaatattatctaatagcaagtctttgttttcagctgagggtttgggattgaagaatctcttaccagcatatcgtgatccatacctctggaacaatgatctaacgactggtgtttgtttcgcatctggtggatctggacttgatccaatcactgcaagaacaacagtaaatttttcttagtttgtccaaaagattataacaacttttattttatctatagcaaattttaatagattatattttggtgtgattagggaagtatatgggtgtcagaccaggtcacagacttccaaaactacatcaccagactaaatggtgtagtaggaaatcaagaacaagcaaatgcagttatatcaaatgctgtttacctaatctccgcaggaaataatgatattgctatcacttattttactacgggggctagaagattacaatacactcttccagcctacaatgatcaattggtctcttggactcgtgatctcataaaggtacaaagttagattgttttacatatatataggacatagtaagagattaaaattttggtcaaattgtatgtgacatattctattgttccccctttttttttgttatttgaagagtttatatgatatgggtgcaagaaaatttgccgttatgggaacattaccgctaggttgtttaccaggagcaagagccttaacgagagcatgtgaattatttgtaaatcaaggagctgctatgttcaaccaacaattatctgccgacattgacaatcttggtgcaacatttccgggtgccaaattcgtgtacgtagatatgtacaatcctcttttgggtctcatcattaaccctcaagcttcaggtaataacatgattcataattcaagaagaatactcatgtgtatatatatacgttacatttacaattatattttccaaaaatgtagggttcattgatgtagctgatgcgtgttgttgtacgccaacgcacttaataccgtgcttggatgcgtctcgttacgtgttttgggatgtagcccatccgacccagaagtcatacgaaaccatcgctccacagattattgaaaatatcaaagcaaagctcgcatgatcaagttatcaagctcttttgttttgataataagttatcaagcttttttttttctttttttctttcggcaagctttttagattgttatgattaatatcgatcggtaggttttaatatcgatcggttacctcaaccacaacgtcgctctttggtcaaaaaccaaatatttgttactcttaataaatatttgttttagatcttcgtgttgacttgatccctctcatcttttatgatccaaattaattaaactttgtcgtcactttatttccgatattgaatccaaaatatttagttaaaggccataggctttttgagttttctagtagcgcttactagccaatatcccgaagatacatgaactatatacatcaacgttggattttttcaatgaacatcaccaatttcatgtcaaaaaaaaaaaaaaacaaagaacatcagtatcaacaaattaaaaatctaatctcctgttttagtttttttttttttttaaatcacgtgcatagctttgttttgacattagaacatgacttttccaaaatatttcagatttatgaatgctactgtactatttcttttcgattcggtccatattccttactttattcagagagccttcaaacaccgttttcgtggagcatctttttatgtcgattgtgataatattgaagtttttgaatttatttttcttacagtttttgtctttttttgtaaaacgaaaactctagatttaaatctcacactgcttcatatagctagattcctttgcctgccactaaatccaaaacctcacgtgaattttagttttgaactagtccccatttcgagaattttagtgtaggaatagcaatataatttaaacgatcttgttaattataaaatacctatcagttcataaaattaaatttaatttgatatagtttggaaattagtgaactctacaaaagtgttttaacttttaacgattagaacttttattgcttagacaccagtacgtcttgtgattaaaccaatgtggagaagaaaatgtaaatggtatcatgtatgactagcaaattattgacttaagagtcatataaaacaaaagttcgaattaagttctttagtcttctgacagcatcgagaggtgagataagtttcctcattactacattccccaaaacacatattcgttaagacgttaacgttcgttgtctacaacaacaatgtaaaataactttaaaaaaaaaaaagtaagtaactaaatgtacaaatcttctttaggactgatggatttagattgatatatgatagttactagttacgttgttaaaaaaaatggtattaaatcactaacaacgaataattcattttatagctactagtcaatacgataattttagttttcagctaacaatattaatagttgataattctctactttcaacttatttcttgtacaaaccgtattatgtaatgtaggtaagcttattctcatgattagctcatttgatctaattttaatatttatataaaaaacttataaaccctaataaaaaaatatctgaccaaaaaaaaaaaaaaaccctaataaaaaacaaacagtacactgttttttctctctataaagagaaaatctccaaaagcaatgaccaatgagaaatgtgaagttgctcttccactaaagttgaaatcagaaaaaccatcaatggcttcttcatcatctctctttctcctccctctccttcttcttgtctcccaagcttcaggtattatattcttccttttactctatttttaacctcaaatcttctaaatttaaattcatagattaatcacatcaaacgaaagtaatgacatggcttttagcctttaaggttaagtggttaactttacttttgtttgtgatgataagcttcaacggttatattttacaacaagtgcacgtacactgtctggcctgggatccaacctagctccggtcagtcattactcgccggcggcggatttaaactgtcgccgaacagagcttacactctccaacttccaccgctctggtccggtcgcttctggggccgccacggttgctcctttgacagatctggccgtggtcgctgcgccaccggagactgtggtggttctttcctctgtaacggagctggcggtgtacctccggctactcttgccgagatcaccctcggtcatgacatggacttttatgacgtcagcctcgttgatgggtatgtctcacttaaaaccaattttttcaattcgggttcggcttaaattttggttcagttataagaaaaaccactatttaatcgtatttttaactatcaatgcaatattatattttaacatattattgaataagtaatatgaatttgaatgaaaaacgattttgtttggccgttaacgttaataaggagtgaataaaagatgagaattcttaaaccgaaccaaatggaaaccggttatagttttcatgaatcaaaccagcctatgaaatagttttttttaaaaaattaaaattaatttataattgtttagcatcttttaaataactaagcatactttattaatattaaacaaactaaactcatcattgtacttaaattagttacagtataagagtataactaaaccgaactttattcataacttaacaaaaccgaaactgaagtgaatttcaaataattttctcttacaaaacctgattgtaccaaaaaagccgaaaccaagcagctctaacatcaatagttttacacatatttgttactcacataatattaattaattatcttgttaatcaatgatgttagatataacttggcgatgtcgataatgccggtgaagggtacgggaaagtgtacctacgctggttgcgtaagcgacctgaaccggatgtgcccggttggtctacaagtccgttcacgtgacgggacacaggtagtagcctgtaaaagcgcatgctctgcgtttaactcaccacgctattgctgtaccggcttgttcggtaacccacagtcatgcaagccaacggcttactctaagatcttcaaggtagcttgccctaaggcttactcatacgcctacgatgacccaactagcattgcgacatgttctaaagctaattatgtcgtcactttttgccctcaccgcggccgttgattaaagggattgacatctatgaataattttgcttgactatttagtacgagatcttctttttgagttatcgacccgtttttttgttttggaatttagtgatttcatcgatttgttacaaagaacatgcattatttatgcgtcttttaaaaaattagtgatgtctaattcgtttgttaagtactgcactttataataaaacaagaaaacagatttataaaaggaaaaaaaaaacatataataccgtattaaaaccgaatagttcaaccaatcttaattttttttccaagaaatataatttgaagatacatttagttaagaatcaaaattcaaaaggaactataggtttaagtttaactagctcaactcatgcttctatgtcatttagaataaaatctcaaaagtattagacagaaaacgagatttggatacgctctagcaacatggcagattattaaatacaaacccattgaattattaccatgcaagtttgacttaattcccatcgtgaagcaaataaatgaataataaaatttcaaagtaattaagtggacattatatacaccagtgccctttttcatcgaataaaccaaaacaaatcaggagaaaaaaaaaagaaaaaaaaatcaagaatatggcctcgaacatttggagagatgtattaaattgggtaataccggctgcgtttatgactcttggattaacatgtctatcgctaatcggtgttgctatttttggaggtgtgcgattggtacggtttgctaccagagatgagaaattcgattttgtgtccgatattgttattgtcttatttcttgcctgtgccaccgttgttttcctctttctcgcctaccatagcttcaaacaagcaattcttaatgtccgacgtaatcgctcccaagatccttcgacggttctaccccctgattaatagtaatttttatcactgtttctagtaacacatagtataaactaaagttaatactcttgtataggcacaagaaacaagaaagcgtatactcgttcatgtcgtttcttgtttagttttcgtacataacagtttgtataataaaactatttaaattatttccggaaatttcataaagatagacatggttcaataaatatcttaaaattcccaatcgttttcaataatatattattcaaatgccacagtcgtaatcttaaacggagaatcaatgtcttttctctcccacttatagtttcagattcccacatagaggtagatattgacatcttactctaacaatatattcttaattttgatacgcattatgtaataataataaataatgctacatgaatacaaactatacaaaaaacacactataatttaataaccaacaaagaaagattaagtagcaagtttagagagttttttttttttcattttgcttttttgttgttgttaattctctgtttttctcttcatacttttctccataacatttttcataattttactagttgatgactctactaccattgatcaacctattaataaaaaaaacttattacaaaataaaactaatagtaattgataacaagagtaattagtgaaggaaaataactcattcagaaatattattagcaggacaaaaaatatcaaatattaatggttaataaaaataggaataaatataaatagttaattaattaaaagccatgaagggtagccatagaaaaagcatcaagcatctcaccaatcaaaagcaaatgatcagaaaaactctataaaaacgtcaaaaacagaaactcaaatcacaaaacaaaaaatggcaaacacaaatcttgaatccaccaacaaatccacaacaccatcaacggatatggagctaaagaaagtcttcgacaagttcgatgccaacggcgacgggaaaatctcagtttcagaactcggaaacgttttcaaatccatgggaacgtcgtacactgaggaggagctaaaccgtgtattagacgaaatcgacatcgactgcgacggtttcatcaatcaagaagagtttgctaccatttgtcgatcatcttcctccgctgtagagatccgtgaagcgttcgatctctacgatcagaataaaaacggtttgatttcgtcctctgagatccataaagttctgaatcgtcttggtatgacttgctctgttgaagattgtgtgagaatgattggtcatgttgatactgatggcgatggaaatgttaatttcgaggagtttcagaagatgatgtcgtcgcctgagctcgttaagggaaccgttgcgaactcttagagttccgattttctttttataaaaatttacattttaagttttaaaggtttttaacaacaaatttactttatatgtaagtaagcattctgctgtgcaaattttaaacttgtttcttttttttttcttttttttttccggcattgcatttaaattttagatcaatttattatgagttgcataatttggatgaaattttattggagaaaagactttcactaaagaatcggttataataattatgaaagactgaataatgaaatggtcaacaaagacgctatttgtctggaatctgattcttcttttgtgtggcctgaaaaacgggaatctaattcggtttaaaatacgggctttttaaaggcccagctttgagttgagcccaattagaattctattcaccttttttttagtagcttgagagattccacttttttcttgtcaactgaaattgtgccaatgataagaaccaaggccttattagtctgtctctacaagcacaacacttttttttttttgttcctgtatatgtttaaaaactaaaaatgaattatgattataaagtaaaagtgactcaaaatatctatctcaccataaatcatagttattaccttaagacatggcgtgatcgagtcgattgatcgaggcattgagcatttatataccacacacacggttacataaggtcgggctatatatgaaacacgtgaaatgtcacatttcatagttcttttaatggtgcaaattctgatgtctccatctcaccatttaatactgctgaattaacttttgccccttccattccattgtatattctattgtatttaacttcacgtaatttagttcacgacgttgaccttttttttaattagcaaaatcagtggatcatacagtattttctaaatacttcctaatcgtaatatattcattttactatgaaaataaaatctgaaatcagattcattctcatcttgaataatcatttttctgcgttaaaacaataattcgcgtcgaaacacagttggtatatagaggaaaacaactttaaaagcgtgtgagcttaggtgaaaaatgtcaaagagaaaaggaaataggtaggtatgattcaatttgaacatcatgatttttaatctgatattttctaatcaacacaacaaaattacacatttaaggggaaaaaataaaactgaagcatatgcagtagtatttggtaatcccaacaaacaaaaaaacaatcagaaaaggaggataacgttatcattatgttgtaatccatgatttcacatgccaacagctgcacttatgataaagaacccctctcttattaatcttcaaacctaatcaacaaattattaagtgagatatatatatatatatatatatatatatattacatataaataaattattatatatccccaaatcttcgtcttattatttttgtttttgtttttttgtcgtctccctcttattaaaaatgaagctctccattatatggattcagtagaattattataatttcttggacgccatttttctcaccccaagttttccttctaataaatacgagtgagcaatgcgtaagtataaaaacccgatttgactatataatattctcaaaagaataatactactaaatctgattttcaaccaaaagccaaattcagcggaggaactgtcgttttcctttcttctttacttcttcacctttctcctatttcatcttaacatataatcatcagaagaaaaaaaaattctaaaacaaaagaggaacttgagaattttatgcttgagacaaaatggcagaagatacgtacgaggaagagtgcgactacttgtttaaggcggtgttgatcggagactcagccgtcggaaaatcaaacctcttgtctagattttctaaagacgagttccggtttgactctaaaccaaccatcggagtagagtttgcttaccggaatgttcacgtcggagataaaatcatcaaggctcagatttgggacaccgccggccaagaaaggtacacggacataattttgtgacctcgtgactactctactctgttccttattttgtatgtttctttgagctttaattttgaccaaatcaaaaatattattttacaaaaaaatgaaggaaataaattatgtaatataacaaagaagagtgaactatcaatacttttattaggttaaaaagatacttataaaaatacttgtaacattccttaattattatttgtaatctaatcattgtaatttttatgagtaaagatttcgagcaatcacaagttcgtactaccgtggagcattaggggcattactgatttacgacatcactagacgaacaactttcgacaacatcaagaaatggcttttcgagcttagagacttcgccaatcccgaaaccgtcgttgtcctcgtcggaaacaaatctgatctccgacaatctagagaagttgaagaagacgagggtaagactctagcagaatcagaaggtctctacttcctcgagacttcggctttagagaatgttaacgtcgaagaagcgtttctagtgatgatcggacggatacatgaggttgttactcagaggatagcttcggaaaacaaatccaacggtgctgcgacgcctcacattaacggtaatgggaacggtacggtccttccggttggtaaagaaattgtgaatatacacgaagtcactgctactcaacccttattaagctcatcttccaactgttgtttcaagtaaataattaatgtatttttttcgtttattgttttggaatactttgatgatgtttttatttgcctgtgtattcgtgaaaattttgcctaggttgagtacatgaatttaaatcatacaattaaatccaaataaatatgaaaatcaacatataaagtaattaaataatcaaataatcaaatccgatgtcgtccagcggttaggatatttggctttcacccaggagacccgggttcgattcttggaatgggaactttttttaaccaaaaaacaaaatcacataaaaaaaagaaccaaatacaactgagataatctgtcaagactgtccaatatttcaaacaaattcagtttcttacgggcaattttttacacaaattttatcaaagagtgttgtgaagaacaataactcaaatatgagtatcacaaatcagtcatcttttacttctttctctttgctgttttggagtctaccctaactttcttgcacacatacaacaaagagaagccaaactcatcaaacactaaagtaagatataaaagatgaaactgaaacagaataagcagttactaaacagccacctcttgagggagatttcggctgtaaaatggaaactcgaagagaaagaccgtcttgaaccatcctggtaagttcccatacactcctcttgggaacagaatcagaggactaaagatcgacagaagatagaaacaagttagctatatatacaacacatcttcaaggcttatcaaacggtatctaaagcaagttatcgttaaaccttgttgtcttcttgtaggatctgtaagctcctgagtttccatgttttttgtcagccgatgcctgtttatattcaaatcagccatatgtgattcagaaattgtctaagtagagaggaagagaacaagggagaacctcgagtaatggtatgccgctgacgaatagaagtagcaaagtgagaaagagtggtccgaatatgacaagatactctgcaccttcaagcacaggcgatgcagccacaaagattccccaccacagtaacatctgatgaacatatatagccacaaagatatacagcaatgaacgatcaccaccatttatgccaaagatgaagaactcattatataccgaaatactaacctcaccgaagtagtttggatgtcttgaatacttccagactccaacatcacaccattttcctctgttttcaggagagtttttgaatgatagcttctgttgatcagctgcagcttcaatcaagaaaccgaaaacccacatagtccaaccgataacatctgcgggtttaagagatccaccaccatcacttgcattaacaagtgttaaaggtaagctaaccgtccaaacccacacagcctaccatgaaagaaaacaacaactctagtttgagaaccacaagcatgaattccaaataggctaaaagagagaatagtataaacagttcacctgaagagtccagaaaatgattagtctcactatatttccacgctgttcatcaaagcgacgatcttccccccattgcaagatcctaaaacaacaagagagtaatgctataatgatcaggaaagaaacaaaaaaggaattttgcagtcattggtagagacctcattagaaggaaaatccccaagcgaagaccccataccacaactagcaaagtcaatactatctggatggagaaaagaaaagagtctcaactcagaaacaccaaaacaatgaaaagaacagagagagaaaataagacaaagaagaagagcagagacttacctgtcgaaaatgccaagaggctttgagaacaagtgttaacacagcaagtataacgaagtttgtgctacctgaaccatacagagttaagtaattaatataatgactcctacataacagaaaccgaagctactggggattaaaggactgaaattggtcgtaccagcaaagtcagtgacttgatcaaatttgaaaagagccgtgattacgaagaatatgaactggtaaatcacctacaaattatggcaaacagagttttgcgaaatcagacatgaacaaagaaacctaactctgttcagaaactatcgcacaacccagaaaatgaacagaggaatttagattagctgagaacttacagtgacaatagcagtgagagccagaaaatgcgaatcgagaactgttcccattctatcaaacgaaaacaaaaaagcagagaaaacttccaaatatatattctttcgatcgaagagaaacgattcgttatcctttctattgtttccgagtaacaaaattgagaatatatcatataaaaaaaagtcattactttaacatttggtcattgggtgacttggtgtatggctaatactcccatgaatttatgtggctgcgagctaaacaccatgccgtttacttgtgacacgagaaaagtctcatttgtacacgaaaatacttgtacgcaaaaaagtgtgaactttatacattatttgcatcatacaatagtttggaaacaataaactgtatcaacctcgatgatatagtcaagtgttgcagatggaggaatctccaaaccctgtccaaattcgacatttctgtctccaaatcctaaggacggtggaattatcactttacgtttacctccagccttcattgacctgagaacatgctctataccttggcatagtcccttgctatacggtcttgagtccattaccatcgctagtgacttgcctttgcctccaaatgtgtccacgaacacttgttcagtgccatgtacttgtccctttacatcaaacactaccaagtatcctgagcttggagtagctccacttccaacttgtagatcatagtacctacacggttcaattccatgaatagacaagaagtttcaggtcacaataagagcagatatagattgcatttcacctcgaaatgttacaagtattttccaaaatgagatcaaaataagacaaaagtcccgtttcaaaatgagaaccaaattgaacttttcaagagattgagttcgtgatgaatgttaaggtatgcaaagaagtttcaggctaatcaaagagcagatatagttaagaaccacgtcaaaaagtattaaggattccccaaaacaacatcaaaataaaacaagcctaccatagagaatgctacaatgtaacactaaagggtaacgatttagacatgtaaatcccaacaacggaagctcacaaaattttctatttgctgaaacatatgttatggagaatgtaccttatgccgtttggtaagatgatctcttcttgcttttctaaacctctgccaaatccaaaaattacagaaaaacatttcaagtttgtgaagatgataacaaacccaaaaaacgcattcaagaacaaataaactatgagctcaagtctttgattgtattatcaaatccctaattgctaacattcacttaaattttccatctttagttcttaacaagagaataattcgaagtcttgatgagtaagagtaaccttgtgttatcctcttcctgaaacacatcgagtcgtgacttcttcatctgctcggagacaacaccgaaagctaaaaacccagcccaggtaaacccggcgccgattccgaaccgtcgcgtcaccggagaagtaatccaatccgtcaattgctgctcctgcaatgtgaccaccgccgttggttgtggattctccgtgaatgtgacgcttagcgactgcgatagaagactctgtttcggatgttgggatggagagacgaaacggtggtgagaaggaaccgtcgcagtgaagagagtcgccattgtcaaagatttttcgtaaaagcaaagttttttaaaatattatattattttgattcatatatcccaataataaagatcagccttatcttgttcgtgtgatgaataaagacagagctcaatgattttttttaatatatgttttcggtcaacgtttcgacgagtttgtcaattgttttttctttctctctttgtacagtttcaatattggaaaacaaaatagaggaaattacgcatgaacatgaacatcgcttgcaagcaaagacaacaaaacacacgagcacaatccttcaccttcttcaatcgtcatcttccatgaatctttctttttcacaattcacaagctgtgtcaaacactgaagctgaggcaaaaagtagcagagaaggaacatttgtagcttttttttccttcaaacagattgaattcgtcaaaaatgtgtttgccactttggtcgtcttcttctgttatcaatccttttgttcatgttcagttggtaatgaagaggaactggggactggtcttgggatgttggaacctgttacaggtttctgtagccgctttagagacgccattatctctgcaaaacttggccttaactttgaatccctgataaacacacacaaagccattacatgtgttaactgagacatggtcaagtgaaatgatgttgtttaagcactgctacttcatattgtggctgaaacattgaaaaataatctatactcacgtctgccagcatttactgatgagatctgcaattgctggatctacaaagtcgggaatgtcaagacgtcgatgctgaaacccaactgccccaactacttgcatcgggttcatctttccccacggttgttgtaacgtaaagagttcccataagatcacaccgtagctgtaaacatcgcacctgtttcacgtattgttttttcctgacattaggcctgcttctgacaaaagggaacaaaatgaatatctagtagcaaaagatctaagagcatacttctcatcagcaggttcgtttcttagcacttctggagccatccattcagcctttataagaccaacacataattagattaacgaactggcaattacaataactgtaaaaagagatgattaagacaggggagactataacttgcttcttaccgtccctgctgttgactttgaagagaggtatgtactgtgtttcatcctagacaatccaaaatcacacacctgatatatatgaaaatccagtatttgttatgtaaacttatagctgttacatacgatataacattatccacttggtaagaaacaataaattttatggagagaatctgaccttcacgacccagtttttgtcaactagaaggtttggggacttaagatcgcgatggacaatcatcggattacagctgtgcaaatagttcattccacgagcctgaatacaagtaatatgttacctcaacactctactgaaagaatcaagaagttacaaacaggtgatatagtaagagaagaaaagactaatacagcatcaagggccattctcaggcgcctcctctcgtctaattggttatttggccggtggattaacctatacaagctacctctgcacaagtttggaaaaaaatattataatgtaaagatccaaaaacgaagcacaaccggattgaacctgttcaaaccatccagattttagaacttaaagcaaatacttgaacaacactcattgatgcaaagaagattttggcatttagaggtcacaaaatagataaaaacagaggcatgcgcatcatgaataaggagatggaaatcgttgtagccatgagaatcatatcaaagtaactgaatcttgcaaagatcatagtattacctaggaagaaactctgtaacaattgaaagattcggtgggcgagtcacagctcccatgaagagaacaatgttgggatgtcttagctttttcatgattcggaccttgtatcacaagaatatataagaagggtttgatatagaactaatcaacatggaaaatcaggtaaaagaaaagattagaagaaaggctcgtacctcacttctgaattcctccaatgcttctcctgttaaatcttgatcaaggaacttcttgacagccacttcctaaagttcaagagtttcgacgatatggaactcaaactaaggaatttctaaactcttttttcatcgagttcaaattcacagtataaattggaaaagcaaatataatactcacagtcccgtgccaatctccccgatacacttctccataagatcctgtatcaaaagaagtaaagtagttaattatttgaagatgtagttacaccaaagcagataacagatgatgataagtcaggtaccaagtccaatacgttctcccacagtaatttcttcccacaaaatctcacagtcagatacatcatcacagtctgacttagaactttcattgccaatagatttgtcagatattctttcccctcctgaatttggcccatgattagagtccccactaccttgaggctcatgcccaccagaaccatcatccccgtcgctattcgagcctaattcaagttgcctggacacggctgcagctgttgccacaactgcagcagcagtggccgtggcagcagctgcagcaggaagttctatgggggaggagtctgagtttgcagacttggcagcagcagcagcaaccatggaagatgcaacaacagcagctgcagctacagcagcagggacggttctggcatattctgtcgaagatgcttcagaatgtgaagaatcagactgacttacaactttgccattatcacgttgatcatgtgcatttgttttagattgcactcttggtaatggaggcaaaaacctcactggaccaaaaccgttttggtgtcttccttcctgagttgtctctaaatcttttcctctctctttcttggcttcagtcgagtttttgctttcaacagttgcctccaattgctggggatagacttcggaaaataaattgggaggagctacaactccgctttcaagtaatacatcatgaagcttctgagctaaccgtggattctctttagcagcatcaatcatatattgtgaaacatctttgactttcatcctttgtgcagctggggagctaaccccttcagtccaagaaggtgatctcatatgggtgaaagaatgaataggcctgctagacagattttgaaatggagccttttcaactttcttctgatttttcacatcttctctagaaatatttggatgaacaatgagatcgcctccacctccggattggtttctctccccagaactcttggtactagaacgatgttcccctgttcgaaactctgtattctcttcatatgagctttcaataccattgctggaagaagctacatgaattgaatcattgtctccaggactagcggaataggcagattcatcatagtctatttgtagtccagctgcatcagctggaataagcgtgccgggatctcccataagatcaacaatgtactccctgaaattcacaattgaatagcatataacaaagtttctttctttaagcctcaatattagcttcaggaggtgcagattagataacaatatacatgaatgatagacaaatattgaatctacacattaatgtgatgattacctgccatcatcagccttaataaagttcattgccacatcttcagaaccggtatattgctgacctttgactattcgacaaggaacaccaacactatcacacaatacctacaaagtttcatataaagaaagaaccataagaaatgaaataaacttaaaagtgctgagattcagaagaaaaagtgcatactttgaataacaaggctcggtgacgagccaaaccaatagtcagagaaccaagtggcaaaaccatgcttccaagagttgctttcaaactatagctaagactcctccaagctctcaacatgctctctgggtgcacgactggtccacccatgtaatctcccactaaaatagccagtttccttaccaattcactattcacaaaaccagaggaagaaactgatcttgatttagcagcaatatcaagagccatctgttcaagtctcaacagattagaatccccacttctgttcacaagaacagcttcccatgtcacaccgtctgaaacaggtgtcccttgaagatcgagcaaaggaggtattctttctgctgaggatgcattcaacactccatacaagtcataaaaaccatccaagatcttgtcatcatagccaagacaattgtaattctgtgaatgcaacaataccaaaatgaaatgagttcttgggagtaactaaagagtttctgttatgcagagaaaacaattgaatcaaaagcttacccagtagcgataagcgatgagttcagctggagagttctcaggagcacaagagcctaaactgaattgcttaatagcctcaatctgagtagcctcaggatcttctctagcacttaactctaaagccaactgtatctgattctcttcttcaacagctggatctttggaacctaaatccacatgttctgacccattaacaacaacagtgtcatcaaccgtggcggctctgttcttggcattgaaagaattaggaggactagggatttttctatgaccaacagaacttaaccaattagataaaccagaaaaaggtttgatttcagggctattgctgtgatgagacctcggtgatgatgatgatgatacatcgatagacttatgatgattgctcttagttgttgaaattgatccttcagcttcatctgattgattgggcgagatatgaagtttcttaagaaagttcttcatgttcatcttcatactccaaatgctagaacaatgatcaacaggtcttaaaaccactccatctcccaaattcttcaaagtttcttcttttactttcataaaccctaattcctccccggaatttaaatcaaaagtttgaaactttcaccggaattcacgaagaccaatcaaaaagaacaaagatttcaactttattggacttcaaaaggcaaaaacttgagacagcaaaatttgtagagagcttgagctcaaaacacacagaattttttttttttttttgataaatcaccaaaatggttaaaagcacacacccactcaaatgcagaatttaaagaaaaaaagcatatgactgacaattttctccgtactgatatgaaccgctaattctcctccttcaaccaacttgaatatgtatctctctatctatctctgacgccactttctctgtctaaaaagttggacaaagaaagaagtggagagagtggctcttctctagaagaaaattaaagtttgcatttttgataattgaggaggagagttacttactgtgacatgcaaaacaaaacagaacaagaaaaaaggcgtatctttttcactaagcttagtgcgtgaacttgaaaagatgatgacgaaacataattaaattgcaccaagacagacttaacgtcaattgaggcatttaaaacggttactttttgtttctataaacagcatagaatctacatcaatttattcattactatgtcaaaaaagaaaattctgagaaaactgtgagatacattttttgtccttaattcactaatatataaataaaaatacttacgggaatgttttctttaaaattttgcattagaacaataaaaaaactatccaaagtggtttaaagcaatttctttgattcattttaaacgctagcaaccgcaaactcaacatttgcatatggtagtaggagaaccaatcaagttctaaatcaattttcatttttcgatcaaatatatcaaaagtctttttggtcatataattaaaactgtatttttattttttttaataaatagtatagcgtttcgatcttttatacttgtatctcttttgggaataaaagaagaatagcaattgtcacggcaattaaggaccattaactttttatattttgagaatgactagaaatagcttaaggtgtcaattctaaagaaaagacaaatgagaatttaactgaatattcacttgaaaagcacgtggttaattgtatattgcagtgtccggtgaatcttactaagatagagctcaattaattaacgagttagataattagtactccgttatcttgcttttgatgaaactctattttcgtgaagagacaccgttatctcttcgatcattcaacatatctatcactatatacatatgtaattaattagtttatatagtggttacgacttacaacttacaatagagatagctatgtatgtcatatatgcacaaaatatatgagtttattatagtatatgattaatgtcaaaatatggacaaccacacgtatgcatgtatgatttatgtaataggtaatcattgtatcttctttgaacttattaaatggtgtgagctatgagccaatagttgaccaacacgaatatttatgatttttccagtgatcaactctatagtgtccacacgattgtgaggttcagaaaccatcaggtaatttttttttaatgtatcattaattaaggtaactctttatgtgtcttggaaattgttttccaccatagaagatgattatttgttgaaataatttatacgtaattttttttaaaaattaaactttacattttaatttttatatactggaatgataaatacggtaaaaaacaaaaatatactattaccgtggttttcatattcatccccccccccattcgacttaaatatgttatctacttttccaactatgacacttctcaaaaatctattttatagtataaaggatctgtattccataaaataaaacaagaaaaaaggaaaacgattggaggttttaagtgctcaagggtagttggctaacaattcaattttgggcggcttgagatttgtccgaaaacataagaaaagatttttgatttggaataaatcttatagtaacattaaaacatacaaaaaaaaaaaaaaaagtaaatggggcttgagttttgtccgaaaacataagaaaatatttttgatttggtataaatcttagtaacatttaaacaaacaaaaaaagaagaagtgaatggagagtttctatttactacacgttatgtttggtttaagccaataaaaaaaagcgtttacgtaaccataaaacatagcgtgtgtgattttgctcagaaaagaagagtttaataggccaaagcagcaagattaaaagttaaaagttaaaaccgtaaaagaacattcgtttctcccgggaggtttgactaatttgactgtaccacgtgaaatggacgcgcgaatgataatgcgtctagtgacgcatgccacgtcatagttatcctatcagaaagcaaaacaaaaaaaacaatctttcagtttttgtttttatgtcgtaaaaagaatttggtgcattccaattggtgacagccacacattttttttggtgctgggaccacttccccacctatcacttttctcctctatctcatactcctccttcgttaaatcattgaaaaaaatcttgctaatgtgttttaattagtttaagtttctatatctatgcacgctagtttaggaattaagtatggcattattttgttgaatgcgtcgaggtggttatccttttttaagaatccacttataattttttttctttaagaacccacttatacataaaatgatacgtgaaaaaatatatggtctcattgtctatctacacatctttataagtcgaaactcataaccaccatccattatgtgttgtctagattatttttttttcgctttcaaatcgcatggttaaatatgatctgagtaaataccactgaaaaatatttagaatgaaacatcctaatcatccacaaatttatttttgccttggtttcacatatactgtgcccaatctctaatacataatattttgatctgtttaaaatattttcttattgtccggatctaaaagggtatccctagtgttgatataggccaaggcccatttatattctatagcacgtgaacgcccaaagttagtggttcacaaatcacaaatcaaaccgcaaatcatgtaaaccacacatcaaaccgatttggtcaacaatatcctttctcttcccaataatttttgactcatcagagaataatttggtcttcgtctctgcgcgcgtctctgtctgtctctttcagattcaactggagcaagtacgaaacataaatatcaataaattaaaggaaaaaaaataacagtagagaagaagaacatgttttcaactcctcgggagcaaaaaaaataattcagcaagagaaacggcgaataaggtggaaatgatttgacgaagaaacgcttggctgagagtaaaatcggaaaaacaaaatctgtaatttattattatcagcctctaaatcaatgggtggtggtggcaatctcgtcgacggtgttcgtcgttggcttttctttcaacgtcgtccttcttcttcttcttcttccaataatcacgatcagattcaaaatccccccaccgtttctaatcccaacgacgacgaagatttgaagaagcttaccgatccgtctaagctaagacagattaaggttcagcaacgaaatcacttacctatggagaagaaggtagattttgtttccaattttgatatctagatttgattcattccgagaaaaatcatgaataaaatctagcaatttctcagggaatacctaatgctgaattcttcacggagtatggagaagcaaatagatatcagattcaagaagtagttggcaaaggaagctatggagttgttggttctgctatagatactcacactggagaaagagttgctatcaaaaagattaacgatgtgtttgatcatatctctgatgcaaccaggattcttagggagattaagttgttacgcttgcttcttcatccagatgttgttgagattaaacatattatgcttcctccttctcgaagagagtttcgtgatgtttatgttgtctttgagttgatggaatctgatcttcatcaggttattaaagctaatgatgatttaactcctgagcatcatcagtttttcttgtatcagcttcttcgtggtttgaagtatgttcatgctggttagtttctaaacagtctctttcacttgtgttatcattatgatataaggttattgaagagctacgtctctgtttgtttgcagcgaatgtgtttcatcgggatttgaaaccaaagaacattcttgctaatgctgattgcaagttgaagatttgtgactttggtctagctcgtgtatcttttaatgatgcccctaccgctattttttggactgtgagtcatttatcaccaagactgtgaaagcttaagttgcattagggtaacattctgtttaagtgctggtggactcactcttactaactctgtttcaataggattatgttgctactcggtggtaccgtgcccctgaactctgtggatcatttttctcaaaagtaagcttataactctcagaagattggacttctattactgtttaatttcttttacgtctcatttttcttccaatcctttgatatctcttagaatatgatgtatgccttttgagtccacttttgtatgaaggcctgctctagttagctatctacaagtgtgcaggataaggtttgattacagatctgatgctaactctacttttgcgaaatacagtatacccctgcgattgatatttggagcgttggttgcatatttgctgaaatgctattagggaagccgctatttcctggcaaaaatgtggttcaccaattggatattatgaccgattttcttggcactccaccacctgaagccatatcaaaggtcagttatactattccagatgcttgttttagttttttcaaagtttagaactttgaattatagctctctttcttctgtggaagaagaaaaaaaagattattcactagttgaaaaactattggatcaagcaactttgagttgtattgtaaatgaatatgctatcttcaaattgtcagatcagaaatgataaggcgaggagatatcttggcaacatgaggaaaaaacagccagtcccattctctaaaaaattccctaaagcagatccttcggcccttcgcctgttggaacgcctgattgcctttgatccaaaagatcgtccatctgccgaagaagtatgcttaaattttgctttatttcttacatgaggtagatggaactatgtttgagaacgttgaaatgtgacagtactagaggcacatagatgcagaacctagaagatgatgaaaattcaaagaacaaactgaaattctatgttccctcttaatatatgtgtgcctatatttttacaggcattagctgatccatactttaatggtctgtcaagtaaagtgcgggaaccatcgacacagccgatttcaaagcttgaatttgagtttgagagaaagaaattgacaaaagatgatatcagagagttaatttaccgagaggtgatgagccttctatatatctcttctttggtttagattctcctctcttggtgattctaatggattacttaaaaaacatagatattagaatatcatcctcagatgctggaggaataccttcgtggtggcaatcagctcagcttcatgtaccccaggttggctaattgatcaaatataaggtatactatggttttggtttcaagaaatttggctgagaaaaatatatttccgatgcagtggggtagatcgatttaggaggcagtttgctcatcttgaagaaaatcaaggtccaggaggaagaagtaacgcacttcagagacagcatgcttccttaccaaggtacaaacagagatataaaaaaaaacctcagtttctttcattttaataaaaacgattgtctctgcaccaagtgatggtcttatcaaaatcatgaaacagccagcattattgatgttcttgtatttgcattttcagagagcgagttccagcatccaagaatgaaacagtcgaagaaagaagcaacgatatcgagagaagaacaacagctgctgtagcttcaaccttagacagtcccaaagcttcacaacaagctgaaggtacagaaaatggaggaggaggagggtatagtgcgcgtaacctgatgaaaagctctagcattagtggttctaaatgcataggtgtacaatctaaaaccaacattgaggtaaacaaagggaaacttcatatttctttataggtgcatgaatgtttgaaacctagtgttcttgtgcaagaaatttaagtattgtgttatcttgcaggattccatagtagaggaacaagatgagactgttgctgtgaaagttgcatctctacacaattcttagtgtttttctttttctgtttaatttaagctataccccatagtagagttggagaagcaaaagtttggtttgtcactctcactcggggtttggggttttggttggtgtatttaatagttccggggagacattgtaaagaatatataaaacttggtaaccgatgtaattctttgcttttgtaaccgggtagatcattggttgaaactcgaaagtcgaaatcatgtaaaaatttggatatattcttgccagttttgttacttatattagttatattcctgaaaaagttgctttgcatatacaaaaatggagaaataagctgaattaagaaacgttgaagcaagttactcttactcaatccaggtttggaaacttgattagcatttgcagagacatggctaataatgatacgcatgacagacgtaatggtttgagtgatataggcaccaataacagaattaaaggaattgtcattattggatgaccactggaagatgaagaatctgatggaggttgattcatatcactgagagactcacagaggatttgttatagactgcaggacaagcggatggagatttgctccacttggtcaaggttgaagtagatgacgattctttactgaagatcgcttacctgaagttggaagcctggtctgaggttgttccttaattagtacttagtatggattgactaattttggattttgattaattgttctgtggattatgctactttttcatatgtcaagatctaaactagaatcataagcctcatgaaaagctgtcaaaaccatattgtaaaattgattcagaaaatttgttatttttcaaggtggcaaatgaaaatggggaaagttgagaacaaacggttaagagaaattgaggtaatcgtttatttaaccaaagatactaatgtctaaacctctccttctaatatgattattcatatgtacgattttacaccataccagtgccccccaaaaatataccaaggaaacacagtgacactaatgaacatgtgccacgtagtatccgacggctatggcctatgatggcctatggagcggatcggaggtacaaaggaacccaattctttgggttaggatccgagccccagacagagaaggcgctcgaacatcgcatccattgatcggttaacctcgggaagtgtcggtctatcacatcttttaaagtctctgtagtattgacccactctaacccttccttagtataagtcttctcattgaagttcgtagtgaaaaacctatctgcttctagcctcctaaccaaatttagcaagtaagttagagtttagaaaagcctttgttttagtaagtgtagtcaaaatttgatttagagcttagaaacctggaggcgacaaggaggaagatgaagaaagcagtttcgctaatggcgaatcctttgatctttttctctgcgtgcaaccccacgtttagatcaagcttctctatatcgtcttcgtacacttctcttaaaaccttgatagcttcttcatcatctgtcaactcttcccatttgctgatcggactcatcaacagattctttctgaattcgttgtaccgaggaactcctctctcccggtctctataaactgagaaaaaaatcaatcaatcgtttagagaattgcagatatatagaagaggaatcattgattttgacttactctccaaggcagccatgtctataaggtgaggtctatcttctccgtcgatatcttgagccacaaggttcctcatccaattagggtagttccacaatgtcaatgcgccacaagattggtgtcccattgaaacaagtaactgctcaaacccaagtttcgaagccttttctcctgcttttttcccgatcagttccgtcatcggtatcctataaaacaaaactgtatatgtcaagaaaaactgcgcttggattgacctaaaaaaactgtacacaacatcctatatcttactctcgttctattgcagggttttctttgtctacattctcagagttcatatctcggagtataagtgtctctggtagaagacaatgcatcctgtaaacactaacgaactcttcggtaagggaataaggaactccatgatcattcggtttcttcagaccaactaatccgctaaatagaggaccaaatcttgctccaaccatgtccttcactttcttcccaaaaaacccataccagttgatcctcattccagcagtgagtgtgtctgtctttaagagttctattgtccaatcgatcgtatgaaccttagcgataaccgctgctgtcacaagtctagcagtccggtagagtttctcatcatcaaaatctggataccgttcctgaaaaaatgtaaaaaaacttaacatgatttgcataaacagagttagaaagaaggaaaaaaaaaaacagagttgctgcttgcaacacaaggaagacactaaacgtaagtaatgggtcaagttaatgacttactttgagcatatcacagacggagttgtgttctttgacaaagagagcttgcaacagagagaaacctgaccagctgtttcttatgtcaccggagatcggaacacctctttcgtccctctccaacaagccatccccagagatttttagctttccgtccttgaaaaccctaactcttctcattccagtctcgtcatttccatatattacactcccatccctatccccaaaataatgttatataaaatcaaactcggatagtaattaaacaacaaataagcagtaactaaatgattgagatactaaccaccaaggggttctagtgttgacagcgccagatttgtggtgatcatcggtgggaactttcttcgttctgaggaacttgaatgacttcaatggacatccacttgctacttcttctggagcttcaagctcaatctggtttaggtgatttcaatatctttattaatctataatcttaaagttgagggaaagaactgtaaattttcaagattaaaggggttaaatttgaaaatatcaaaacctggtgggtgtcttctaagtgatcaacccaatcatggatcatgaactggatccaagaacaagctatcacgttgaattggtccccattgtctatgaatctttttctcgctaacaactttgtcgccactacacttggatgtggatccaaaatctgtcataatacacacaatcatatcatatattatataaaatacattgtgatcctaaaacagacaaaaaaaaatatgtatcatgcagttgtgcatttactcatactgatgtaattcaatccataacataatttcgtagatgaattacgtatcatgcaaaaccaacactaatccaattagggtggctatcatgaggtgcatccactccaataataacaaaactccaacatttttttttctaaattttcagggaaaaaaaagtattgacaaaaaaactttattgcatcaacaaacacataaaatcaatcaaaagctgacaaaataaaataaaaagcagaggaacattacatcatgatttcaattttcaaccaccggtaagtagtgattaaaaagaaatgcgtcacaaaatttggttctagtgtctcattccactactatttacttttgctatattatatatcacttcgctttattttatagatttaatcaaaagtacaaaattaatttgcatgttgtgaaaaagtgattgtgaatatgaaggagagcaagaaaaaaacttacgccgtactgagaagtagagggaggcatattccggccgatgaagctgccttggctgccgatggtgttatcggagggatggttacacttgccgtcagccgtacgataacagaactcatcggtgtcgtaaccctgaccgttgatcggaccgacatgtaccagattgtaacgttgatgtagatgtcttcgtaaccccaagtaagccactcctaataacactggaaatctatgccacaatcctagcttgtccactaagtgcacaatctgtatatataattttttttaaacgatcaaattaacaaaataataagaaaaattataaaagcgatatgataacttattttcttaagagaagaaaagcatatatagttcatatatttagagagatagagagatcagagatgtatttatgttcttgttaaagagagagatgtatttacatagaacaaaaaagcatcaaagtaagacatcttggaaacaacatgatgaagctgaggatgaagaaaccatgaagaggatggagagaaacccattttttgccttgatttttttttgtctccctatctatcttctttggatcatgtgtttgctttattctttaaatgatagtcacacaattgtaatggttgtattcacacgattactctcatgtatttatatagacccacacgcatactcacatttacatatgtatgtatgtcaagttaatcttgaatatgtcattttattaaataagtcaacgagtaaattctaaataattaattatttagccatcggattgactattcgtttcatcgtcgtgagcatcacttcctaatgactaggtggcaaaatatatttcactaagatttcttcagattaaattcaacattttagggaggatttgtataaaaagagaatagtatctgcaaataaatagtaaaatcatggtcaattaattcactatatatggatatttatttccttgttttgatcaacctttcttatcttgcattattagattactttgtaaagaaaataatattgactaacaaattattcacactgtaatttatagtgtagaatcattgacaggtggattgatgcatttattcatagtatttttattatctaaaaatcccaattggcctggtggattactatctactctagtatcaatagtgcatgaattgactatgattcaacatctaatgtaaatatgttaatttatttgccaacagagttctccttatatagttatatatataaagttaacaactataataatgcagtctaagaagtttgatcttttgacaagtacatgtagtacaaaggtcgtgttagtgttttcgttgggtcaacacccgagttcagatagatatattgcatgttgctggaaaatataatcaagtgataaatcaattatcagtacatgcataaatttttagtaaatgatttaaatggattgatgaattattaaaataaaataaaaacacttaaagagtgaatagaaatatcacttttactctctctctctatatatatatatatatatataaattaaaatgtagttgttatagatctagtaaatgtattctatcaaacaaatttaagtgatctagtgtatggtaaggatataagtgtgtgtgtgtgtgtgtgtgtgtgtgtgtataactatatatacatgtatacattttaaatgttgtacattcaatcacatttcttaacatttttctcataatttattcaatagtaatactaaagatttcattgtcttgttgatgaacctttaatttcttgtatttatgtaaagctctcctagtttgacttatcttctacttaacctcaactacatttatatttattttacgatactatcaaacaatacatattagtttaatgtatttatattattttagatacaaaataaatttaagaatctatttttatagtatttttattgatgacatttccatatgtattaatgtatatattcaaggttactaatatttattaggtatttatgttattgatagattttatttataaaaggaagcattatctaaaagtctaaggcgtgccaaaaatttcaagctggttatgaaagacattgacgataaaattatactctaggaatagaattttaataaaataaatgtcaactgtttcttttcttttttttctttttgatgagaaatatttgcatgcaatgctccacgaaattcgagaaatgaatttaagtcggtcgggtaacgaccacctgcatcgttataaatacttgaacgcatttttgttgttatacgtaaccattttataaatagttgttacagacggaaaaagtgagttgtgtggttgaatttttgttagtggctataagttcaatccacagaaatatcaaagaaatcgtttatttgaatcctaataataagatatgaaaattaagatacagttatgaatccgatctccagttacatatatataaaaaatttgatatgtttttctgactgaaaatatctattgtttgttctgtcatatcttgtattttttggtcccgtatacgtatcaaattgtaaggaatggggacaagaaatatatattttatattggttaactttgacgaaagaacaatacaggtatgatctgtgtataagtatcagtgtactaagatatactgatacgaattaaaagcgtaacatattacaatgatacaagtacaccaacttattactacgtggctcttgttgccacttaaaaagttgtctagctaggtagagagtaacttgccacatatgtatggttcgatctagatccttctatatatatatgtatatcaccgtccatacaagaacttcttgaacaattaaccatcgatcaaccgctttcagagttattatgcaaagtaataaaaattagaagcaacgaatttaaaatgttatcgaaccttccggtaagtatgtataggtacgtcattcccttttgtttcttataaccgttcttcgagatttaatttgagacctattttggttatataatcaatcattaccagttgactttcacgaaaccaaaaatatatattgaacccaactaaaaggtgattttataagccctacatgaaactaaactaaaccggcacattaaaccaaacaaaaatgtaaaccggcatgtagaaagaacctttttaatgataatttggactcggatctcaaaacatagttgaaatgattactaagacacgacaagtgtatggatgtgtgatagtggtgtgtcgaaggggttgactttagatgaaagaaacatcaaagagtgagagtgaactaataaatgtgtagataagctctagctaatttggcagttatccattcttgtggtgaatttcggttataatataaaagaaagtataaagaagattaaatacatggcactctaaatttctcagaaattttggctgaattgatttttataaagtttgttagatccgaaaacttaattcatttccttaattctaagacttgtctgtttgtttagtcttgcaataagttttttgtggaagatcgtgacaagacaccaatattatgctaacattttcctttttcattaatttctggaacgtagtttacatattcttgaaaatagaccagtaaacttctttgcctatttaggttctgaatggtgactgagttttgcggtacgagaaaagtacggtgcggttcaaatagtaacgaaaatatatagatacatatgtatacgtagagattttgatactgttacaacactattgcggtgcagttttgggtgcagttttggttaccattcacagccttaatttgttacattattaacaggaaaaaaaaacttgaaattctttactcttcagtcttcagcacactttgttagaaaacatatctttgtcgtttatttcgggtaacacgtaaacaactataccgtaaactacactagaagatgagtggttagaaagtgagatattttcatgtgcattcggtgtcatgatatccattttcttcttcactttttcgattctttctaatccttgaccaagtcttgtgtttaatgttaccggcttaagcatatgctagcgtgatggaaaatatcacaccaattgtacaaatttctacatttttctcttttatttgcaggagctttgctctccagcggacagccccacatcgatgatttttccacatcattaagttttaaaagtctttgaaattattgtaagtctgttaagttaccatcagatactattctagaaacttacagatatttcacatttgtataaaaaagtcgaagtttgaaagaaattaaaagcaattacaaaatttagctagatgtgttatcggaaaacattaaacgcaactgataggtgtttcgtagaaacgtgataacaagtacaatgtcataagcattttcgaccaaatgttagtctggcaaattataaaactaaaatatgttacttcgaaaagtgtctctataattaaagtagtccaccaacccttcacggaattttaggtagagttacctgatttcagatgtagggtagtcagtctttatcgccaaattttctatttacagcatattgaatttgataaactttatattcattgatgtatctgtagtatatttttcgaaatctgtattatattatcagacatttgtaaaataaaataatcagtaacttcttccacttcttcttctggtttaagattcagttttttttacggcattgttaacaaattaacaattcaaaataattgaatcattctcataacgagaaattgctcgatacatacgttggtaaaaaaaaaaaaactattcattcgaacacaagtagctcttacaacatttgtgtgccaaaggcccaatagaaggcttagttaaatcagtcagtcgttacataaatatggtgagagaattgaacgattagggttgacattacactattaggcctttatttgggcctatttaatgggctagatttgaccttatgttaatggatattttgcttacagggtttggtccagatctgcaacagacctcttctgtcgtaagaggaagattgacaactttattttttccatgaagggtcataaaaacgaggcccaattttgaaaacttcgaaagtacaatcaaaataatgaaaatgtctacatcccagtttagcaacgaaggcaagaccagccaaataagtttctacacatacaacaccaagagacctcatgtttgaagacatactatgtgtctacaagattatcttattgtgctgaaaccatagactgaaagtctgaaacatcgaaggctggttgatagttcttatgaaaacttttggaccggatcgacatggtgatctaagttttcggaattttgtttttgggatcagtttacctgtgtttttcggatatttttgagtaagtttactctttaaactagcacataactgtatctcgatttcttttgggttggagactcaaagttcgagactcacaactgtagcacatgtaacttgtttatggaagtataacaatattaaatttaaaacaaacaaaaatcataatctttttagtaaactaaaaattgtcgaattatatgtttaaaacatcatttttttaagtgaaatttggtttacatgatgactcccttaaaagaaattgtttagctagggttcagtttcaattattctgcctaaaaccatttctttatcaatcaaactataataacaaaatttgctgtagtttacgttcgatttcaaattatatggccaactcctacaggtgatccgaaaagacattcaatttattgatatgtgttatttttatatcttaatcttaacttttattaacttttaatgttcttcaagtttataatcttcattgtgtaaagacaggaatcaagtactcgagttgacaaatgaatcgtataagttagtgaatatctttggtcctttaaatccgatccgatcatcattttacatatatgacagaaaactattttcgcaattaactaaaggactgtgattgtagaacaggatttagttgttagattagatatgagaataatcatacaaagatagtcagtgcatatggcagcaaagattgcaaaatttaaaagtctccaaagaaccaaggatcttctcatctacccgaggcagttgcataaaccctagttttttacaagaaaaacaaataacacgctaaacattgcttcggaatcaaaataataaccatataattctcaaattatagcgaataatccttaccaaaaagaaattataacggaaaattaaagatgaatccgaataaataattgttgagtagaaataaagaaaaataaaaaatagagaaggtgaaagaagatgtagagctcccttcaatccaaagaagagtaaaagccattaaagggcaagttaaagctcctgagatatgcaatccatataaccaaatccttttttactttacaaggattagggcttatgggatccatagcttagcagcttttctttaccctgctcaactcatgtttgaactttaaggagctctacttccatcgtcagatcaagatctatcgaaaaacaaagtatcttgtcaaatatattatggatctgacataagcaaactgtaaagacctttaactcttcataaaacaatgagaaagttttgatgagaacgtggattaacaaaaacaccaaaagaggtaaatctcttacattagagctatgaaggagatataaagacagaacaaaagagaggaggaaccctaattattaaccctaaacatacttagagagaaggaaagagagagagagaagaggccacgtcatgttttggaagaaatgatagatagagagtcgtaattatagtggtttagatattcgtgatagaagaataaaaagaaaagaaaaaaaggaacaggtgggtgcatctgaaaagacatgggaagggtctgacattgtttgtgttagattccctacgcgtcacatgcgtccttctcggcttttgtgcttcactctttttttttttgggtaaagataataaaaataacaattattatcgttcctgccaactactagtccactacatttttaagatgtaactttgaaaatgaatttggccgaccattctttatttcttttagaaaataatgtacaagtgtttccgtttggtgacctaattctaaatcatttgttagccctaacaactagaaatttcaacacgaaatagtgaaataggttgatgtacggtcaggattataagtctgatgatgtgggcacgaaagcaggtaattatttctctgtctgagcagaatctattgctagatttattacaacgaacttgtcttattaccctcacgagtctcgtctctttcacaattcaatggcttatttttaagtgtgtttttttatccatcgtgtaagtttttttttgagttgtttaaataaaaatttgtatgatgaaaaatgttcactagcaaaatacttgaccctgaagtatcctaaatttttctggttcatactcaaatgttaggcttactttgttttctttggtcacctaaaaaaaagtggactgatcagcctaattatttgtgcaaactttaatgattgggctgcatctctttcttatgagcccattatatgggcccagaagttaacagttgcttgtctaaccttctcggaatagttatttgggccttatatttgggcttgattccacgcttcatgaaacggaagttaatccggtagtgttctcctggtccatgctgcggaaaatatgagcaaggttaatttggcaacttgttgatgcagctttttattttcttggattttttttttaatttctaagtatgtttaggcaatgttccaatattcatacagctaaaaaaatgttaatattcacaatcatcttttgtttaaccactaacttataacattttaaaccgaagaataattgacgagtcaatgttgagtaaaccggaacaattttgcttttcatttataaacctttaaacgacgtcgttacgatagacgcttccagcttcgttttatttctagctttagagcgtctctttcctttttcgtttacttttcaatattttcccctaaaaatgtcgattccttctgtaattgctctaacggctactttttctccagagcatcataagatacctcaacgttaacgataacaaattaattaagatcagtttcgatcaattgcttgtgatccgattagagagttccggagatggaacagccgaagaaagttgctgataggtatctaaagcgagaggttcttggtcaaggtacttatggagtcgtcttcaaagctactgatacaaaggtgaagatgattcctctctcaattcttcatattttttgtcgatcccatcgaaactagggttccaattctgtcgtgtgtcttttgacgtgtctcttcctgggaacaatttggttaaatctgatagctcttaggttttaaatcagctaaagtttcgatctttacactaatatgtgttcttagaagtcaaagtttgcatttttatgttcttaatggatttaaagtgtgtagtttttgtttaagtttgtataaggaagctgatttgttttgttgtggcaatttgtagaatggagaaactgtagcgatcaagaaaataagacttggtaaagagaaagaaggtgtgaatgtaacagctcttagagaaatcaaattacttaaagagcttaagcatccacatataattgagttgattgatgcgtttcctcacaaggagaatttgcacatcgtgtttgagttcatggagactgatctcgaagcagttatccgagatcgtaatctctatctttcgcctggtgatgtcaaatcttacctccaaatgatattgaaaggtcttgaatattgccatggcaaatgggttctgcacaggtactatcattggaacttagaagcagaacttgttctatctctaataaggtctgttttgatttaaacttatggatgatcattcgtatttgtttcagagatatgaagccaaacaacttgttgataggacccaatggacagctgaaacttgcagattttgggttagcacgtatatttggtagcccaggtcgtaagtttacccaccaggtatgctttgtttgttgtgacaatgctatttatgtagtagttctgctatctttcgtatcttgatgtcctttagcaattttcataggtgtttgctagatggtatagagcacctgaacttttgtttggtgcaaaacaatatgatggtgcagttgatgtttgggctgctggctgcatttttgctgaacttctattacgcagaccatttcttcaggtgaacctccattttgattgtgtagtaatccagtgcatctgtctacttgtttatctaacttacttattccattgcagggaaacagtgatattgatcaattaagcaaaatctttgctgcctttgggactccaaaagcagatcagtggcctgacatgatctgccttcctgattatgtagagtatcaatttgtccctgctccttctttacgttctttactcccaacggttagtgaggatgctttagatttgttgtcaaagatgttcacctatgaccccaagtctagaatatcgattcagcaggctctaaaacacaggtacctaaaaatctcccctatggataatgcataagaacaggttatttagttttgttctcaaaccttgatttctttttaaaggtacttcacatctgcaccttcacctactgaccctttaaagctcccaagaccagtttccaagcaagatgctaagtcatctgatagtaaacttgaagccattaaagtgctgtcaccagcacataagtttagaagagtgatgcctgaccgaggaaagtctggtaatggtttcaaggaccagagtgttgatgtcatgagacaagctagccatgatggacaagcaccaatgtctttagatttcaccatcttagctgagcggccaccaaaccgaccaaccatcaccaggtaaaaacaattggttttattacagtcagttcttggtcagcttaaaaaatgaaaacttttgatgaattcttgatttttggatttgcagtgcagatagatctcatctgaagaggaaacttgatctcgagttcctataggatatcgcgtaacaggcttcttcttgacgtcgttcttcaggttcctatagcctataggatctctcttactggttggttccgttcagtaattcctgaaatttttcatatcacaactagtgatgacgaatagtttgaatcattctttctgtctaaaataaagaatataaagcacagatgattaactaatcatcatgtacacccttcatagaaaaatctctgtttttggcctatgtttagaagagagctctgatcccaaactcattcttcgttcatttccaatttaaagtccagaatttttagtatcgaacacgttggtgtattacatatatgaatttttgatctcattacactaatgctcgatgagaatggaaacacatccaaggaatttcaataactatgtaacaatggtaaagttttctaaagaccaatgtacggccacatcaattagaaattcccaataagttcatatgggcatacaagaataaagcactcattaagctcatttgcaactgctttttcctcagacgtttattgatcattggacgtcaccatctttgtcatctgaagatccgactctgttcgtagctttctttgcctaatcatgtaaaacaagaaacagaatcacattatggcagagttattatacatataaaactgagccgatcagttaaaaggttttacctctttatcccagtttgtgaatatagtgactaaggaaagacacaacacttgaacagacaatgctgttacgattcccagccaaagcccctacaatatgaaaataccacaaaataaaagtttctataaaactagtcttgtgtttgaacttgagaatgagaaggagagtttaagattattacccgaccaccaatgtggaaatggaaaccaagtaacaatcctaatggaactccaacaagataatatgatccaagattcacacatgctccaattttctgccatccacatcctctagcaacccctgcaaccataaatcaaaactatttgaccaggattcgaaccggacatatataaacaaggaaccaaagccaatcttctatcattcaaaacctgagagtacgcattgtaagccatcaaggaagtttccacatgcaacaatcggtatcattgatgcggcatatgcgatgattttcgggtcgctgctaaaagcatgacctaagatcttccgaatcgacaacaaaactgttacaaccacaattccctcggctactgctatgcctacaatgacatatacagccagttttgccacttgtggattccctgctcctaactcgtttgagacccttatgctgcaagttaacagaaacacacaaagtgagataggttggtttgatgagatttttctttttatgagctcttggatacattttgttactgaccttgcagcgccaccaagaccaaccgaaatctgccagattgttagggaagtatttagactgaaaagttgcagaaatgaggttgatcaaatataaagaagaagtacacaaactctgagtaccataagacaaagataaccgaaatctaccagattgaaagcaccgaagtttctaaaaccgggttaggaagaaggcctgaggcaagaaccagaagctcgaaggaccaaagctccaaactgtttcaaacagaatttgattaaaatgcagatactggaacctgaacaatgcagcattttatgtttgatgacttaccagaccatgaccgctgaaggaaaagcaattttagagaaatcataaagttcttgaaaagcctctttcgaaaacccggtccaactatgcgagcaagaaggcgaaaacttgacataacacgagaggagaatgacgttgaaccagtaagagaccgaaatagcaagagcagctcctctgtatcctaaaccagtcttcaacacaaacaaccaacagagaagcaaatgaagacatgtagtgataccagagcagacaaagacagggaacacattgttctgcgcttgcaagaacctgttgatacattgaagcagtccgtaggcgaagaggctcgggatcatgtatttagcgtaggagccagcaacacttgcaatggacttgtcttgatggaccaatacgagaatctgttctgtgttagcccaaatgattgagagaggaacagagagtataagaagtacaaacattgctctctgcatttgaattcccaattttccatatagttttgctccgtaagcttggccacatagtgtctccaatgcacttgctgttcccaactgtttcacatacacacaaactttgaacaaagttacaaaacagaggataactaaggttatgttattgaatgcactctttttttttttttgactggatcgtgagagatgggacgaagaaacgtacgaggaaggtgaagccggtaacggaggcaaaggaggtggcgatagaggcggcagagagaggaagagagccaagatggccaacgaacatgacggagatgacttggagagagtattgaagaaggctaacaccaatgagtggagcagaaagccatagctgcttcttcacctcctccttcacacgaatcatcgtcgtgtctttctctgtgatcagaagcggaggcgtcacaccatcttccattttctctctgtttctcacaaaaaaatatgtcaaaaaaaaactaagagaaatagaataacaacaaactatctctctctttgttcctagtctttagggtttgtggagccgtcgttgatatttatgcattttttaaggaatgaaatcttttaattatgtggtaaatagaaattaatttcttttctacttccccctgaggcagattatattttgttttattaaatgacaacaacaattgaaagatgctcacaattcacaaccacgcatttttttttatattcaaagcttccgattatatagacaatgacgtgagtggctcctagttgctcttctcttattctattctccatcgagtcaggagaccacctcagactctgtctccggtattactagcaaaactctcctttagctttcttcaccaaaagttgttatgattacataacctatgaggagattggaaactatgaggagaggcaccattattgctacatattacagagattaaggcaatttccgagaaagtattgaggattttagtactaatgtacagaaagttacaaaagagtgtgtttaccaagtggggaaaactgaagtttccaaaacaggattttggaagtaaagcctgagactgagaggaagaccattttcttgtatgaccaaatcgttatgattccatcaagatatgatcaacattaaagatatgatatatacaagaagacatgaatcatatatgtgtaccaccagtctaaccaaaccatgaatgcagatggaagaccaaagaaacaccataacgttctcaagagcctctggggagaacccggtccatgttttggcgcaagaaggcgataatttaacgtaaatactcaacaagacaacattaacccaaaatgaaagcgaagttgcttgggaagcttctctgattcccaaaccagacttcaacaccaaaccccaacaagcatgaacgtgaagcaaaaccggaacagagcatgagaggaaacactctgttttagctcgcaaagaaaagcacttgagaatcacgcacccgataaggtctgggatcaagaacacgatgtatgatccaaaggtttaggcaatgatcgcgtcttggtcaagaaacacaagaatggatgatacattgatccatataatggataatggtaattaagcataaaagtacaagaactgccgcgtttcttctagccatttccctccaccgcctccaccgcagggacgtctacgattaacggattcgccggagactcatcaaaattggaatagtggtacgtagttggctaaatcgtaatcgtttatggcttttaaagcagtcaccaatcaaacaaaacctttgtatacgacgaatttcacaacagacatagaaaaggcccactgtaataaccttgtaaagcccaatagaattatttagtaaagattagcgcgttgtcatcacgcgctgaatttccgcacaatgtgtaatttcaattgcagatttttttggagtcgcataattcttcttcaacccctaaagatttgagataatctctgaggagtttctcagagaaaaaatgcttcagccaagtcctcctcactactcttcctctagagatgtcagacatcatcatcatcatcatcatcatcatcatcatctagctctgagttctaaagctagggtttttccactttcacttccctgtaacttctcctctagggtttcttttaagcttcaacttcactgcgccgcttcttcctcttcttcagtttctccacctcgatgctctaaacctaacccaagctctcgaaaacgcaaatatggcggcgtaatcccttccattttgcgttctcttgactcttccactgatattgaaacaactctagcttctctttgtctcaatttaagccctaaagaacaaactgttcttcttaaagagcagactcgttgggaaagagttcttcgtgtgtttcgatttttccagtctcaccaaagttatgttcctaatgtgattcattacaacattgtgttaagagctttagggagagcggggaaatgggatgaattgaggctttgttggattgagatggctcataatggtgttttgcctactaacaatacttatggtatgcttgttgatgtttatggtaaagctggtcttgttaaggaagctcttctttggattaagcatatgggacagagaatgcatttccctgatgaagtcactatggctactgttgttagagttttcaagaactccggtgagtttgatcgtgctgataggttctttaaaggttggtgcgctggaaaagttgatcttgatttggattctattgatgattttcctaagaatggttcagctcaatctcctgtgaacttgaagcagttcttgtcgatggagctttttaaggttggtgcaaggaatcctattgagaaaagtctgcattttgcatctggttcagactcttctccgaggaagccaaggttaacttccaccttcaacactctgattgatttgtatggaaaggcaggtcgtttaaacgatgctgctaatctcttctcggagatgttgaaatctggagtacctatagatactgtaacgtttaacacgatgatacatacttgtggaactcatgggcatttgtcagaggctgaatccttgttgaagaagatggaagagaaagggatatcccctgatactaagacatataatatccttttgtctcttcatgctgatgctggggacattgaggcagctcttgagtactataggaaaattaggaaagtaggactttttcctgatactgtaactcatcgagctgttcttcatatcttgtgtcagcggaaaatggttgcagaagttgaagctgtgatagctgagatggacagaaatagcattcgcattgatgagcactctgttcctgttattatgcagatgtatgtcaatgaaggtttagtcgtacaggcaaaagctctgtttgagaggttccagttggattgtgtgctttcgtcaacgacacttgcagcagttattgatgtctatgctgaaaagggactgtgggttgaagcggagactgtgttctatgggaaaagaaacatgtcaggccagaggaatgatgttttggagtacaatgtcatgatcaaggcttatggtaaggccaaacttcatgagaaagcactttctctcttcaaagggatgaagaaccaagggacttggcctgatgagtgcacttacaattccctattccagatgcttgctggggttgatttagtggacgaagcccagcggatcttggctgaaatgctggattcgggctgtaaacctggatgcaagacctatgctgctatgatagctagctatgtgcggcttggcctgttgtctgatgcagttgacctgtacgaggcaatggaaaaaacaggggtgaaaccgaatgaagttgtttatggttccttaattaatgggtttgctgagagtggaatggtcgaagaagcgattcaatactttagaatgatggaagaacatggcgttcagtccaatcatatcgttctgacttcccttatcaaggcttatagcaaagtggggtgtcttgaagaagctaggagagtgtatgacaaaatgaaggattcagaaggtggcccagatgttgctgcatcaaacagcatgctaagtctgtgtgcagatcttggcatagtttctgaagcagaatccattttcaatgctctcagagaaaaaggcacatgtgatgttatttcgtttgcaacaatgatgtacttgtacaagggcatgggcatgctcgacgaggctattgaagtggctgaagaaatgagagagtctggtctactaagtgactgcacttcatttaatcaggttatggcttgctacgctgctgatgggcagttaagtgaatgctgtgaactgtttcatgagatgttagttgaaagaaagctcttgctggattggggaacatttaaaacgctcttcacgctcttgaagaaaggtggggtgccaagtgaagctgtgtcgcagctacaaaccgcatacaatgaagctaaaccactggcaacaccagcaatcactgcaactctgttctcagccatgggtttgtatgcatatgcgctggaatcatgccaagagctcacaagtggtgaaattcctcgcgagcattttgcatacaacgcagtgatatacacttatagtgcatcaggagacattgacatggccctaaaggcatacatgagaatgcaggaaaaaggtctagaaccagatattgtcacgcaagcctaccttgttgggatatacgggaaagcgggaatggtggaaggtgtgaagagggtacatagccggctgacgtttggggagcttgaaccaagccaatcgttgtttaaagcagttagagatgcttatgtgagtgcaaacagacaggacttggctgatgtggtgaagaaagagatgagcattgcttttgaagctgaaagggagtgtagttcaagatctggagaagaagaagaagacgatgaagaggaaaattctgaagaagacgaggcattttgaagtgtagccacagatgtatgtaagaaatattgtagaatataggatttagtggaaatggactgtacagtttcacagaagccaaaggaaatatgcatacttaagcctcagattgatctctggtaaagaaatgtgtatcttaaaactgttatagaaagaaaaaaaaaggttccacagggtcaaatctataaaagcgagcacctttggctatggttttggtagaggaattagcatacgctccttacaacaatagattgatttgcatcatcgggttggtcttctgttggttttggtctctggattgaacatctttctcctgtcttgcttgctcttattttcaattgtatagcatcaaagcccatgaaaagagccagatgttctggaattgattccaatttggaatcttgtcagttactggtgatgaatatcaacatggaagatatgaaacagagtagccagcaaattccttccattcggaacaaagagtctctcagcttcagtcaaagtatatcagttattgatctcaagaaagtaatagtagtgagcaatgaagatgatgatggagctctagagttgaagaacagaggagtggaacgaaccagtggagaactcttgaagaccacagtgtcaatgtgtttattgttgtctttgtctttctctaaaagttgtaaaaaaaaagggtgtgaagctaaagctaaatggtatgtaagcaatgttttgcaattttaaatttacaaaataacactcggagtttctgaaagtttaattttgacccataatatttgatatttgaggcattgtcctggaattaaaaccaaattgaaactccttcgcgtgtgttttctgctgcatttttacctcttagcgtctccggcgaaaacccactacgactgagtatggcgctcgaaatcgaagctcgagagtaagatttcgctttctcttacaaaccctagttttcgtttagtgtcactgatatgaattgtgctccaagaaccatcgtttacgaatgctcagatggatcttaggttacatgtttggagaaaacatcttgaatgttggtttttttatatcctccatactaaagttgtggtttttaaatctacccataatttgttttagcttggttcttctaaagctaattgcttctgaatatctagattcctccgtagctattcttcgtttaaattaacgtcgtatacgaaaatttgagggagatcatcgttagagtgttttgattctttgcaatgcgtctcgaggaaaaatccaatttgtataaatttgaactcttgttaattctcggcttggattgaaaccattgacagtattattagccattttgttagtaatattggatggagaacgttttgatgctatatgtcagctttgtgtagatcttcatccctaatagctctctattgtgttgaatgtctcagtgtaataaagattatgcttcagttctgcaaagaaaattccttgaatcagacattccagacattacaaagcgagtgtcaggtttccttgaatacagtagacagcgtcgagacgtttatttctgatattaatagtggaagatgggactcggtactacctcaagtttcccagcttaaacttcccaggaataaacttgaagacctttatgaacaggtttgttcttttactctgtgaaatgtagaagtgtataaaaatagtgattgtcattgtaagttttgtttattttcggggtgattttttcagattgtattggagatgatagaacttcgagagttggacactgcccgagctattttgagacaaactcaggtgatgggtgtcatgaagcaggagcaagcagaaagatatttgcggatggagcatcttctagtcagaagctattttgatccgcatgaggtatggaaactatattatgctcgactattcaatatcacgttgggtgttgcttttgttgttgctgtgtcacctaagcatggttgtccgcaactgttcaacagttcaaacaatgttgctatatctgttatctcttgcattttctgtactctacttgcgacttttgatatctttcaaaatcttaagtagaaccagtgagcggttaaacatgaagttgtttctagatgagggtctcaaagtataacacatgctcgtatttctgagtacaaaagtatctttacatgttactagctcttttacatgttgatggatttgacttttctatctgattagtcttttgaggtgtattgtctcctagtcattgttcatgttatgcacaaagagtggcgtttttcatgtaatcatttccttgtgataatcatggtttgctaattttacctttgtttctaaggcttatggagactcaactaaagaaagaaaacgggcacagattgctcaaggttggccatttcttctttattttctacaataacaattttcttcagttattgtatgattaattacctgaaggaaccaagtgatgttctggaatactctctctattgcatgcttaaatattattatgacatgaaaagaagttatgacgagaacttatttcctgtttaatggttatagagtttttgttttctcttgctcagtatgtactcaaggttcactaattgtttgttctcctactcgatcagctgtggctgccgaggttaccgtggtaccaccttcacggttaatggctttgataggtcaggctttaaagtggcaacaacatcaaggtgattatctaaggaactgtggatgctaccaaacagttctgtcaaacttcatctcgttttcttttacttttttgcctacattactaatatatcaatggaatcaacatatgtaccctctctcatttcctaaaatttacatacacttgtgtcaggcctgctccctccaggaacacagtttgacctctttcgtgggacggcagctatgaagcaagatgtagaagacacacatcctaatgttcttactcataccataaaggttcatattcacactttaatagcttctttagcttagtggtctatgatctgttgctcatgattattttgggttttctcatcagttgagttcttgtctaattttcatatctttttccttgtgctggtgctggtgcagtttggtaaaaagagtcatgcagaatgcgctagattctcaccagatggacagtttcttgcatcttcttctgtggatggttttatcgaggtgagttgatccggaatctgtatgtatgataatacaagttattagtctttaaaataattctgtgactaggattgctcagacttgaaaagcattacaggtatgggattacataagtggaaagctcaagaaggatttgcaatatcaagctgatgtaagctctcatgtcttcttttcattttttaattctaactcagtacggggtcagatgagctgttagtacattttaatcaaatgaaaataatccttactgcatctgattattgaacgtgtgacaagtctgtgagaatgatatggtggattactttttgctttttattccaaaaatgtcgcccatgagattcctgaagcaccaagtatatggtggattactgttatctttgaattttaattttttctccaatgtaactcctaaagcaccaagtatctcgtctgagacttcctggtatacaaaatatcagttttggataaagagttcccattccatcctctttacttactatgattaatttctgacaggaatctttcatgatgcatgatgatcctgtcctctgcatagactttagcagagattcagagatgcttgcatctgggtcacaagatggaaagattaaagtaagttccagctgcatatgtttccttaaagttgaattttttgtctgaagatagactattgcggcagtttggtagatatatcttcttcctctcattggtcccatatgtattctgattgaatacaaatagaaaaactagacttagatgcatgtcacttttgcagatctggcgtataaggactggtgtatgcatacgtcgttttgatgcacattcccaaggagttacaagtctttccttctctcgggatggaagccaattactgagtacctcctttgaccaaactgcaaggttttattagttatatctttatttttttattttgtacttgcgatatgaatctcgtcctatcaaaaacttgaggctttatatttctttgatggtagaatattcttttaacttttgattgcatcttttttcttcttgtttttgttaatattttccttttcatttggtagttatgtaagtttattggtagagcttctagtcgaatataatatcaaattcttattatatattttgctttattttatgcagaatccatggtttgaaatctgggaaattgttgaaagaatttcgtggtcacacatcttatgtaaatcatgccatctttacaagtgatggaagccgtattatcactgcctccagtgattgtacagtaaaggtaaattcttcggctttggctgtcagcagtatcattgtttctcatttggactctctgccccttctgccgtgtaataacagtcttgtttccttgcacaggtctgggattctaagacgacagattgtctacaaacattcaagccgccacctccgttaagggtatcttttcttatacagatttatgtacatcttgtaatactttttctgatcttctgtggcaaactctttggttaccaagtctgaattttgaaatatagggaactgatgcatcagtcaactctattcacttgttccccaaaaacacagaacacattgttgtgtgcaacaagacatcatctatatacattatgacactccaaggacaggtaaatttccagcaacggtctcctgcaaatcagtgtcattgtcatgccaaaactaagattgttcacatgcttctatattggaatccttttgcaggttgtgaagagtttctcatccggtaatagggaaggaggagattttgtagcagcatgtgtatctacaaaaggagattggatatactgcatcggcgaagacaagtaacactctaacctcctatatctatcgttttatttttggataagttccacgagtttgatttcaaaggataatcttatggttcctttcttttcgggtttcatcttctgcctttgatgttcgtaatggtgtttgcacctacaggaaactgtactgcttcaactatcaatctggtggacttgagcatttcatgatggtaagtttatatccgtaacagacatgctccaaaagattttggatgttggaaatttgaaagttgcatttgagacaaacacataacagtaactcactagagtaatgaagtcccttgtgtgttataatgtttgattcatctgttctccattttagagctcagattatcatcctctctctctctctcttaatacttatcttagttgtcttttattagacctggtttctgaatagtttatgcttatgacaggtgcatgagaaggatgtgattggtataacacaccacccgcatagaaacctccttgctacctatagtgaagattgcactatgaagttatggaagccctgagttttctcatcatcaagtcttgttttctgtatgattagtctgtctttatttgatttgcactcttctcgggttagaactagtgtaatgtgaaaccatctttgcaaagatctcagccattttgggaacactacccacagactctaaaaccagcatttcagattttaagaccgtttcacctggccttgagccttgtagtagtttatttaacaacgtgtctccttcctctttgaccttcccagccagtcaactcccatatactttttagtcttaggaaagaataaagtcaagctcaaaaatatataaaaaaaaatgaaaacttgggaagttcaaaagaaacaaataatgattctcttaacttgatgaattactcacaggtaaatttacaaatgatgatacgctaactgctttccctagagaccattacaacgggcaaagcagttcttctggcaacttattcaaaaggaaaattgtttctcttaacaaatctaagaaaatattataagaaaaaaagaggaagaatataagatcagaagaaatgaagaagagaaagtaactgtactagccagactattgccatgtccttttgaacctacaaaaataacagtaaaacaaaatacatcaaatctataaactaagatcaaatatatgagatggtgttgtgtaataaaaaaaaaacttactatgtaatctcccaaaaaaaatggcaagacactaagctccaaaccatgagaaatcatcaccaaaaccaccatagtcaaagtccaagtcagtcaatggagacagaatgccactctgatactgaggcaactcactccctgttacaccgtcttcatttccgagtaaaccaaggggttgaagtactcctcctggggcctcctcgaacccactgttgtgaggtggtgcttgtgtattcatttctatctgtgtatggagaatgtcgtcttcctggttatgtacaaacactgcagagggattgtagaagttgtaccctgacccaaattgaagctcttggttagggtttggtccataaagcattggcctttcgtctacaggcatcatagtttgttcattaacaagtggaagataagtatagttgttattgaactcaggaaccactagttccagaccattatcctctggtcctaaggcaatatttgggtcgacaacatcgtcctcttgatgagtaccgttgatgttatattctagcagaggggcatcaacatgattcatatcaggtaagatgtttctttgttgagcttcaggttgttcttcctcttgtcgattgacagttccggatctaattcgaggtcttttccttctgcgatgtttctctgctttatcttgatctcttactgaatgtgagatggctgttggttgttctttttgaatctgatttcttctactgtctttagatgaaactgaacctgaagcttcctctgtcccatcaacatcatagtcactgtcactgttgaccacaggtttcctcctgtcagcgttattacccctacgatgtgtctcagtcacattggagtttccattgtcactgctaggctgctgaatcaaagattcctcttggttcaaaaccgccaaccaaatcgcactctctttagctgtcatcttgtcctgtaaacatttcgactgacgaacatgcctcttaatctttgcaatatcaggtaacatatgattgatcactgccgttaaaactccaaccttccacatcttcttgagatcatgaggttttcggtaaggaggactctggcttttaggcagaccgagtttcacccaccattcttcattccccgttggccaccaaggcggaggcgtccctttctccaacggatacttcctttgaggaggatcacaatgttgcatcaaagaagataacaaagaccctaaagtagcatcttgcaaatcctggagaacaaactgtgaattcctattcccatcagatttcccaaacgctaaacactcctcttcgtatttagcaatagcagcaggaccgttcttatcaaacttcactttctctttccaccaagctcttatattgtcagaggaaccactcacaggcttgcccttttccggtattataccatagacaaacccgcgaactttgcagacttccataagcttcaacatgtacttaaggataccatcttgagctctagacattttcttcctctgagcttgatcagagattttcttaggtgtctccttcgtttgagctccttgagagccagctttttgtcgctctttgattcttttaagcctgacacgatctttccacatccgtctctcaaggtcgtcagcatcaatctcttcatcactcacatcaatctcagcaacattatcactagctaaatcatcaggctcattctccatcctatccacaataagcaaactctcaaaaattaacagctttctaaagtttttgatttgataaacaaaacaaaatccatatatatcattatcttatgttgtcaatacagaggaaaacccaagtattcattgattcatcagctgattgagattgaactaatgattcatataaaccctaaattcacaagcatgaaagggaaattaatgaaattgaatcaaatgttcttcacctgatgtctgctacggacatagcaagatcgcccatttaaacaaaatcaatcaaaaacctttaacaacgataatctgaagcgccgaaattaaagaaatttagggtttttattctttctcctgtcgttctcaggggaagaagagagtaaaaaatggctgcgaattgtggagaggcaaagttttgatttagtcggaccaaagccaaagtattgttgtggcaataacccaacccccaaaggccaaatttttttttttttttttgttgttgcaaaaaccaagttgttttcttcggtttctgtttttttttttctttaatgtaaaaaaatattttgttactttatatctgttgtcgagtcaatctctctttctgtctctcgttttttttttctcaacacggatttttattggctcaacaaatagaataatagtatttattttgagtaattagttacgaggaataccaatgaagtttattgtatttaactgtccggattagtaaaaaaaactcaattttgccattaacctattcttttccccataaattaaagtcttttgggttttaatttggctttaaataaaaagcacattttcttaacttttttgggtttaaaatttgcataatgctaaatgctaacgtataccactcaatagcaaattgttgtcctacatagtgctaaatgctataactcaagcaaactgttcatcaagtcacttgacttctatcaaaacatgatgcatatggcagatagcacataggtaaacataattaaaattattttgaataaatttctattctaaacttttaattagacacacatttatatttttgtaatgttttttatgtttattttacaaacacactattcattttgaatgttttaatccaattattgtaagcaatctcaaaacaagaatagtttcatgctcattaagagattaagagaaatataaagataaaatttgatagctcatgaatgagttttattgtccaaggaaagaaaagaactttagattgtcaccaaaattagtaagactttgatgcaatcataaaatgggaaaaaaaggagagtagcctctttgacaactctctgagttaatcacattaattcacactataaatataagagattacttgtttagataacctaattacatgggcttctagacaatgataagcctttgaactataaaccatatgaattaaaccttttttatggaccctctaataattattacgttcaactttactcatttatcctagtcattttccacatccgatccaacttaaaaataatggtatcatttttctgaaccaccagtgtataaaggagaaggaaaaaaagttaactgatgaattagaaagttgcagcatcattgggaccagttttgcatttacggccaagagctacccacacgaccaccactacgattttcatgtactgctagtattgatttattagtagtttaatacagctcatttagtcacttgttaaaaaatattatactaatcttagtatgttaatctacacttaacgtgccttcaatacaataaaaagaatataattggataccaaaaattagagaaatggacccagtggctattaacttctcacactggagagagagtgacatcaaactacaaaccaattttattttattttttttccaaaacggaactgaaagttgtttgaaaatccctcattggctcttcttctacatttatatttcttttactatacaatatcttagctctctgatacaactattaaatgcttaatatatgaataatacgtggtttagagtaactaacaaacgtaaataaaataacaatatttctccctactcgtggcaacataagctgaacagagccaagtacaaacaagttgactttctgctacaaactttgactatcccgacaagaaaaaaccttaagattgatcaggaaggatctcatcggttcttctatcttgtctctgaccattcttcttcttcttcttctcaacaacacttctgataatttaacattgcatctcctactcattctcatcgtcttcgtcttcaatcttctacacgaatgtcgcagtgaaattttttgactctttcagcttcttctcgccatctctaatggcgatcccttccttcctctctccaaatttacacttttacccttctaccaaactcgttccgagtcgactcactctttcctcatcctccttcgtttgttgtttatcagtagaccgccaaattaaccattcctccgtctccaacgaaacctccggcttacgagttgtcatatccgccggaggcaccgccggacacatctcttcagccttagcgatcggagacgagctaaaatcagccgacccacttgctcgaatcctcttcatcggattcccaaacagtatggagagcacgacggttccatccgccggattcgatttctcaacaatctccaccgtcggatcatcatcgtcccgaccattcctctgtttcacctctttcctcaaattccctctccgcttgatccaatccaccttcgaatcctacaaaatcctccgcgaactaaaaccacaaatcgtcatcggcaccggaggacacgcctcttttccggtctgtttcgccgccgtgatctcaagaactaaattcgtaatccaagaacaagattcaatccctggaaccactaactggattctgtctttcttcgccgatacaatcttcgctcctttcaactgtacagtcactaacctccccaaacgagtcgccgcgaagtgtgtcgtctacgggaacccgataagacaaacgcttagacgatactcgtcgaaaggagcggcgcgtgtgagcttcttcggacagtgggctggagctgtgtcggaaccgaaagttgtgcttttgcttggtgggtctttaggagccaatgccattaacatagctttgcttaactgttactcgcagttgttgtctgaacatgagaactggttctttgtttggcaaactggtgttgaagcttttgatgaaatggatagtcttgttagaagtcatcctcgtctctttctatctccgtgagttatacaacaacatttttaactgtttagctgcttttgtattgactaataactcaaaatgtgttttattatgtggtataaggtttttgaggtcgataggtgtggcgtatgcggctgcagatttggttatctcgagagctggtgcaatgacttgctcagagattatggctttaggcaaaccttctattctggtatttgaaatctataagctgattcatcgaatttgctaatggagtgtgttgtttcttgttttaaaacattgaatgttcttttgttttgttttttaagataccatcaccgcatagcgatgaaggggatcaagtaaggaatgcttctttaatggcggacattgttggatcaaagttaataacagaagaggagctagatacgatcactcttagagctgccatggaagatattctaggtgactaaaaactctacaaagtagaaaacactcacaaatttcaactctcattatctcattgagttggttccaaatgatagggaatgaagaactgatgatggaaatgagcgagcgggcattcaaagctgcgaaagcggacgctgcatcagatgttgctaaacacattatttctattatcaaatccaaagataagtaggtatgttgtatgaaccgtgttacagattacactagtgttgtgaaacaaagtatgtgtatgattgatgagcctcttagtagattttgaggaaacattcttgattgtgttggctaatttggcctagcaatagagagtgaataaaaaaaaatccttatatttggaaatagttgcgtttcttcttcctgttatctttactacttgtatatgaatcaaaactgatcctttgcatcttcttcttaactcaattatctatccgagtccggaaccttctcagctacgcagagtctctcttgagaatgtaactggatcagtgtatgtaaatgaagttaagctattttaacacctagatcaacaacccaaacattgcgtataagttatctatttcgtggacagttatataaacaaaatgttagttaagtacacgctttggaatcgtaaagatattttatattttggataaaattgcaccgacattttatccaatttcactaatttaagtcattttttctccattttgaaattgaaaatcttaaaccacaaaaattagaaatggagcggaaagcgactgagtaagatctttcaccttctatataaaccttagttctgctccggcgacatcgtcgggataccgctagtgattaacggtggttatggataccctccgattcgagttaagctcagcttccttcacttccgccgtcaccgcctcttctttacacagtcactcacggtatttcttctcctcagtgcaactcggccgagtcggctcatcatctccggcgatcacatcggtctcgaggacgacagtgaatgaaatctgcacggcggatgaacttcactacgttcctgttcccaactccgattggcgcgtcgctctctggcgatatcttccttccccaaaggtaccggtatatagagtcatgtaccgatgtgtccatacgtataggtgtatatgtatacgtattatcatgtttctacacttacaggcaccgaagaggaaccatcctttgcttctattgtctgggattgggaccaatgctgttacatacgatctttcccctgaggtgattatgatttagttatttttaggcgagagcttataatagtgttatagtgaaatggattcttgtaactcaagttttgtatttggaagctaaaaccttcttttgtgtttctgtggatattcatatttgtagtgttcctttgcaagatccatgtctggatcaggatttgatacatggattcttgagctccgtggagccgggctgagttctctcagtgttgatacaaatcttggtaaaggcaataaccagcagcggatagtctcgaatctattggagaatttcataagtgtatctgaaaggctggaaaatgttcttgatggaggttagttgatccattttatactgtcgatttggttttgttctgttttaagaacagagaagagaatcttggtctagttactgagaaagaacctcctacaggttccaagatccttgggatgcaagaccgtctatcgaagagagcgggagatttcaagcagcggtttgaacttatccctcattacaattgggattttgataactatctagaagaagatgttccttctgcggtgaggtgacacctcttgttgttttccttctgtagaactgaaccgaaaaaaacatcaatttgacattctgttggagttatgtcttattatcatatgaaatgttggtctcagatggactatgtaaggactcaaaccaagtcaaaagatggaaagttgctagcagttggtcactcaatgggtggtatcttgttatatgccttgctctcaagatgtggtaagcttataggctgatgatttctcttaaaatgtaatgctcagattttggctgaatcatgtttcttcactaggctttaaaggaatggattcaggtttggctggtgtcaccactctcgcatcaacatttgactattcatcctcaggaacactcctcaagtacctattaccaatggcaagtactcgataaccaatcaccgcactgtgtcagtgtcactctctaaagggagaaatatgactgaaaaagtttatcttatatgtcgttttgtttcagaaagagcctgcacaagctattaaccttcctatcatgccaattgacacaatgctcgctatggctcaccctctaatgtgtcgtcctccatattctttgtcctggttaaccgctaatatctctgctcctcaaatgatggaccctgaagttattgagaagcttgttttgaacagcttatgtaagtacaaactacttaacattgtctcaaccttctgcacatatttaatactaggcataaccataacatttgccctggaactaaaacaggcacagtaccagtcaagcttctcttgcagctaacaacagccgtggaccacggtgggttgcgtgacagaaccggtactttctgttacaaggatcatatcagcaaaacaaatgtgcctatcttagctcttgcaggggactgggacataatctgccctcccgatgcagtatacggtagttttctttgacatattcttaccgcaaattcaagatttcgttctcttaattgttgtaatcaataaccggtgtgcaatggtgttgatctgatgagacagatactgtaaagctgattccagaacatctagccacttacaaagttgtaggatcacccggaggtccacattatggccaccaggatctaatttcgggtcgaacggtatgtactatgatcaacacctcttcattcatttacgagtcatatcggtcggttttgtattcaacctttcattctccctacaggctcggaacgaagtatatcctctgattactagatttcttcaacaacaagatgagagttaagatcaacaagaatgcaaatgaattttgattcttgtttctgtacatataacattccatatatacatttatgtgtacaaatcttcatacagttaaactcacaagcactgtatacaaattaaatacaaatgatacctttaattgatctcgtgtatgtgtagattacactaaagataaacgatgttacttgcacgtaacaatctcatcattttcatgtgactaatataaatactagatctacctaacatttttgtagtcgacgacctaattatcaccaacaaaagatgaacaaacccacacgcaatgtggggttcacaatgtctccgagacttttccataggtaatacaaaggtctcaacagtttttcctcagaaaaatagcaatcatgaataaaaagccaaaaaagaatcttaacataaaatagtgatttggtttcaatcccgaaatcaagaatcacatcacaggaagagataatatctaactaagacttattgtacgccatcgttttacagaccggacaagagttcttcctcacaagccattgattcacacagtcgatatggaacctgtgcccacatcgtaattcccctacctcgtccttcgcctcatactcgtcctgtcaatagccaaaacatcaacattcttaaggaacaaatctgttttctactagtgattacttgagcaatgaagccaaaaatggacttacttgacagatgatgcactttctatcagcaactgttgtatcttgccggcatggtttgactttccgaagacaacttttgatctgtttttcagtaagtccagtgttcacatgcccaattctttcaccaagctccaaaagttgctgttttttttaacaacaaaacaaacacaacaacactcaagaacctagtgaaatcatcatcagcttctttactagtactttgtgagaaaggcactaccaacctcgtatgtcatgttatcgacattgagcctcatgtcacggaattgatcgaatgagcttaatactcctcccatcacaaaaccattctgcatcatcatcatctgcaatgaaacacccatatgtaagaaaaatacatattggaacaagctccatatgaaacttaagtcaaaagcaacactctacctcagcgagtccatcagggtaaggcagtcttagatgacgatgatatctatcagtctgctcagcccgcgatgtcaaaaaactcgaatcagaatcaaaataaggattagactcttgattgagagatcgtctaggaagaagagaagaagaaccctgcaatgtaacagttgagttaaaagatttaggaacacaaaaatccaaacctcatactgaaactactagaaaaacttcatcagttacaaacagactgaaaaaaacttacttttaatccacagaagcttttgatatgatatcaaagaacaaagcctaattttgttatagatacgaaaagacgataaacctaaatcaaaacggaaaaaagaaaaaaaaaactaatgcttgctaagtgtgctaactactagatagaggcaaatcaaatattctatagatattataaactaacttaagatattaaaaaccctaaatatttaagctaaatttcaatagatactcaaaatcaaattaacaacatacacacgcaaagaataataaaaatggaaactttaggattaaaacagaaaatgtaaatgtacctctctatgattattactgttactattggttttatctccatcgattttgcgtctcaccggaatattccttctcggaggatctgaaacaactgtgtcaatggagcctccgacgacagcatccgttgaaaacccaactccaggaccacaccaaacatcaggaatcgctgcgcaagcgacgctactactagtactagcttcgctcaagatcttaatcgaaccaccattgtagctactactacccttgttcttgttcttcttcttcgtcttcttaattttgaaattactagcatcccaatccgcggaggagcgaatcactgccgggactgaaacttgctgagatgcggaggttgtgcagcctagaccacgaaacgacgccgttccgttgggtttcttcttagtagtttctggcaagaggaagaaggaagacatggcggatttagagacgcggctaggtttggggattagaggttcgtcggcggtggaaatgggtgggagatttcgatgattcctaggtcgttggagtctcatgtgttgaccgattgttgttgaagaagatgaagaaggctctgcagaaactggcattgtgttctttttctctgtgagagagagaaaaaacaaaagagagatagaggataatggagacacagggcgaggaagaaggtaagtgaaagggctttcttaagttggattagtgaaactaatttaagtaattagtacgttaactaatcaaattctactttttcatttattctctagtttgtgtttgaagtctacaagtaaccaaattagatattttctttcacatgtcacatactcacatgtaaatgtgtggtttatactttactttagagttttaggcttttagcactgttgctatgtttgaaattttgagatgtgagtgtaaaataggtatttgtagctataatagattctcaccggtctttgtagagttggacccctctgtttttttttcttacttcctatcaaagtatcaagatttgacttgattaaaaaaaaaaaaaattgctttgggttcacttttttggtcagaaacgaagatagatttgaggatatttattgtcttttgcttgtataaatagaaaagctctcatgtgtcaacttttacttttttttctttgtcagaggtatttcaatttttatttatttcgaggtatgaaaaaacaaagaaacattagaggatcacaagtcacaggttagtagtatatttttgtttataccgccacaaaattataaatctgtatattttatacataaaagagtctgccacacacaagtatccaaagaatattggtccggatttgctggatcgagattaaaggaataataaaaggtgataaatcgtcgaaaatatttggtgcgtcacataactgattagtcgtccaaatttgagcgaaaattgaagtttgggctagaatgggctgggcctgtatgtgcgctgttccataaacgacaatgaaaacggacaggtcatctcgggccgatccggtctgatcagttatgaaaaccggaaacgaagaagagcggttaatctgttaacagattaaaaaaaaaaactattggctcttgattcaaatccctaatcctctgataaaccctagtcttgaggcgaatcccatgagacgatttctgcagagagttcccagtttactggctcgaaatatccttcactcacccgcaaatttccgccatttgagaatcaacaaccctcgtgttgttgttcctctcttcgaacgagctatttcccggttcgtcttcttctcttccgagtccgactcgtcgcgtggtttcagaactgaagaggttctttctaaagaaggtgacatttcttcaactcaacttcttttgtttggttctcaagaaaatgtacagttttgaatgaaaaggaagagaattttgcaatgacagagttagctgatcagctcataatttttcatgtaaagattataattttgcttactttcttaatccaattggtatttcagagctgaaaaaaagaattcaaagctttttggatgatggaaatgaggatgctatacctgatttatttgaggcattgatgattaggaagttatcagggaagcacgatgatagtgatgatgaagtgatggatgtggtgcgtaagtatccagttaacgatgcacataaggttgacgatattgactctgatattgagagtgatggccatggtgattcgtctgattcagatattgagagtgatgacttgagagatggtgattcgtctgattccgatgtagagtttgatggtttcaatgatgttggcttgtctgatgtcaatattaagactgatgccctgaaagctaatcgctcgtcttattcttactctgaaagtgattaacacatggtaagttttggatttcgcaccatacggtactcgcaaagagaacattttcttctgtattttacagtctcttatttttttgtcacattttgcattttctacttgtataacttgattaaatggatatacaaattatttagtactttagagattttctaacactgtgcttgttagagactatttaatctttaagcgtgtgattgcttgcttaatcatgtgtcttgggctttgtttatcctattcattatgtgctaagtatgaaaaccttggtggctgataccacatggagaatatggattctagaaaagtgtctgagtaaacttaatatatactgcagcttatcttcttttattctttcatggcctgatatatgtttaacattgtgatcaatgaactctaattggtcttggttttgggccacagacttatgcactacattgaagattttgaaaggaagcaactgcctagtgaatggaaacagatcagtttttggtccatgttggctgtaagttctgccttttgaatataattagaaatttaagtcatattttgtgcttagtacaatagtaatgaagtaaaatatataattatgaaggtgttctcattactttgtttaagtgtcaacaaattcatataccttcactgggggtagccgaaagctgacatctattttggttacacgtggtttcataacttctccaaaatggtgcctaggtgtttttatgctttgtccgagccttttagaaaaaagttaatctcttttagacatatcgagatctcctgcaaccacaaactctcgtttgagtaacgtgactcactcaaagacattttcttctataaatagaacgagagaaacccactttaaactccaaaccaaatatcttcttcttctttctataacttagtgagacaatgaagggttcttgcacaaaaccagtgtttttcacttgtacaatccttctcattttaattgttgcccaagaaaacagagtcgctgcagtagatccatgtaatcctgcgcagctgagtccatgcttggagaccataatgaaagggtctgagccatcggatctgtgttgcagcaaggtgaaggagcaacagcattgtatctgccagtacttgaagaaccctaacttcaaatctttccttaactccccaaacgccaaaataatcgccactgattgtcattgtccgtatccgaaatgctagtcccagtatttcgttctagttttcgatgttctgtttcttgctttcaagaccaaaaaaggtgttctgttctgttcgctcatcatcgatggtttttctacttcaagtttcttacttttgagtttggctttccattaatgtgtttgtcgtcaaggaataaatcttgatcatcacatattcacattgatatgtttttaagaaatttcggataattcgactaacataagctacttaaaagttaaaagttccaatttcaaggatatcactacaaaataagtctctaaatttggatgcaattttgtcaattttggccgaattaatcataacaaggtcttgaatcccttgattccgacaaaaaagaatcccttgattaaaactagttcagagacttcgattgtattaaaaccggcggattttatttaaccgaccgatttgatatgaaccagtaaatatactctgaaccggccaaaggtttattttcttaaaaaaaacaaccctagatttctaaattctaattgttggcccattttcgcctcttcttcttcgatcacgagatcgagaatcgtttctctcaattatctcaagctctaagatctcacttcttctctctcaaactcgacgccgttcgttttctccgtcgattaatcggttcgttttgttccttaacctttttccgatctaatgtatctcttgatccgtcggcaagtctccgatttccactttaagggtttccattctctgtacatccatggagatccgtacaagaatagagtagatattcatatgtaaattgaatcgtttccgaaattgatatttttttgttctggatgatgtttggtggtttcagagtattatgaatcaggaagcagctgaaacagcgagagagtcactggagctggtgtttcggatgtcgaacatcttggagacaggtcttgatcgacatactttgtctgttcttatagctctttgcgatattggtcttaaccctgaggctctcgctactctcgtcaaggagcttcgtagggattctgctacaacaacaactacggttgattaagaagatgcctaatcaaatagtatcattcatgcttgttttctaagtttcaatttcattatgctattgatgtgtaaattagggttggtaaggtaattgaatagagagtttcagagacaaattggtaataagtatttgagtcatccccactcaatccttttgagaggctttctttaagtaaatcacaaagttaccctcatattcttgatttctttttttagtcaatactttcatcaagtacgtacatatacagcggaatcaatttttctaaaacgtaaaaacgtaaaaatttgttgaacgtgaatggtaaaaacaacgttttcatacaactgtgaaaacgtgaacaagtggtataccatccaactaaaaatataactctaaacttcacacttttatgtacaatcatgatcagcagatctagaatacatgttttaccatcatgtacgtagtagtagtttaaagtttaaacccttatttagaaagagtccaatctcggccaaggcactatggcgtgtcttccaatactaacgtagatgaggatttagaaagggtttatatgattttgagacgaagatccggtgaaacatatattgaattccgctggagtcgttatatacccttcgtttactatctccaaattgtttgtagatctctcttgaacatatccgttttgttgatatgatttatcgatttcgatgttttggtagtggctcgcagcatattgttggtccaaatcatcacctatataatcaaaattacattgttgtaacatactatataatcaacgatgtttcgcaattatagaaaaactgaaatggtgtttatgttgacactattttaaagtaataccttgtgtcaaaagagcagcctcgttcgctgttcgttcgcccacttctaaaaagttcccctttgagtaagcatctcgaactaagttcttaacgtagggctgcaacaaaacattaccatagatgaattaaaaaaataaatacagtttctaactaataaacaatcattgagctatcaataattgcttaacttctttaatagagagaaaatgaccattcaatacctggttgagggattcttgactagagagaacatgaccatcgataagtgctttcataacttcgcatatcggattcaaaatcatgaaaaaattcggtcctctagaaatgtataacttatttcccaaaatacactctctagcatgtttcaatgttacttcccactttctatcagacattccaggccccagaatctgtacatcaacaaacccctattcctattagttctctaataataataaaaatttaggggtcaaataagctaagaatttaaacctgacggagttcgtcgacgtcaacgacggatagtttcaaaaagtcttggacagtgttgatgtggcgagaggagagcttcttgtgaaaggccccatctttgcctatcttctctagccgccacacttcgtcttctaacattggtgggtgatgtttcttgtacacttcaccaaccccaagttgtacaaaacaaaactatttagaattatatctagttttctactatgtatcttctttatatgtattcgctttatgcatgtgtttgttgattgttataagattcggaaaatatacagagtattaattaatacgatataagcattgattgaccaaagacttataggctcttgtataaagtgggatagtcgtttgcatacggtccacatcgaaaatacttttagtagtttttttctaattaagaattaaaaattgaatgtgtatatatattaagacaaattaaagcaagtatagttaatatttgtagccaaaagcccaaaacatatcatgacaagatacaacaattttgtaatacccaaaaaattttatatttctatactagtgtttaattagaaaaactaagattctttttaagaagataaagccaaaagcatcaatatagattgatatgttaataaatttgaaaacgaaattatgcaaataaattttgacgaaaacaaaacatcattttaatggatttctgatgcacatgtgttgtataaatgattatcttaaaggttatgtatgattgatagtagggtaatccataagaagatgccaaatgtggtcaggtcaaagataattgaaactagtgatatgttactatcacatcccctagtggagtactgcttaatgaatatatgcacaaaactcattatatatgatgcatagatttatttgttatatattcattaatttctaattaggtaaaatatttagtaataaagaaaaataaacttacattctccacgatgatctctaacaacaatcgcttcagtcatcgcttcacaaaccacaacgccttgaccgctactccctttcgcaactttcgcaccgattctaaacttacggctacgaatccaactcgaattgtctgtgaacacaatttctccgattgttgcaacgccgtttctcaccgtcacacttacttctccggcaagtaacggccgtttcccatctctttctttgatgatgttactctcaaactcatcactagtccatttatcacccgaaggaaaatctccgtgaagagcaacgatgtctagtttgattggacggttgagattcaccggcttgtttgagtcatcaacaaggataatctcaagtggattgttgtccacgtcactgattttactccctgtaaatattggtgtcattaagttcttacggaaaattagcttcagtgtcggagtagtcgcctccggagcttcgatacggaaagacgatgaccgagataatcgaaatcgtttactaattccatattccacttcttgtcttacctggtcacgttaccaaaacgagtagagttataaaacactcttatctgttttatattaacaaataatttgatatccttattacacaaattaaacaatacatactaataaattaaatatgtaggccaatatatagatcttttaaaaggtactagcatatatgtgtgtgtgtacgtgtgtggaccattattttgtcttttatttctagatatagttgattgaaatgttaggttagagaggtcttgtttattaataatactaaaaagatttataactttgtaaatatttagtactatcttaataacgtatgtgtatatatatgatataagaatgcaactatgcatgtacatgcatatgtttgttacctaaaatgtatatagtattagcaacatgatcgaaattttcttattttatcaagttccaattcgcacactagacatcgtcaatgctagactagtatatttgtatgttaaattacacttgttactttaagtatgtgtagttgattaaacatggtaagtatgaaattctaattctcaactcgttcatttgaaatatccatgtatatatatatatatatatatatccactacattaattagaagttagaacaagtatttagaaataacaaaatagaagtggaattattatagtatacttacaacttttctaataacgggctctaggacagaacgaagggtgttttctgagatcaatgctccaaacacactggaaattggcctgcaagaaacaaaaaatataacaaaaatttatcagaaaaaggtgaatagaaaataaaatccaagagtagtaagatctaaaggagatattattttaaggataagagagagagtgaatagaacatatacataaaatacaagcatatatttatatttagattttaaggataagatgtgtaagaaaaaaagaggattgaacactgaacatgttccaaacaaaacttaagatttgtagaaatgattcatcataaacacaatacaagaaaaaaagaatgaaaagtttctgagaaaaattacgaggcaagggatggtagtacagatttaatccgtttctcggacttattttcttggtcagaatcaagatcttgaaataacctcttccctgccatggaattgttctggtgagttgtgagagaaagagagggagagttagagagagagcgcttagatcaaaactaggttttgtaatgttttgacataatcttatacggcgatgatatttatatagttttagtctttagtctcacaaaaaccaaaaaaaaataaaaaaaaataaagaaagttcgaagaacgacaaaggaaacaacctggcaatatccaaagaagtccgaagtctgatccacgcgaataatctatttatggcgtcataaatagggagacttttgacgtcaactccaatttagaaagcttcctttgttgacaaatggacggttccgatcttcccacccgattgggttttagatctaactgctagtataaagcgtgatccatatgccacatgattacttcttgtagagagagcactacgagtatacgatcgatccggtccgttcttcgaagaatttttgttcctttctttatcttgtaagaatattaacactattgatatcatcatatcaacatacttaattatgaaaaattgattgtctatataattcggattcatgtttgttcctctctaacctaattagtaaaaattatgaaaatcagagaaaaagacaggttcagatttgttttctaaagtttatgtcaaaaaggcaaagtttgcaataacctgaacttcttggtctcgtccgataaatacggtgtatgtctatttagcaatcccttttatatagatacaattttattgaactatcttttctttaagcaagaaaacaaaaaattgaactatatatcttttaagcaaataagaaagaaggaaagaaagtcttataataaccttttttcggtttacatcggtttccaaaaatatcctgataatttaatagctgtcattttaagttaagcaggagaacaaaaaacaacaatagtttttatttaatatagaaatgtcatgcgttaaaggaaactaaaattatccaagttcttatgtgttaatataaactatactatataaagggtcaagtgaatgatttcgacgaaggttcattgaattggtttgtccttttcgggtaatttcttgtcgggtgagttacaaatctcaatcatcctctcaaaacttgtcgtgcttttagcttcaatcgactctgtttagtctctgtcgaaaatcttgcttttaattaactttaataagttttttttgttttaacttcaaaatatttttggtagcattataattgtaatgctttgcctccatgataaattgtatggtaattgtcacatagtctttgtcacgatgatattgatatctcacatacacagaataagaaccatctattcactttttatggaatctaaacattaaaagcccatttctgaattgccatccacttttaggggttgccaactcaagaacgtttatttttttttatttttgggtgtgttaatatgtaccttttcataataattttagtttttcaaagactatgatgtgagtaatccattttataactttgtaagatatcaagttaaaagatataggactgccttttttttcttggaagcagcctttacatttgcaattattttgttactattgactaagcaacattctatatatatatgctggctggagattttagttggagtttgagtctaatttttaaaatgtaatttagaacattaatacaaaataaaaatggccgcgtacgggacaaaacagattttagtttgagtttcagtctaatttttaaaacgtaagttagtacttcaatacaaaataaaagtggccgcgtacgggacaatacagccgcgtgagtatacattagcgactaaattttttaaacagtttttcgacatcaatggcttagtttatatgagctcgagtcatctccaaatcttatcaataaacaatcatattagtcacgtaagtgaacaacgaatcacctaatcaaacaacgaaaaacaaaccgtaaaaactaataagctgtcaaatcatatattttggtaactctatatatttacaaaataaaatttatttagaaaacatgaaagtcttatccacctataaaaacccaccatgaggactttcatatgaaatagtgacgctgacagtaagccgatctttagagccgcaaaacgaaatttcgaaattttcatagcaatctgaccactctcaacgagccaatcatataactgacattctctaattaacatcacttaaatacagagccgtgcaaaaaaatgatgtcataggcaaaacaatatggtttaatatatagataaattatatataataaatatagtaaaatatatagtttaatgttttaaaattttattataaatctataaattttaagaaaaacatataaaaattcacagttcccaaaaaagtattcgtcaaacaatgagaaaagtatattactataaaagaaaaattatagaaactaggttgctcataatatgcagtctagcaatttgtgtttagtgttgcaaaagtattaaagattccttgtatttaggaattttatatattgcaagttataccactttcctttattatttgtattaatctctctaactttattaattcaataatacatgtatgataactaaccactattaacaaatatagcttcctaaattttctagggttcaaacttaaattttgtgatgttgcacaaagagagaacaaaatctactgttcaaaattaaaacaatgatctatgtctatcggattcatgtacgaagatctataaagtctatcagattcatacgaggtcttaaaaaaaggtttttcaaagagatctaggtgactatatgaaatcattcatcataaaatggcgagaaaatagggaactatgagaagcgtcttgaagaaagatgcagggatttaccgtcgacatgatcggcgacattgaaattgaaattctcactatcagggatgaagaagattttgttaaaacggaaatgggcctctcttaagagatcgtaattaaatacatatgtatatggatgaagaagatttgttaaaatggactaattcaatcctgctaatgtcacttcccataaatatgtagagtaaatttcatcggaaagaaaaggacaagacttgtaactaaaattgggcatttcaatacaaatgggctgaaacgtattggtataggtaagaataatttggacaatcagaagaaaaaaaaatctgtgaaaaatggagatgtaaatcatgtggaaaagttttgtaatcacaaatgggattttaaaatccaagcacacaaacacgggttatttaccaaacacgaattggcttagtcgtatggttataacgaagaaaattaaaatcccataacactatgagcaaaatataacaacttatccaaagtactaccatcgaacttcctagcgaacaagtaacatttctcgctcttcttcccattatacacacacccttgttctctattcctcaccctccgcagaaactcccctgtcaccgaccgccttgtgtacttcctcggatgtggacctctccgtgaccaatccgtccacgttagtgaccggttcgcattcttccccggaaacatggcgtggacaaatgttgacaagtaatgctcgtcggcataacaattccaaaggcaatatttctcgaacacaggaaagtaagttgtgtccgatactacggctaaagctacctcacggtctatctcgaaccactgagagccttttcgccagttggtgcggctgatgactggtgacatacggcggttgtagcggccgcgacctgctggtccgggaaggtcgtagacgtcgacgtaggagtgttgcgagtttatgaggtaagagtaaatggtggagaagttaaagagaggaatgtccgattccgagaggaggacgaagcggtggtttccggcgtcaagcagagcatttgccagtagccgtcgctcagccgccaccatgctcaccattccccatcccacttccttcaaaaacacaacgagatcctcgtacatgagtcgtgatatttttattaattaacaacttagttgattaatttaaaattcatgtcggtacgtatgtataatagactactcaacgattttatatttatatagtatttcatgatattgatatctttagaaagggaaattaagagtcatacgtagacatgtacgaaaggcactaaaattcaacttttttaaccatattattaaatggctaactagctataggtgttacccagaacggccagacatcaggtgattcaagacagaaaaaaatattagccaaataaaataattgatttataggaagaaactaaaaaacttctttaaccctccaccattaaccttttaaatgaagcatttaccgacaaagtttttggttttattttcttaaaatatagcctagtctcttaaattgataaaactatactagtgtccccaaacccatgattggtctagtagactttgtggtctttacacaccctatgcgtggaattagattttattttaaacccaattgaaaaaaatgtctagtatgatcttcaagtgatcgagcattcgtgtcttagttgaatgacgatgataagtaagagatattattatatcttagaaaaacaaatgcataaataaagtcatctcgacttttctaatatcttcgacaagcgatttttgtttttttataattcacctttctcttataaaaaaagaaggtataaatatatagccggtttgaaacgtatttagggaataaaaaaggatacggatctacgtttttctttgaactagtatactataccttgaacattacgtactattatacttgtcctttgtttcgtaatcataatttaaaatgctaagacatgactagttgaaaataatcataataatatgaataataattaaacactgtcgttaattttgtcataccctcctaagtatacttttatgcagcaccactagttttcaaagtagattatactgtatatgtttttctttacaactactaggttatatgtcgtagtagcttttttggtcgacatgtatgtgtagtgtaggtaatatttataagacgacgtgcgactttattttggctgattaatccgtaagaaaacaactaatttatattattaaaaaaattataaacactgttttggtactccctttttggagtatatatactctacgttaactaattttcaaagtaaattatatatatatttttataaaaaatcccaaaaacatatggatgtaagtataaatatctaaattctagtatattatctaggctgaataacccgaatatcgcaaatatatctttaaatatctatatcaagattatctaggctaattaagtttatctatgaagaattcgactatatcaattatataatctgaggggaattaatgaggaaattgactactgaccttgcttggaatcctccggcgataaaacggcgaagtttcgggcgtatgatcgtcaaagtaaaaagggtcactcgtatgaatgtaaatagagaaaagaccttcatggcctttgaaaaatctctcccacagtttagccaaaggaagcttccctctcgtcaggaacataaacgccgctttctttgtcatcttcaacgtcttttcttgaatcttcgaagcacgtagcaagagttcctcctccgtcatgttatgcaccacgttctccggcatcatcagataatgacccttttgccctacttcatggtcatcatcattagtcgcaacaaccgtatcattcaagggaacgactatttctggctgcggttgaagcggtggtgtagagaaggatgatggggagagtgaagatagacgaaagagttgaggattgaaagagacgtttcttatatggacgttgagtatgaagccgagtccgaatccgaaaccgataagaaacgaatacaagacgaggttttggaagaatctatgagatcttaatatcttggatatgacgatttggtgaagttgatgacgactttcttgttgaagagagtcttcttgcgtttcttggctctttttcattattttgtgagtctgctgaaactaacaattagaaccgtgggacgttatatagtcaaggttatgaattttaaagagacttttcgtcattgggtgtctttaaatatctgatctcacgggctttggatttaactagaaacattgaattgacttgtacaggattttaggggtagggttaattcaattggtacacgacttgggttttatataaacacgttaacttagattgtgacattaaacatgaagtaatgcttggttaagacatgtcgtgtgtcacctatcttttatatttttattactttttttgacaaggctctgtttcaactttcaagtaatgagaaacaacacaagagaatgtgtttggaagacgaattctcagtttctaacatgcaatttcttctacactctcaagtatttaaccctaaaacatataaaaccgatgaactaaaaataatttgttcaacatctcaagactggggtcacagaagaacactctacataatctgaccgttaatgcgactgatgatggtatcttcagtagaatgagatgctgtagaccagtttccgcctgtgttgtttttcaaaacccgcaacaatgtcatcgatcgtatcttcccatgtttcattcccttcaatctcttgacagagttccaaggcaagtcggccacctatagctgcttcttcgtggttatctttaacctccaagttcatcacaagtattgttttcgtaagtgattgttctctgttgttgagatctgcagattggggacaaatctaacttgatgagataaagatattaagacacaggaatgtttcacgcagcaagaaaaccgacagttctatcaaaccatgattgcaatcgggttttcagctaacaattacagcaaggtaaaaaagtaaactaagttacaggaaacggcaatcactaagcagaacttttgagtttcacatgacttagacttcatcaattcacatatgtaaacatctaacctaactagtttaacataatttaccaaatgagaagattgttcggaaacaatgcatgtagaagatcaaagtgtcaacatttcgattttcttcaaatgggataagttgatgaacaaatctactgataccaggatttttttcttccaatgttataagagtttgtgatcaatatgtacgtagtgagcaatcaggatgaagcaattttcaaacaaagtatctaactgtaaaatagggaggatttttcaattaccttcaaggactgaatcgaaaaccttttcttcaaaagtcataaccacatcaaacacaccatcaccagcattatcttgccatctttgaggagcaagtttcacggataaattcctcttaatcatctgcaaaataccattccgcttgtatctgatgaaaacagttaagtgcatcaaacttcaagcttacaaatctccctatacaacccaatgaacatgcttcacaatagctacaagcaagaaatttcgtatatttactaaaacgcacacactttttcttcagtcatttggagagaagaaaacatactttttcccagaatcaataccttaaatcaaaccaagaaacttaaatgtgaattaggaaacaatttcaaggagactaagaaagtaagcaaattatcgaattagaaggagactgagactgattcagtgaccaaagcaaacttagggattcgaaaaatcatgatccgtaagcaacaaaagaaaggaacggattaagaggatacagttcaggatctttgcgcctgagctcatcgaacatctgcttgtaaggagttccaaagtcgtaaacgtttggctctctcagagatggtccaggtagttttacatgtgacccagtcccgtacgaagcaacgtcgagtccttgtctcttaagaagagcgtgagcttccatgctccggttctgattcgacgaacaaaccattgcgtaccggaacctcatcggcggcgtcgaagaaatctgtgattttttcccggcgactgtgacggtttcacaagttaaaagtcgatttcagagatttttaataatgcgacggattgaattgggcctgaaactgatcatgggccggactaagagatcgaatattttttttcatttttgcttttattgacccacgaaaattgtttggttttacatttaagctactaatcaacatcacaagagaggactacctaccaatcaacatcacaacagagacgattgcctaaaccgggtcggcctggactccaaggtcgtagaggaggcggctatacaagtaccgggaccggtacaggagccggttcaagaacttttggattaaacggaagcgaaccaaacagttttaagagtagaagaagtagtggacgtggagcggctggacatgatgatagcatcgttgaggagtactcgaggaactccatttcgatgtcttccttcgccgaaggtagatgaatatgaagatcaaaacatgtaaggtcacccatatttacgtgtatatatatataaagagacaaagaagaggaccttttaaattatatgtttatggatcgttcgttatatttgagatcttaatacataatttgatatgaattagcaacagaagaaaatttgtattttcgaagtttatgtttattttgcgtaatcgagtctgatttagtggagctgtattaggcaaacctaggtaatatgtctttcaaagtaataatttttataggtacgataatttcaacttcaagttccatcttcctaaagaggaacagcttggcaccaacctaattacagactataggactttttgttttctaagtaaagagataattaattaatgaccataacaaaagttgaacaagctaagtattattactaaggaagtttagtttcacatgcaaagaagtcgaactaccggtttttttttatcagagttttctttaaaaccaaaactaagctatgtagtcttatactatgtgatatcgttttccggttccgttctatttgttgatttttttcgattgggtgtatcatgtgtgtaacaagtcaggtacatgcctaaaacccatcaaactaataaacctcaaaatgtatttaaaattgaagacaaaacattttttagtaaaattcttttgaatgtttagtagttactactcttttagtttttatggtctcaaattttacaaattttttttttgactttttctttcttttttttttttttttttttgccatcaattgactttttctttcttacaattatgtttttgttatttgttttgtttttttagacccagtaatacactcatggtcgggcctggtatgttatgtaaagtttgatatgtagcatacatcttgtattcagttactgttttcctcagttatgtcgtttttggatttctttcttcaagttggggtttgctatttgtttcagttgtaaatcaaaaactttgaattggctgctatttttgtccaacactattagggactaaagactcgttcaaaatcttatatatgtcgtctgttcctaaaaagctttggaaattcaaggggttttattttatcaaaaagaattaaaaaatcaaggggtttaaaaagattgtcgaacaattattcaaaagatttgaccatttatgcttgttatcagcacttccggtgtgtcaattagttaagtactgtattaaaaataacaatgcctaaagtcaaaacaacaagttagattgagtcttgaatgcatatgtaactgcatgtgatttgatcagttgaaaatggtatatagtgataggtcaatttacttaatttgataggaacctaattgtactatatagtaaaatataccagaaagaaaaacgttttcagaagtctagagacaccaaaccaagttaaaacgaacttatattgatttcgacattttaagtttcaacttagaccacattttaaatttcaaagtagacctagctaagttaattaattatgtttattcaataaactataaatatagataaatcgatcatgacatgtattctgctactagtttgtggcaaggtggtcgatacgtcttaattcggatgtaaatctgcataatccacatattgttttccaaaaaaaaaaaaaattataaatagccaacattaatttagctcgtatactatcacatcacattataagtatcatacaaaaatatttcttttgtttaacataaataggtactatttaactaaaaatgttaatactatttgaaaccagtgaatatcatcaatcaaactattcttgaatataatccatacaactttttattcttcttaccaaagtgtttaatactaaacggtaaaataactaaaactgtataaccaatgaaatcttaaatccatatagcaaatgcaatcaatgtacgataataggattggattactcgctcgttggtcacaaatcacaatagactagaagaagaaagcagaaaagggagcaccaattgaaataaaatactttgttgaggaggtcttaagtaagtacttcccccttgagaaataatgaaagaagtttgcttaaacagtgctcactggtccggctaccaaacgttggcccacttctctatttggatatatctcctgataaattatgtgtgacccactcctatacaaaaatcccataactctcactttcattggccctccttttttattttctcatctttttgattaaccccacttttattccaatttttttcaaaaaaataataataagaaaactctagtctatatataaacattgccactcgctcgaaaacagccactttctattttcaccaattttcaaaaaaaaaataaaaattgaaactcagaaatggcgaatctctcttctgattttcagacatttacaatggatgatcccataagacaactagcagaactgagcaacacgcttcatcatttccaaacatttcctcctcctttctcttcttctctcgattctcttttctttcataatcaattccctgatcattttcccggaaaatctctcgagaataattttcatcaagggatattcttcccttctaatatccaaaacaacgaagagtcttcttcacaattcgataccaagaagagaaaatcattaatggaagctgtttctacgtcggagaacagtgtctctgatcaaactctctctacctcttctgctcaagtttccataaatggaaatatttcgacaaaaaatgtattttattaacctagaaaccctaatttcacacacatatattagagtactctcagtttctatgaattaatctaactttgtttttctcttttttcttattgatatcacagaattcttcaaggagagggaagaggtcgaagaatagagaagaagagaaagagagagaagttgttcatgttagagctagaagaggccaagccactgatagccacagcatagcagaacgggtaaaattgattttctctatacaaattatagtgtacataaataatataaatgaaaactatgagtaaaaaaattaaaattaactttcaggttcgacgagggaaaataaacgagagattgaaatgcttgcaagatatagtccccggatgttataaggtgattatattttgcttagactttaagaaaatatattattagttcttttattgaatatatatttggtgatgcagacaatgggaatggctactatgcttgatgagataattaattacgtccagtccttacaaaatcaagtcgaggtataacaataacaattaatttctcttaagttataggtcatctaaccaattccattcgtttcaataattatactaatttactttcttttttatgtgaactcagtttttatctatgaagcttacagcagcaagttcgtattatgactttaactcggagactgatgctgtggaatccatgcaggtacagaatctagaattataacttttaattaaaattttctcgtaagactggtgatgtttgctatgatttatttatttcttaatttaactatatggtttgatgtgattataattagatgatttaaatatcgatttttaattggaatattaaaatgcgcagaaggcaaaggcacgtgaggcagtggagatgggtcaagggagggatgggagttctgtcttccattcatcatcgtggaccctttgacttttgttttttgctctcctttttttgtctttctaattttcttcctttttttggatttaaaaagatacttttaaagattaatttcaagaaatctcgatgccatatgatatgtatacttgtgtaacttcgacattacaaatatatatactgcctcgagattgcattcaaagtggggatacataacgatcaaaattttaccgagcagacaaaagtcggaaccacaatgaattagtgtcagtctatccaaccatatttttgacataagttttagtaagatcccacaataattttgacaatatgattgattcttaaagtgttttgaaagttgtagaagcgaagcctcctcatcaatcacactttagagaatagtaatgaggaatgttatttcggcttagctagttaaaaactataatacgattagtgtataataagttcgaatataagcctataaggcagtttatagaaaatataaatcatgttgtcacgtaaatgtagtatcaaacattcaaacttattatttttttgtatgaaacaaagaaatatatatcaatgttagtaaaaaacaaggaaaaatacatataatctcttcaaattttcaaatcagccacagctggaaagccttgaacgtccaaaacaatagtcatcaaatctcagttttaagaaaaataaaaagaatatttaatatttggaagtgtctacattatatttacaacaatatagattaaatttttgcatcagcaactttgattgaggtcaaataaagacaagcaaagatgataaacttgaacaacaactggacttggacatcaggagcagtggaagaaaatgacaaaaatacccttcacttgttactatcgaaagaaagacataatgatgtatgtctccgaaacgaaacacaacgacaaagagaggttttatgcaatttgtgaaagaatgtggattgtagactttgaagggacgtgtttaatcgttgaacaaccaaagatttttcttcctttttttgtgtggactatgtacttatctaaacatagctttaatttccttttattgaatgaattattgcatgaatgacggttccatagttcatagactgtgattgatgttcccaattcattgtaaacatgattgggaagaacatttgtgaaacttctaaatatctgttcttcttttagcatgtaataatactactagtttgtattactattagtgtttctgtttcatcatcaataatattaaatttcattttcctttagtccatttggtcaaatttatccatggcatgtgtactcataaatggtcaaacttataagagaaaactccaaaaagtggaagtggatgatccatggcatgtgttgctctcaaaatggttgtgccttagtctagagctttaaagatgaattaatctcaaaataaattagtcgaaagcagaagataaaacttgaacatagaaaaggaaaaattatatataacgaggaaaaagaaaaaggggaaatagatgcaatgtatgcatccatgaaactagggaggacagcttgaaatggaccattacatgccctaaagaagatggaaatatgtggggcttttttcttcattttcatcttattgcatatatttttatataaaaaatacatcaaaatgcctaattttgaatagttcaattgcatagtggttgattgtttctagttctacagggatattacttttattacaacatggtctatgaaaaaaatgatttaccttttggaaatgatcaacaaatcaatgaatccaaactttctaagatataagtttaaaggttctctttcatggttagaccttagaacaaatgtttaacacattaatcaaaaaaatgaaaaataattcaatatattgttgaaggggatagttttgggaaacaaataaatatttgggaccaacaagtattctattaatagatttggtgatcacatcatttggtggcagagaacaaaaatgggcaagttcaaggatccaaaaacattgtgggaaccaccaaccaccaaaattttggaagtgactccatttgaatgtggaggagttgtttagctcctcaaatctctgaagtcttaacacttaagacacttaacccacaaaatcttcaattccacttttaagtattcttaatactttcttaatattttaagtcatatctactaaaacaattgtagtaacagtacagcaccagaaacatgcagacgattttatttttcttagaaaatttatgatcaaaacatgtatgcaattacgattttcttcgcataatttgttttccttggaacaactgcaataaaagagtgaaaaaagagtctgcaaaacaactgtaagcaagatttcgtaactttgaaattcaggaagaaaattgttactgaacattaaatcaaagagaacacataaattttctccaggggatatgaccaaaggtatttagtgataccttgaactttgaaaaaatctaattacttttcttctttttacaaattatcccaaacttaactcaggccttacattcaaagccaaaacctgtctcttcaaagttctaacatggaggagaccaagcgattatctatgagattcactgtcggagaatctgttgaagctgaaggacttggtttctctgttctggtggcagcagattgatctgctctggtgtaaggctcatcacttgttgaagtagtgccttctccatctctgcagatatctgcacaagtaagaaaaacacaatcatcagcaaaaaataacaaaagctctttgctctgtaatcagaaattctcattttgaattccggcaaaagacaactacaacatctactggaaaggaacgtcgaatttgattgatttgggggggctaataaaactacagagtcatcgacatgaatatacatcctagcagtaacagcggttcaatggctgtgccttgcagttaaaagataaattaccggtgcagggcgaggtggtgggccacctccaggcccaacttggcttggtggaggcaccggtcctaagcctggcagatgagtaatgttcgagctctctgattggccagccatccaagaaggacctctgtcttgagccatcagacctgctaattggttattgttgtagtctccacgatattgacctcctccctgaaacaataaacaagattacaagcagtgagacccaaaagcaaaaccaaaaagatgtagagtttccatttagatgatttattaatctaaagcagaacatgattttaacggaatcagaactagaagtctagaaatatgatgatagcttgacaatgaaaaaagatgagaagaattattgccagaagaaatcatttctcatatctgattaagaataacaatgatagatgtttgagagaattctcattaaagggtaatctctactcgttgaaggtgtagtgctcggaagaaagcacatagataaagcaacataatttcatactcagtctgcaaaacatcaaacatatcgcctaaaggtcaaaaagtaagagtatcaatacctgatatgttggctgactaggcagatgtggctgtccctgcgggaattgaggtccaccggaagcagggggtctgttgcctgactgcaaaattggctcaaataacgagttctagtcagtcaaaaacttcataattcacaatgagggaaataaaaggaaaccgacaatagctactcataagtcataactctgactcacatgatacatgggttgagaaagatgctgagtaggtgcgccatggtgctgaaatccagtgtttggaccagtttgagcttgtccatattgatgatgatatggtctagactgttgctgtgccacatgaggacctccaccagagtgcattggttgttgttgcaactgagtggaggaagctggtatatcaagatgatgaaaaggaggttgctgggatgttggatgatgggaagccggaggaggcgcgttttgaacttgagaagactgtggatgagacatagaagtgacagcaggattcagatgtccctgacgctggggatgcgaaaaacgaggctgtgattgagcactatttgcagaaacagaaggcggtggtggaggcataggcattggttgtggtgttgggtgttttcgaatcggggcttgtggctgcatcgtattggctggctcatgtacactgccaccgccttggaaagaagacatatgagcttgaacgtttggctttggcgggatagattgatgagattgttgaggttgttgtacagcttgtggctcaactttcggagtctaatagaaacagatttttgtaaaatttaagatgcttgaaatgaaatctattaacaaaatgacttaagaggacgcaagtacataccacttgaggaggctgaaccattccgagcatgatttgtgcctggcatttcaacaaacatagcatcatcatcaccatatacaaattctgaaatctatttgtaaatagaggcataaacctaaagattgttcatatctggaaactaacacaaaaccctaattgttaacctacctgcttcttcaacaatactaaacccaaactagtccaatcaatttactcaagtaagaagctccaaatcagaattcctcattgcttataagaccacacggattgcagatttagaagatggaaaagattagcgaagtgaagaagaacctggaaaagagccttcgtcaaaagagggttccgaatcagaatctccctcgcttgttgatggttttgatcaatcaacgtctgcacaattagattcgactgatcaaaaaaacagaattcgaaaaaaagaagaagaaatcaattgttctctattcaaatccgtaaaggatagtgttatagctgataatcggaaaagtatagaaaagaaagaagagagaaccttcatttgagacataatatcatagagctgacttttagtcattccggcgagatttgccggtaaacctccgtctccgccgatctgcttacccgccatggttctcgtcggtaatcgctaccgagcttaacctgtgtgttaaagacgcaacacaagagtacttgtgaacaaacctgggccaagtataatacgggcccaattagtataattccggcccatttaaaattctagacttattagtctatggcgcctgtagatcaactctttttttggtcaaaaatttaccatttttctcaaaacaaaacacaacaataaaatatagagatgcattagatatgtacgttaaatatatttatatgaaattattaatatgtttctttacatgtaccatgttaattgtacacgtaacatgcatgtatattgtataatatgtcttttggaaaagcaaaagcttataaacacaagtttacattagagagaagcgtgtgacacggttttggcctcttcactttcttgttgctccagaaatcttctttttatcttgtctccatccataattttcatacgaagatagttttctttatttcatccataatattcaatatatattggattcttgcctttggtaagtcggtaaacatcatcaactttatttttattctttcaggtaaaaatagagtcttccactacattcatcttccacaagttttgctaattttaagttttgggtaagaataactaacccatgtatatttcacaattcattcataacaaatcaaatgattatgagatatacttatgggttatatatctcaagggattcagtgatctttaaacttggcacttggtataatttcagcatgccctttaaagaatgagtaggcgtataatcttgtctcaagaaaattataagaagtccaaatttataaacatgtattgagacaattaaaagattagaattaaaaaaaagaaaaaaaaaagaaaaagagacgcactcaactcaactttctattttttatttttgtaaaactacaaactttgcttttgattttgtagccgaggtagtctctctctctccatttgataggaagaagaagaaagatacaaaaagataaaagaaagagagaaaaagagttttaattaaaatgcaatgttatacaaatgaagaagcactagcaagtctcttcatcaatgtctcaacatctttctttcttctcctcatcctcctctactccgccgtctccctcctaatcaagcttctccacttcatcggcggctaccctctcctccaaaggtctctatctatacatgcttatatgctcaccttactctatacacacacatatatatatatatatatatatatatatgtatatgatactaagtttcattttcccttgttttcggattttagcatattgcttagttttatattgaagatcttttaaattctgcaatgttttgtagagtagtttcatatttacgtgtttccggaagttagcatatatacagctaaaaataaagtaaatggttgcttttgatgagtttttcatatagttctgaaaagtgataaaaaaaacaatcggtaaacattattgttctcagttgggacaaatcttaatagttttcttattatgtaggaatgaagatgaatatgattccgcggcatggtattccgaagaagaggaggaagaggaagaagaaggggaagaactcaagatgtcgtgtaactcaagttaccatgtgatatctagagatccaaatccggatttgatagctgatatagcagacgacggagaatctttagtgttttacaataatatttctcaaggaggagtaaataatcaacacacgaaggagttcaataatgtctatcaaactcatgaacacgaagaagaggaagaagatgatcaagattctaacacttcttctacagaggagcacttttcttctgccaatgtttctccttatcgcagtgaatcatcaatagaagaggaagatgatggcgttgaagatcttcctgacgatcgttatgatgatgatgacgaagatgaagaggtaggaggagtgtcacgatacgacgtcgttgaggatttggttcgtaagcaaccaaatactactagtactcgtggtccctctcgtttccaaagtggtttggtgttcaatgacaaaagttacaatggtattatgatttctactcctcacctcttcacatgtttatttttcattcttcacatgcaaatcaaaagtagttttctttctacaaataaccaaaattaacacggtttcattttttatttaataatcagtgaaataaaaatctgaaacgacaagtcttatatccgaatttaattattaggtattagtatattcatgtgacgcttatgatgaaatattcttcatagttaaaaatatatatatatacacatgacaataattaaaattatgatttaaaatcaatgataaaccggttgagctaaaaatatgtggattgctttgctctttggctatagcaagagagtttgtgtccaatggaggaatcaagaatgatgtcgacgagatacagccatcatcgggctttgacatgagagagataaaagcagaggaattagaggaagaagaagaagaagagagaggacaaatattcggagagtcatgcacgaatgggtcaacgtcgaaaagctcatcggaatggagaaactctgtcaaaactgacgaccctttctcaacgtcctctcgccggagttgccctaaatgggaatcttacaccgtcttccaaaagtacgacgaagaaatgacttttctcactagaatctctgctcaaaagcttcacgaagcaggtgaaaatcatcatatattatacagtaaatattgaaaagagtgttcaatatataggttttggtttgtattttattttctaatttttgtctatttatagaatctttgaagtcaattatggtggagccaagatctatctcggagaggatcgttcacaagttatcatcaaacggtcacaagaaaaaacaaaaacaatatccaggcagcaatgggtcgagaccaaacccttacgtggaactagaatccgcttacgtggcacagatatgtctaacatgggaagctctaagttggaactacaaaaacttcgagagaaaaagatcaaccacgcaacgaagcttcaacgacgtaggatgtcccgccggaatcgccgaccaattccgtacgtttcacattcttttacaaagatacgtagaaaatgaaccttatgaacatggaagaagaccagagatttatgctcgcatgcgaactcttgctcctaaattgcttcttgttcctgaataccaaggtaatcattgagggtatgttggtatatacggtaactatatattctaggtaagatttggtaaatttttaatttgtttggatatgtagattatgaggaagaggaggagaaggaagacgagaacgaagagggtttcaggtcgaggatatcgtcagcttcgttcttgatgataatggaggaatgcataagaacattcatgaattttctccaagcggataaagaaaagccttgtcagaagatcatcaaagccttttttgggagaagtaaacgaggccccgttgatccaacccttgtacatctcatgaagaaagtcaacacaaaggtcaatatatataaattatatgactacttcaacttccacatcttctactactttatgcatgactcacttctcaaaacaatgaaaaatagtcttacttaaccaagacatgtagtgtagtggtttttattagtattaaagttttctaagttttatcattattaaataatgtcttttactcactttttttgtgagtagtattctaatattattaacaacattatgttgatatataatggtgaacagaaaaagacgaagctgaaagagatgcgtcgaggagggaaatacatgaggaagaagaagatgagtatagaggaggaaatggagatattgatgggattaatagatttgaaagtggtttcaagagtgttaaggatgaatgaaatgaacgaagagaatttgcattggtgtgaagagaagatgagcaaagttaaaattattcaaggtggaaaggtgcttcaaagagattccactccacttttctttcctccacattgaccccactattctaatctaatctctgaatataccctttattctttccccacccacatccttcttcttcttcatattttattttcctgtttttacacctcatattgtagcctgtaggagatcttttagacaagacccaccaaataaagagaaccataaagttttaatatcgaataaatagatagggatatactgtagattgctttagttctttatactttatactttgtctttgtttttccttttcttgctctctatatctttctactttttagtttattagctattaagtttcaggctttattgggaggttaggtgactcatacactcaaggaatcacaacattaggtataaacttttaaggaggataaatcaaattatttgttccatactaatgatgggaatggatttttttaggttgtgattggggtaatataacaaaataaaatattgtggaataacactatatatgtttattaaatttacggaatcacaaaatagtttaatataattgcacagtcgtatgatttgttaatctagaaattaccaaccataccttaaaaatatgtaataaaaaaaaaaactcgataaagagaagccgtgacccgtgagaataataagatttatgtatgtatttacaaaattctgtacacaaattaacatgaaaatattgcaaaacttctagtcccaaacgaagccatatattagagatttaggggaaataagtacgtaaagttttgtgaaacaaaaaagttgatatatttgcagtgaattacgtgtaatgtatgagtaaaaaaacgtgatttacgcccaccgttttgaagactttgccaaacttgatgtacttcccgtcttcttaatgcctgcaaaaacatcatcgattagacaaaagtcacaaaactctttattattaatctgatgattgaacctactttacactaatcaatgcttttaaaaaatcttcaaaacctataggttttaagtttgcttacttgatgacgctaagcctttacttgatgatgtcaagcccgtgaccttagcaacggtcgatgttgttcttgtagctactttccgaagtttatcgagtggccgtgttacactcgtagatgattttgcagtcaccgacttagctctgcaattccaatacttaaaacgttaaaagaagaaaagatatatcttttaaaaccacaagaacaagatgaagatgtggttttaaacctgtctgaaattctgggtggtcttttggtaacatcaatggatccttgtgttcccatagatgcagcatcagacgtaatctcgcttagtctctcgtcgtactctgcctcggcagaggatgctaaactttcgccgtcagtaacagagtatcttgattgtgatgaatattctcctgtatctgagtttatgtcatctgtatgtcctatgctttttcttctcatcattgatttctgaagtctctgaggctgatgctgaagtctctctatctcttcgtcttttctcgctatggtgtccttaagggacgctaactgtaaaagcaacaaatgattcattctatctttaggttaatggtaagagagatcagagggagagagaggggagataaagtgtctgtttacctgttccatcaagtctcgaacatctttaccttctttacttgtctttgcagcaccaagttcgactccagagacacgctctgcaaatttcaaggtactcattgactctgagtatgaagtagcgtcagggttgagttgcacaaacattagtgtctttgctcgtcctcctataagccacatcacatagaaacaaaagttatgatatttcttattcatgaatgtggttatcatatataaagttcactaaccaagagaggtttggagaagctgtgttagcttgctgtttctgtatggtacatgagaactctttgaagcgagagagaatatcacatctccaagagatgagagcgacttgtttatatgttgtgcttctcttagtctgtctcctgtaacttcagagcgatctactctctcacttcctgccagatccaccaaatgaagattaccgtatagcacggaaccggtctttaaatctttaccgcgaacgtgaacagtgacaatgctgcataagaaaacatatagattcagtgtaaaaacctggagggctgttgaaaacacatatttgttttggttctagaggatgaatatgaaggagaacctatgtgaacgactacttctttcattcaaggcagtagaaccaacggctcgattctgtagtccaatgtccatcaatgtaatcacatctgaagttgatgtcacaggatacatgcttgcgtcaggcacagccaggccattttgttgagttgtagaaaggatccctagtgttgtgtgaaggtcaaggaaaacaaaaaggaatggctacaataacactagcaatgagaaaacaaaaagacaaaaccaggatttaaaacaaagggatatttcttttgagaattgtcatcagacagcagatcgagcacttgttcattatatatctccaccatttgcaccccgacttcatacgatatgtttccctttctggactgagagattttaaaaagatcattgagagcgcgataatttactccccagtcttcttcacttgatccatctggaccagtctgaaagaaagggaacgaaggtaaaagcgcatcagcgttattcctatgaaatcttactctcagaaacaacagtgaatacataccattgtataagttttccctgatcctgtctggccatatgcaaatatacaaacattgtacccatcaagtactgacctaaccagcggtcttatgtctgaaaagacgtcagctgcaagaatccaaaatatcaaatgaacttggtgatatcaatataatattatttctcgagatgtaccatgaattctcgcatagatcacacaaaacagaactgaaaagcataaggatatataacagaaccggtaacagatgaacacaccttgtgaagcagttggactatacaccttgttgaacttaaactggcgaagaccgtctttcccgggtctagttggattggtaactactaattctccatcttcaccgacatactcgaccactgtgtttgctgcaccctgtgcaggaaggaaaggcctcacccggcaaaacactctgatgtttcctgcaagtcataactatagaatttatgggctgcataagttttgaaaatacacatctgaacaaatactgaacatgatcctcagtaccttttagctcctgaagctcgttgaaaagcttccggttttcagttagtacagcgtgatagttttcagcagcattgctaagttcaatcagtttctttcctgaagagacagattttaatttataaacactacaaaaattgcaaggtcatgaaaggtttgtcatgactacaaaagcatcacttagatcattctcacctagttggctgaactggtctgtatagttctcttgtaccttcagtatttcttgcttgatggatcttgaataggacctcaactcctgcgattcagcataattagccaactgtcgattataaaatgattattttagcacagtatgtatatatggttatcataccagtagtgcctgagactggttatcaataaagcttttataggaaagttctttctgactccatctttggtggttggactcagactttttctccatttctctgactttagtcttccacattacgaggttttgttcaagctcttggatctttccttcaaggcttgtattagcagtttttgtttctttttccatttgttgaagctgtttaatcttttcctcaagagcatttttagcagaatgtgcttcttttcccatttgttcaagctctttaaccctttcctcaagggcattttttgcagtgtttaccacttttccctcttgttcaagttccttgagcctgctctcaagtcctgttgtagcgaccattgtttggctttccatttgcgagcattgctgttcatacgcttttcttgttgtctccagctcttgccttaacgcagaaatctgaaggttgaactgatcattttctttcaatagcttgtccatatcctcctcttcatttttcttctgttcttcccactttgacttctctgtctatatcatacaggtaacgccatgttaagatgaattagtaataagtcagttcataaaacaactcgcggtataatgtaccaacctttgtttggctttcaatttgcgagtattgttgttcatattttcttttagttgtctccagttcttgcttcagcgcagaaatttcgaggttgtgctgatcattttgtttcattagcttaaccatatcttcctcttcgtgtttcttcttttcctcccacattgacttttctgtctaacatacacaaaactccaggtcaaaacttaatttcatgtcattgccaaattacaaataccattatcgctcaaacagttcacaagtataatgtacctctatctgtctaagctgttgtgttgcaatctggcaatgaataagttcatcaatagagcagaagatatgtaacacatgagtaaaatgttatctgacaagatcataacaaatgatacctcgtgttctacaccagttcctgatgctaaggcttcaaggacattgatccttgactggtatttttcctcgcgagttttgaaaatattgttttgctgcacataaacaaaaaaacgaaattattcacaaaaaccagaacttgaacattgctaggaagcatttttcctaagtaaacaaaatcataccgttcttagatgttcagcttgagttgatatacgccgctcaatctcctgcacgacttttcttaacaggcatgccacacgctgttcattgtagcttttgtcaaaacatttcccaagaagtaaaagcacaaaggaaggtatcttatagacgtgatgatcttaataattgttggcattcaagtacctgagggatttcaccattctttctttcgatactttcatctagaattccattcaagacgcttagcaatgactgcgtaggagcattctgcatcaaacacaagcccacgacattatcaatagacttcaaaagaaaactatagtttcatcattaacaagatagagaaaatacatctaagctacttgatttcatcatttcagaaatctttgaagcttgaagatcataacgcccctgtttcatttggaaaacctcatgaaacttgtgtcctccatgatgcattgatccaggagataatggatctgccgtaaatagaagacatttaaatattatacatacacatacataagtaggcacgcattgagacaaatggtatgagtgatttgccaaaaaaaaaaagagagtacctaattggccagagctggcaagggcttgctgaaatttggactctgccagacttttgtgcctttcatctccggataatggagaaaatggagagaaaggactacgaggagtttttgtatctgcatgatttctatgcctatcatctacagataatggagaaaagggagaaaacggactacgaggagttgaatctccataagggctgcccggttgatcacgcataggattcatcacgcctcgaggtccaaagcaaacttatggaaacacctggaaaccccaaaactgctgcattctttagcaaaaactcctgaaacatagttgattgagggaaagaaaatgagcattagacaaaattcataagaacacacacacacacatagaagagcaatctagatgaaaagaaaaccaaagcctagttctttttgtcttttcctacatgcaaagacgtgcaagaacatgatcaaatggcactgctagacataactatctcagagtcatcattgtaatcagctttactctgtaataaaaaatcttagctgacaataaaacatagtaaccagagtcagggattactgtgatgaatttgagaattcttaatttattataaggaaatttctcatatttccatatttaaagccgatactaaatcctaacaatcacatttccattaatttcattaatctagggattcaaagatgagattttttctagttcccagtataaattcacatgatttaaccgttatacagcattatgaattgagggattaagacaaaaacagcaacgtgagacaatcgaacaaaacttgataaaacaaaactagccagaaggaaacaaaactaaagacgaacctaccagaagggtacattggtgcaacaagagaaaaaaaaattcaacattgaaaaaccaagtcaaaacatagctcaaagtcgcgatcagcaaaatcgcaacatggcaacaaagatatgaggagaaagaaaaaaagatgcgatctttgttctcattaccttagaaaatcaagacgatgtttttatcgggaaagcttggaaacgagcgttgaggaggtctaaaacctgagagaagaaaacagagagacggagaaaatagacgtgatgggaatgtgggttgatttgatcttttgattattattagcggataatagtaaactaattaaacgattaatttttctctaatgattaaaaattatctatacagagtaggaaaaaaaaaattggggtttgtttgttgtacggagggagagagcgcgaatgtaggaggacgcgcagtaattaacaagtcttttttggcttctccaatcgtttatacgggtttattacacgtggcaaatccttgcctaaaattaacgagtattttaacagattataaattggattaagaaacgattaacttgtaacatataattggggtacgacgaccaacggaacattttaatatgtatcatgtatgatttgggcacacgtcgtgttgtggtactttacttccaccgtctacaatattatagagttagcatactttatacttaaaaccataggttatgaaaacaaaaccaaaaatatagtagtggtaaattgatctttaatttcgttcaaaatagacaagaaaatacttcagatttaaggaaaacgttgtagtgatacatttatttatcatatcgagctttaatataggaatatttgtttttattgttgttacttaatacttattaattagtgttgggataattttaactgtttcaagtaccgatctatcacacttcaacgcagagcaatcggacgtatgaaagcaaaaagatttcccgcatctatgttagcaagtggtctctcatatcaatcaaggcctattgtgcctccacttccgaaattcactcgttcgtcaataggttatattattaattctacacatgtatcacaaaaatgtgcagatttcaacttggtggtgaatggtgatataattaaggtttgtatatcatgtcacataacttgcgtaaattccatataaagtaatataaataaaatggtggtgtaaagcagaggaacgagtcctatgatagagagatgttcaattgttcgtgggtcatgtggcgtaaaattgtttgtttccttgtttcttttggcgtaaactgcaaaattgccaaaaattcgatgaagtcacaacctcttgatttgtatatattgtcacgtcgctatatcaccacaatcaattcctttctttaaaggactagaattc

SEQ ID NO: 36 - DNA, 100685 bp, Arabidopsis thaliana
gaattccatctaaatatcttttgactgctttctcattcttctcgaatatgaacgacttttctcgtatctgttcaagaaaacagaacaaaaaattgatcagtcttggtttcttgatcataatcaaagaaaaaaccaaagacttaagaattgaattgacctggattaagcaattgttcttgagaatgacaacttctccatgattaatttcctcatcgttcatccatatcgaaaacttcccaagattcttgatttcaaaactcccatcttgcttcaactttattagagcctagttccataaatttccaagaaaactcacacttataaactatgtataaaaatcaataagatgaatggcgttatcaaaatgtatgatgaatggcgttatcacctgtcgtcgagagaatcttgtttcagaccctgaccttcctaagtcgatatccaccggatattcacctgttgctcttccaagtaacacctgacaagttgaaagtgtttttagcttaactatatcacttaatcactataattaagcatcccaagaagattcaataacctctggtttattgatgtaatgcttagagcttccatatagaagagcgaaagctccatgagcagcgatgtcacggttcatgtaagattcagcactctgctctaatctcattatctttcgcgccatttcctcgtttcgatattttgaagctacatacacacacaaccatcagtatagccttttgatacattagaaggacaaatggtaaaactatagtttaagagagagctgattatttaccgtccaactcgtactggtcttgaccaatcggttcaaggtccatgtcaagaatctgattggttcaaaaagaaaacacagtttaagtaactttaaccaagaaaagacaaaaatttacactgacttgtaagagtttatataccatagcttctagatctgaaaaggaaggcaactcttcatcactctcaatttcaatattattctcctctggtacgtttatatccatctctgcactcaatgtctgttcacaaatttcattctctggaaagtgttgtagagttgatgaagttgttgcagcaacagtagatgtcgctttctcagtaaagctatcactgaatgcagaagaagaacttgctcgggttgtgacagcacaatctccaaaaccagaactgtcgataatgtctttgctcttgacttgtaaggatgatcttctaactggaggcagaggtggcttcatattattcctcactgatgaaggattaaccgagtttcgagctttaggattgtacagttgcaggttgatatcatcattatctggaatctcatcggactcacggtttataacacaattgataacaccgttaacgatttctggatgtggatcataaggcggtggaggaatccaaatctctgcttgatcaaggattacttgctgctgtgacggtgatgctggctcattcaaggatgcgttaggttgttgaaacagaggatcttgaaacacttcttgaagcagaacatgttctgttgttgttgttattgtgtctgtaacataagagtcatgaatctggtcatcgttgatgtttaacatctgattcaccattcgatcatcctcatcatcaatctcattaccaaagatagttgtctgataatcatgaggggaaagcaaaatgtctgggaaagtgttgcgaaaactttcaatgtcctcaaacttgaaaccaaaatcatcatcacattctccaaacaaattcccttcctccacattaagatgttcatcaatggcattgttattgaccttaagagactcctctaactccaaacgccgcctttttcgtgtagtgtagtaatgagttctgactggtactgaatcaaagagactttgtggaacgaattgagctccgtattggagctcaaatccgactgatgaagacagagatgtaaccttgggattgtaaagaagacaatgccatcgctctgttagttctgaaagtgtaaattttcgagagaatctcaccgctcctttagctaacgtctctagagaagttccatcctattattatacaaggaattaaactccacaaatcattagaaattttgcaaatcttggattcaaatatcgactatttgaatcatagattctgaaaaatttaacaattgattgtaagaattaacaaacagggaaactcgtaagaactaagaaccgatataatcaagttttgatcaaggcagagtattatgacttgggacacaagtatgttaattatcaaacagagaaaagcttttaaacgctgcaataatttagggtttcagtacgagattcagtaacatcatactcgtacgggaacgcaagatacgaaaaaaaaaaagataacagaaaaatcgaaatcgaaaggtttatgaaattaaaaaatcaagattagggtttcgtgaaaaaactaaacctcgagtgattttctgagaagataatcatcttcaggtaaccactgaaacgccatcagagacgcagatttaagcttttcaccgattaacgaaagaagaagcttctattaagtcgagtaaataaaatagatttagaaaggaaatatttaccagagaatcggccacagaatctttacttctctaaaattagcgtttttttagccaattaaaatctcttagtcttctcctattacggtttaattaagtcaaatttcttttgaaagttaatgggcttcaatcttggtccattatgatatttattaccactgacgcacaaaattgggctgtcggaggccgagtccgtaatggatttcaaacaattattgtatgtactattgatgcaaaataataatttagtgtttaagaacaactactaattaaatttctatagatcaaatatgccaacccacttatttattctgaaactagagtgtagtgctaaagattcttgaatagtgtaccactaataataaaagctatcgcaagtttagaaaataaacgtatttatacatgtgagctatataatatgaagatatataaataagaatggtggtggtcacgtgacaaggagtctttgtaaccttcgtggagaccacaacgctgtcttttcttcggccggtcttctccttaaaaggcatatataggcctattatattatacgtttatatatacatacttaaatgcttattgaacattagtatttatatatacacatttgatacttagctagagcttaatgtgaagcatgtgcatggatgtgagttcggaccccacgggctttatgaggcccataaagctaatggagggggaccacgtggcaaggggctagtgcctacaagtggagggatcctaagaaagtaaagtacgtataagtttgatctcgtgatcgtacgtactgtttctactattggcatgcagtgttcgtcgcctagggtttcagaattagacttccttattatacctaacttgtcatgtattccaccacagttacaatcactgaatcacatcaccttatgttttttttgttttttttgttttttttattgtttcatacacatatacgatggggaaaatcaaataaagttggtgaatgcacgcgatttcaatatgtaacgtgttcgtagtcggaggatagtacaaccattgtaaatcccataaattagtatgtccaatgtattgatcgcgtgtatattgtataatgcgtttatattatattggataaagtttatgctcaactcaacgcagtaaatcgaatatcttagctttaggaagacactttgcgtcacttccttcctttttcttcaacaagacaaaacccgtttctcgcggaaagagcatagttataacttagctttaagcaaaatgatggtcacaaaggcataattgggaatttatcatttttcctaatttttagtaatcccctctatatattatttcttctttaagaagtatttttgattactaaaaacgtgttgacgtggcacaaccatgttaattttcagaccttaaaaaacatgacaatgatttgtgaaattacaatatttttataagaaaacaacaaaattgtaaataaaaagcatacatttggtttgagttaaatatcgtctctaagtttaaaaagaacatttttttcttttggtcaaacaactttaaacgaacattttatcaatcacttgtatttaggtttaagtataaatcctcaaattttgatcacagtgactttgcatcggttgatttttattaccctcacactaaaaatgaattgttacaaattttgtctgcttgaatcgttttcgacaaattttattggtattgaatccaaacataagttaaaaagcctggaacttaaaagaattttaaacacagcgtatatataatagatataatcattgagaagattgtcgggaaaatactgttagtgaggagaatgattgactaccatataaaaagatactagtactatataggagagagagagagaggagatgcagcgagaagaaaggtgagcacaaggctcgagagtgaaagacaacaactaaataataattggactattggagctaatccttattcttgatttttcccctacgatgacctttgctcctcactctctgtctgacttgtgggaggtgacaaaatctagtaatagaaagaatcataattataacaaccgagaacacctcggctaaaaaaggaaaaaaaaatagatcacctctgataaccatgccaatgaacaccaatgcccacaatctgatattaaatagtatttcgtcattgtgatctatggctgaataatgctgggcattgcttcggcattagctaaacctttattggctttactgtgaattgaagctaactctcggaaaaatatacacatttttataaattaaaaaagaaacattagatgtatcctttaaaatggaatgatagtgtttgtggtgtttttagaaaaaaaataagagtgttggatgacaatgttaatcatttgaacatgttggataacttcattgcctacgcatgactacaatagcattttttgttgtttgtaaattgagttaaaataacataaattaagataataagatataattgggaaacatgcatctatatcaaacgtgaattagctatgcctgtctccttagagaaatatcaaccgccaaaaagtaaatcagtggtagctattaaccccgtcaaaatgtcaaaaaatgaaaaggaaaaaaaacttaataatgttagccaaaggaaaactaaagtaaagaacaaagacaaaagggacattagccaactagtttaatcatgaagatcccgattcatcaaagttaggagtgttaagtaattacatttacaaataaagacaaaatagtgatttagtcaacaagaaattctaaaatacaaaagactcatgcctcgggcccttaaataagatcaagtccattttttgggtgggtaactaatacgtacgatcaacctttctatagatacacgcatatataattgttgtttactaaagcttaacaaatttaagtcgtattatgttaagaaaattctccttttttctagacacagatgtttgggatgggattgggctttcttttctctctctctcttttttttttttttctttttttcctttttttgattgaacagatttttgtttttgtttttattttttgtcctacaaacgcatttcaataatgatttttctttgacatctaatattgtctgaaaactataaattgttttctttttgatatttttacgtattgtttccgatgcatatcgtttttgataaccatattttatggagcgaacccaaattaatggttgatgatataggtgattggcaaagtgaacacaaaaacatgtaaagactttgaaacaaattgaatactttaaatttaaattcacatttgagtgatttgagagagttaaaaatctctaagaactattccaagaaaactcacattgccttcattttgtacgtttgtttctctaaatccaataagtatgccttttttataaagcgacaaaaatacttcacagccaagattttaaagtacttgcttggttcataaagaagcatttgctcaccaaaaacaattaaatacgcaaatccttacaacatgcataactcattttttttttttttttgtcaatcgcacatctcatcttcaaggattagctagtaatataggtaagagactttatcttgagaaattggttgtgtattaattggctcgtcgataccgaagatttgatcaaatctagctatgagaattggagaagtaaaatcttactctcgtgacctgcttattatgaatatgcatgagaagtcgtcaacgattggcaatacaaggtggaatagactcgtaaattttgaaataaatataattcacaagttaaatttgagatcatgcgatggcaaaaattaggatatgaaaattggtaatcagttttgaagtaatgcgagtgttattaagagtttaaggtatgtgggttggtcgtcgattacaaatatgaaatatctttaaatatttttcaaactttgaatagaccatatacttatatactgtacatgcacaacatttaggataaagaaaaggcgaaccatcagagatataaactttaaaattaaataccaaatgcgcctaattatgattataaaatgcaaattgcgccgctaattcccgcgattccacgtgatcaaagaaactagagtgggtctgcctgcttcggctctaatgagggtacaaggtatgactgaataagtaaatcctttagtgatttaaattttaaattcgcagatttatgtacgaccaattacgtgatagtataaaatatttaattagttggtataattaatagtagctagtttaagataaaccactaacggtttttatgtactcttaactattctcatgtttatgcaattatgtgtgtgtacatatttatagttttaatttgtaaaacgagcaaaataagctaaataaccctcatatcccgtttagttatatatttttccaaaatttgaaactatatagtactgtattaacgtgaaagctaagttttctacttcgattggaataagctaaaaacctttaaaaaaaaaaaaaaaaaaaaaaaaaaaaaaaagctaaaaacctgaatacagaaataatacattatattcatgtattagtttgggtaaagatggaagacgatcacatcccttcgtcggctaataataatgactcgtgacctagaactagactagggatcgctgtccagcaaaaatcccttaaaacaaaccacatagttttttttttgtttttttttcacacaccacatagttttcttatagttcatattcaaaaagtgtttaagtttctacgatcgccctcttcatgtcgattcaatgttaataccacgtatttctgattagacgaataaataacaaaattatcaaaaaaggaaaaattaacgcacgaaggcgtcgttgaaaaagttatgtcattgaaagtctaatcgccgtgattaagcggtaaacctcacgatgagaccgtccgtgacgataaaatgtcaaaggaatgtgacgttagactatccttttcattttttctcagatttcattttttttttcctttttctttatttcagacttttatctttgccttttttgttttctcaaacttcccatatataatttcatcacaaaatagataaaccgaagtaaaaagataaacggtggggagggttttgcgggggagggacgagtggagaaaaactccctgttctaacacgtggcactctattcaccattgataaaaattaacactatgagcttaaaaagcgagctattttctattttctagtttagttttaaaagaaacaacattttcgctaagaaatttcttttaattaacacatcttaaatttttaaaatctactaaaacgaaaacgagtcattattaaattcgatacgttggttcggcgtaatatattttatactccttcatgcatattgttttgaatcctaaaaccatcgattagatatataatttgcatctgtggacaaaaaaatgacttcctacatagtaaagaaaacaacgcgtcatttaatttttatcatcttacatgtattaattagattgtaataagggattatgaaaatacctatgaaaaatgtagagaataagcatatatacatattaatggaatggaatgattactctaacaaaattacttaaaaaatgtcacctatctatttatccatattcctttttttttctttttttttcaacaatagtttgagtgatatttatgtgatggggattcactcaaactggaagataactgtagtgaagtgcccaaagcaaaagatcttcatgggactctctatgtcttaaaaactttttttctctctctctctctcttaatccaccgagtaaatccagcaaacttccactttcagagatcaaacttgagttatcttaagtgatgaagaaagactaattccatggcggcgtttgcagtttcttaagcttcctcatcatctaccgtcaatctttatagcaaagaaaaggaaatcaaatcaagatttacccttttctttgatttctctttgtggtgtgttgggtgtgtgatgttgattaccactggggaaagaaatggcagggttcttctatctaggagggagagacaacaacagcaacaacaacaagcaagatcatcatcaagtagacaaggatcatcatcatcaagacaagagcaattatctttatctttacaaagacgagatctataataacaacaagggtttcgagatttggcctccgcaatacttccaacaacaagaacatcaacaacaacaacaacagcaacaacatgcctcagctcctgcaaacttctactcatttggaatggttcctagcggaagcagcagcaacaacaacaataaccgtagccggagtttatacttcaacgtagtctccgatcatgagccgggagggttcacggtgacgagacaaggaggtatgaattgtcaagattgtggaaatcaagctaagaaagattgtcctcatatgagatgtagaacttgttgtaaaagccgaggctttcattgtcaaactcacgttaagagcacttgggttcctgctgctaaacgtcgtgagcgtttagcccaactcgcttccttgcagcaccactcagcctccagccgtgaaacgcaaaacgccaaacgccttcgagaagctagtggtggtgataataatgatgataaagaccatagtggtggtggtggatcggctcttgctaatacccgtgtggtgaatgctaattctaattcaggtaaaattcttgatgatattgaattagctttcaagattgattaaattttcatgaaaaagtgtcaaagttttaattatgaatgtttgtggagaagtacaacatcatttgcgtgtgaatgaggatgtccgccggatattgctgctttatttatacaagttactgttccttagtaaacctgacgacataaaaggatctaaccaagatcgatttcatgtaaaaacaatgcaataaagattcgtttttgtagatatgaaatgggagctacgctttataatcaacaacatgttatactaaaaggggctaaaaacaaatctcatgtttatattttggtgatcttataatcattaataaaaaaattagggttggaggtgagtcaacacttaccaccggaggttaactcaccggcgatattccggtgcgttagagtgagctcaatagaagaggatgaagatgatcaagcatatgcttaccaaacggctgtgaacattggaggccatatcttcaaaggcattctctatgaccaaggaccagaacatcaagataatcatcaccttaacctacttgcttccactgcaaccaccaccaatgtggaggagaccgccactaagactgtcaccggtaacaataataatggattaatgcttgatccttcttcgctttacccagctcaactcaactccttcatcgcgggtacgccattcttcacacctccgaggtcttgatcagattctgatatcagttattgattattgttaatctttaaacgttataataataagaggatttcttttgtttttgtttttgttttcgtttatctatttttgaaacttcgtgcaatttggaaaaaacacccttacctaggttgttacttagtggtgattaacatgcatattgtacgtacttttaagaaaagaagatagtgttcatgtttcaaagattaatcttttgctttatttttgttcattaggatcgatctctgtgttgcaatttaaatgtggtttagttatagtcttatgatattaattaatatataatataaccctctttttattgatttacgacatatataattatatatagtacttttcaaggtcaaatcaaaaatacttattttagaaaagaaagaataataaaaatcttttggtttgatattgaaatagctttctggttggtgttgagctccaagctacctttttccccgtttatccgtttgcttgccggatctaaacatgacttaactaggtttcgtgttccactgatcaaagatttgaaaaaaaacatatacttagtaaacttcaagcaatttttatattacccaattgaatttctccagagtgaaagatgttaaaattagttctcaattgtaatatatatatacccaacaactgagaaaagatggaaaaagtttagttaaaaactggtcctgggcggctttaaattatatttatgcacttaaatttagcttgtttatatctttctctggtttgagtcatagttgaataatccaaaaatctacataaatattttgaaaaagacctctagtctcatggacaggtttttacttagataatatcgtgtcattccatctagattcaacccctgtctacaataatataggaggttaacgttagttatgtggagaacgtcagattgtgagtaaatacgtaacatgtgaaatgttggcgtagatgaatgtaaacggatggtaatataaagtatttatatcaaactacttccctgcagaattatcatatttttagctatttaattattacttgcatggatcatggatgtgactatcagtcgtctgtagctaatccccatttactaattctgtcttacagaataaaaactggtcgatgcagtatatatatatatacaaatgactgattaagacatatgatgaaactaaaattgatttcgtttttctaatgagatgatataataatttgttttatctatgtgtgaactgatactgttaacaataataatgattagctagtactattaacagtactgttatagattgcttgatttaggacaagtataaatgacagaggagatagatggaagtttctcaaaaactgtagagtgtctgactcacggcatgtgatctcttcttcagtctctctcgatcaaaattattataaaaattaaatgtagttgatccaaaaactcatgatcatatctcctctgatattttacttaatctatctaacttcttgtttcgcaaaaaccctacagcctcatggtattaaacctatatatgggttttttttggaactatatagaacttctctctagccataacttattataactaatgtgaattatatatttgatattttttttcttctttattacgtaccgatgacgtgcatgtggttccaatggtaagtactcagtcatcctcacaggtcaaatgtttggcattgtcattaattgccattaaaatacacggtaggttaagtttgaaataatagttttttctgagatagttagcaagtaaattgttaattaaatatgctggagaaagggaaattaaattgttgagaagcatgaagatcgtccaagacacatcatttgtgaaattgtaaagtctatggtcaaagtgaaagactaattccgaacaaagattttcctcaacatctgttatacttatacctaactcgattatgattgatatgacagtttcttttcttttacctcaatttcctttacaaaaatcattaaatcttccaacgcgtcattagatagtgaccatgtgaacggaattcgtaaatggggataaataacagtttttcacaaatcacaacccaacttcagtttttccctgagatgatttggctccacgtaaatctttctctgtccatttgagatgatttttattcaaaagattcatggctagttcgaacatttttcgaagtatacctctgaaaatagttattaatatatgatgttactatttgatgctctgtattgaaaaaataaaaatcaaatctagataatgtgttacgtactgataattaagatatacatacacaacaacgtacactgaagctaactgagtaaatcttttatttataagaagtgtagagctaaaagttaaaactatatccaacaaacataaaatctaaatacaacggccataaacctagctacaactacagttacagctataaccaaaaggagaaaagatgagagattggtccccctttgtacattgaagcaactgagtgaaactagtggttagggttttctcatggatttagttaagttctttctaagaattaattcattgtcgttgtcctaatcgccaatccatttccatcctcggtattttgtttccttttttgtcaacaacaaccttggtgttctctttactctttatcagcacaatagtggtccaaaagtccaaacaatatgtatgtgatccatttaaatttaatacatttatacatgcaccatacatccatgatccatgcatgctctacatgtgtttatgtatgcagtatggacatacatatacccctattaatcatgtcatctatactttagaaaataaaacaattcaaaatgtggcaacaagaaatatatgtttttgcgaataacaaacggcccattaaagaaactggattcttacaataatatgggccttggcctatttgttttaacgcccaagtcggtccacgtatatagtaacgggtcgggtcatatgagatgggattccttttttttcacctccgcttcaaagtaagaagacttaggttttaagtcaaaacgaaatcggaagatcagacagagctcaagagaagtaaagaaactgcgacaagagaaagaagattgactttggagaagagagagagtaacgatggaagatattcataatctcgatatagagaaaagtgatagatcgatttggttgatgaagtgtcctgtagttgtagacaaggcatggcacaagatagcagcttcgtcgtcttcttcttttgcttcctcggattctcctcccgacatggcaaagattgttcgcgaagttgatcctctacgggacgattctccccccgaggtaatttggttcttaaattttgagttttagctcaaaccctagattgttgattgattagtccgtttttatgaaattgagtgttgaaattacattacttgtgtcgggagcttgaaaaagtttgaatctttcatgccaatttcactacccatgtggttgattttcaaaacctagcttaggggtggattattcttcttgcaacttattacctttgttttggtattaatcagttcaaaatgtatatggttggtgctgagtatgggaacatgccaaagtgctacgctttgaacatgttcacagactttgttccgatggggggcttttccgatgttaatcaaggtttggattttactttgttctgattgaatacattagatttttgtttcttcgtttgcttttattctcatacttggcaagctactctaggttgtgcagctgctgaaggaaaggttgatcacaaattcgatatgaagccatatggtgaaaccattgaagaatatgctaggctttgtcgtgagagaacgagcaaagccatggttaaaaatcgacagattcaggtctgttttatattttcacattcaggtgtttgttttcctttgcttctcctatactggctcttaagtgtaaggacttttcttccttgaatttgcgctaaaggttattgataatgaccgcggagttcatatgaggcccatgcctggaatgcttggtttagtttcctccaattccaaggtaaaaatgttattctcttctcaatgattttgcatatatggtgtaatcattgaaatggtaaagagttagtgaagcaaccaacaatccagcttcaatactcaatccaaatttttatctttcctttgcctgatcagccttacgattgtagaagtttgtgtttgtgtttgaatgagcaggaaaagaggaaacctcccccagtcaagcaaaccgaggtgaagaggacgaggagagatcgtggtgagcttgaagctataatgttcaagctatttgaaggccagcctaactggacattgaagcagcttgtacaagagacggaccagccagctcagttcctgaaagaaatactaaacgagctgtgcgtgtacaataagagaggatcgaaccaagggacatatgagcttaaacctgaatacaagaaatctgctgaagatgatacaggtgggcagtgaaatcaaccccttgtgtaattcactattatatacatgtgacatagtcataacattattataaaccctgagtcattattcatcagaagaaaaaaacaagattttagtagggaagagaaaagaggggttttaagtggtcatcttttaatttgtatctttaatcgaaacagacaaatataaaagagagtttttgtttatgacatataacaaaattacaaaatcatgtggcggtttggttggatataaacatataacgaacacaaagtcttgtccaaagagactgagacgtcaaatgtgtcttccactgcttgaacattagcgtgattgaacatttgaaaacgaccttgattcttcttctataaaatgcgtccggattattctctctaaagattccaagttgttaccatttgagccgtaggttgggatgatgtatattaatggaagagacaacaatgtcaatggtaatgtacttcctaccttttatttgtggcagacatactaatcgtgtttacattttgacttctccttctaatactcaattcaaaagtgtcgatcacgtaagtttcgaatgaatcggatgagcaacatctcattttctttgagtagaggattttagattcggattcaatctcatagaatatgtagtatgcttttctgtataactaactactataagtcatattagtacagaaacacgtgtggcatagtgattacggctttaggactaagggcataaactcgctacaagcagggattggattttctactcactttcgggattgtgccgtcgtttatgtaaaatctagataatcgatgctaatctactaatattacgtgaaaaaatcgaaaataatttgtttagaaaaattggttttaagagatacaaaatcactagctacttttacaaaaacaattacaacttaaatactcttttttttttgttaaagatcagatctatattatagactaatatcttatcataattacgccttatagatgggaagaaaacagcgaaaaaagcatgcaaaattaaggaattatcattggtaactttaactgttagcaaaatctttttctttccttttttcgatggagcctgtgattgcaaatgttgaaaagatataagttctcttattgttttctttgaccaagtcacagccgtaaacgaagaaaacaaacagatgaagatagcaatgaagacatgtaaaaataaagtgtaattttttatatagctgtaatactttgttacataaaaagagaagttgtgcaaatgccttttttaacaaaatttttttttaagaaaataaaactatatacctagaattagcttatcaagcacaaaagcgtgacttaatcaaaggaagagataaaataaataatcatgtttaaggtggaaaatataatgtaatcttttgacggaaataagaaattaaattctggtctgtttttgataggattacattttccagcttaaacatgattattttattaaattatgacaattatatcagtagtttaatcatgtcggactatctctaactaagaaatcccaccaaaatttcatgtcaataatatagtggatggcttgaaatttcccataattaatttatgcatgcatgccaagcaaaagcaatcgagatgaataaaaacaaaagtaaaacaaaaagtcagtatatgtttggacttagagaatacctcgcatgcaaaaagccaacccacaaaatagttgcagaaacacataattgtgtattacttcaattttttcaagatgatagaatataagtttttctaatagaacaagcttttcggatattctcaaaactattggcaaacttgcacaagttttgcggactttcacatgcatggtttcgaaaaatttaacaaatatttggaaactttcaaaaactgttgtctgtagccataacatgaactgtttgtagtaatttacatatgtttacaatattaacaaagtttttaggaagttaagaaaattctaataagtgcttaaaaactttgacatgttcttataaattttcatgtattttccatgtaaaaaaattctcaccctttttactggtcatttaataaaccctaaattgtgaaatctaaatcgtaacaccaaaatcctcaaacataattgccttcttattttaatctctagagttcattatgtgacgaatattggaatcgaggagagaccaattcttccgttgtgtgttgaacctgacatgatgacattgtctataaaaagagaataagcgtcagaaacttaaaatgaaataggaattttttttaataagggttagagtttctcatgctacttttaaagaaaattaatgaaattatgtcatttggaaacttcaaactttagaagaagttccactctaatataaacatacggtacagttgacactaactcattttctttatttttgtcacctgcaagaaactttaaaaaatcacgttggagtttataagactccaacgattaaacgcttaacgcttaaagtagttttacgctagctagttcgctttcttacgaagactgatacattcggatcaccataattatagttcgttgaactgaaatcaagaaaaagagagagctgtttctgttaaacgtattgaaatcacgttagtgggtaaagtggcattagtcttataataatatgttgaagggtcatacttgtctcgtccttatagtgttgtcgcacgtcaaggtgtcttcttagtgacatccacttatcatcacaattcaaacgaatctaaggacactctatatcaaatatcaatcaaagcatcggatgaaaactttatatgcataatctttctattagacacaagcatatgtatatagatatacaccattgaattgcatgtgaaacagtgcagttatggaggtgtgtatacagtcattaaatgtgttccagttttgcagaaccgtgtctacgttcttcagacaatcagtcggaacgttttatctttgttgattatgactgatcacaagtattgtcgtaaataagtgatagcatttagcgtatcggataattagtgaaagaataagagccgagtttatataacttggtcatattaagattctaaatttatgcattaatcttctcaaatacctctaaaagtaatttacattcttttatcttggaatttaggttaaaagctaaatcttttgtggtaaagttcaaaagtggagtgagaaaaagagaagagagagagatcggagacaagaagattcgctcgtgggcgagcaaaaatgataaagaaacgaaataaagtgaggaaaaaggagacaaggcaattaaatattccaactaagattggtctccctcttcttcttcgtctgctcgttaccggttactatcttgttgggtccttacccgatccgttactgtcttgctgggtccttacccgacccgtttctttaccctttaccgattgagagagatagacttagatcgaatatcatcctttatatatcgggatcttctttttcatcctaaaaagggttttgttttcttccttttttaactaaataagggtttatcttctgtcacaaagaccaaaaatgctaattaattccttttatttgtattttaactaaacacttttataagcactactgcactagttccggaaattgggctaattaatagtgaaactttagtctttaccatcaataatacgcccttcttttataacaattgatgtttagtgatctttcatattcattaaggaacaaactaaaaatatttcatcctaccatctactgatctacaataaattaattagtgccagtgttgtgaaattttgaattaaatttgacaccttagttaattatgagttcagtgcttgtttcgcataggtaacaacgaatcatcatttgagaatgatataaaacaacctaaatatatgcaagtgtaaatcatgaacctacgttatagatcctaatataaaccatatataattaacaaactaatatgtgctggatttggtatgtccagctgggtatgtcttcatttatctctcaaaatttactgatactatagctaatagctatatctgaaaagagtaattcccaatttcaacatacaataacaagatattcatcaataagatcacttttactagttatgaacagtacctggagaaacaattgatatttttcaattatctaccatacacatcatcgcgtaaatcaaaccctcaaattctgaatgaattagaaggaaaactcatgccaagacctctggcaaactacgtatttttattatgatgaaataatcatttacaagaattgtagacagatttggaaatctcagtatagttaatgaaggggtctgcctcgacaaatggcattatggatacggttgagcatacgtgtaccacttgcacggccagtttcatcacatatatacatactcctttgacctttcttaagtttttttatttattttaatttaggattaccccgaaactacaccataaaatttgttttcaaaaaacgtcacaaccttttcttgtaagaagcttttctacaactaatctagtaagattttacaaaactgtttcgatttttttttaaaatgctgatatcattttgaatgtcccaaaataatcccttctttaggattactggaaatgttttaacaaaattgttttagtgataatgtttgtagctagaactacaactagttatttatatattttgataaatttttaattttgtaggaacaattttctataaatgtagaaaatatttacagaagtatgatattattagaaacaatgatttcttatacaattaaaaaacatgtttcgctgtgtattgagatattttctattcaattttgatatgaatagcatctatgtcaagaacagaggatacaaactttagtttaggttcatcgggataatggtagaataaatatattttataaaatagagcaattagataaattagtgtaacgtgaaagtataactaagtttaactagatgtattaaaatgttaaggtaaatatctttgttattgttcataaaaaaaaaagatttttgtaatagaaatggaatataatgaagtaatgaaaattccatattgttatattttgttatgttttacatgttgctgcatatagtttatctaaaacagatttgtgacaaaataatattccatgaacaatttttgccatgatatttcttttgtcgtgatacattcgtggaaggaaagaaaaatacatatttggtttgttttcacgtggatatgcacatgtttctgtgtacaatttactaaattggtttctctgggtttacattgtcgatctctccaaaaataacaagacaaaaagaaagagaaaaatgaaagcatatacaagcaagcaaccataaaattttcgatgattctattctatagggatacaaatgtatttgactattggaaaacaattacacacgtctattcgatgagcacaaaaaaatagaactaaaataaattaacaagaaaaataaaactaaaataattgaggacaaatacagataataatattggtgtaagcgtgtacataaatattgatcgtgtgggtgtgcctgcgaaataagaggtactgtgggtctcacggttcggcagtgcgcgtggggctcgtccctacaaaattaattatgtaacataaataaaatcaagaaatatatttaccaaaaaagaaagtaaataaaagatgttaaaacgaaatgtcgtacatttataattaagagtgttattctcctgaagactatactgtacaagtaataattagtagcaatgccatgctgctcaataaatatcaaaggaaaggacaaactaaaaccattataatgtctacgatagtgagtgcaaattgaggaatagagtcgtaaataatgatatattttgtgctttttctattgttatttttacctttttgattttcagaattaaatgattttagatatacaaaaaattaagaatcataatgatggttgcgttaatgagtagtggcgtgagggttgtcatgtcagctaaacagcagaaaaataaaagaatgtgggagacaggctttgcccttttacacatttttaagctctcttctttattttctaaaaacactatagtacacagttaaaaatttgcgggccctttgtttaatcgatttagatttaaccaacagcttcatagtcgtttcttcttgttagaaatcaataaatgaaaagttggttgttttgaaagcatataattaactaacaatgtatcatgttgtgaaacaaaagctgatgataaatgttaaatatagtgtccaaaattttgggaatgtcttcaaattttgattttaaaacatatgagatgtaccaacatccacaaaatgtttgtgaagttgtgacttagtgagacgttgtcactttattatctcgttttggtaacggtaagtgcatgtgaacgtgtttgattataagtttaacccgactttgtttacgtggtcatagtttccaataaggctaagtagaatagtgtatgatagttttcaattcaagagtcttttttttccaagaaaatccgaaaacacaatcgtttattttaatatctcaaaagaaatcatatttcttaggtaaaactatcatacgttgagtttttctttctccttttgcgattttccctgaaatatatttatgttgtgtgtgtgctttgtaaacaaaataataatgaacgtaataatagtaaaacaaaaagtaacctatattattatcatacttgatataacccaatagagaaataataatataaattaaaattttatttcccaattcaaaaatcataatcaaggagtgaatgctgccagtagaccaaagtaacaatatttggtgtgtacatcaaatgataggaaacaacaaaaactcattaatatacctaaatccatatatatatatatatatatatatttcaatatttcacattgttataattaggtttaatagataccatattagaaatctcagtatggtggttcccacaagcaaagaggggaatgagattgctatctacctatatttatatctccgcaacttcactcttttcctcaatcaacacacacaaacacacacacacacagcctttttccttcgttgatcgattgttaagctcgatccaatggcggataacaccgataatcggagatccttatggggagttccggagaagcttcagcttcacatagcgatgctgacgttgcaattcggttacgccggattccacgtggtgtctcgagctgctcttaacatgggaatcagcaaactcgtcttccctgtttatcgtaacatcatcgccttgcttcttctccttcccttcgcttacttccttgaaaagtaaccttctattttcacttcacttctttatttgaaaaccctattttttctctagttgctagttatttaattaccaaacttaattgtgttaatttaggaaggagagaccagcgattactctcaactttctcatccagttcttctttttggcactcatagggtatatatttatatccttcactctgatcttttcaataacaaatttggataattagttaatgaattattacacgacagaataacagcgaaccaaggattttacttgttgggactggacaacacttcaccaacatttgcttcctccatgcaaaactctgttcccgccattacctttctcatggctgctcttctcaggcacttactctacacatctctccattttcattctcttttgatttataaaaataaataacaatattttggacagcttggatatacaagaaccactttaataatgtccatttgacttttcaacgtaaaagaaacggataataatacacgtagacaatatttaatgccgtttccatttgcttacaaaatagtgataatcatagtagtaacaacaatgtaacatactgtttatgtactgtatgtgaaaaaaacaataattcaggattgagaaagtaagaataaacagaagagacggtatctccaaaatcttaggaacagctctttgtgtcgccggagcttccgtcatcaccctctataaaggtccaaccatctacactccggctagccacctccacgctcatctactcaccacaaactccgccgtcttagcgccgctaggaaacgccgcgcctaaaaactggacccttggttgcatctacctaatcggtcactgtctctcgtggtcaggctggcttgttttccaagctccggttcttaagtcttatccagcgaggctctcggttacgtcttacacttgtttcttcggaatcattcagttcttgatcattgctgctttctgtgaaagagattctcaggcttgggtttttcactccggttgggagcttttcaccatcctctacgccgttagtttttctttcatctgttataattaattcgtttttggccctaatgtttcaaaataatcaatttggtcctaatgaattgatttaacttcagggaatcgtagcgtctggaatcgcgtttgcggttcagatttggtgtattgacagagggggtccagtcttcgttgctgtttaccagcctgttcagactcttgtcgttgcgatcatggcttctattgcgttaggcgaagaattttatttgggcgggtatgaaactataataatattagtggtttatataaatacttgataaaatccaaggtcctaaacaagaataattttaaaatttgttgtgccacatgtcatatttctaatggcaggattattggagcggtcttgatcatagcgggactttacttcgtattgtacggtaagagcgaagagaggaaatttgcagcgcttgagaaggcagcgatccagtcctccgcggagcatggtattgaacgtgcacctgtttctcgcaactccatcaagtcgtccatcacaacaccactactccatcagtcaacggacaatgtttgactactttggacaaatcactctccagctaataattacaaatgccattacccaattaaaagggaacaatggtgtgccgttgtgttttatgacttttgtgtctgctttttttcttagtgttttctcttcttttttttttctaaaaaattattaattacctaagaaaggtttttgaagaaaggaaaaaaaatggtggatgagacatcattgttcatgaggatgatgatgatgatgatagtgatgaagaagactatgtgggagctttggattgagacttttctatatataatatctggctgatatattagtgccattttttcttacatttcttgtggggtttttctttcctttatcatcaatagaatgttataatttgcatttatgatctttagtaattatcactgtcggggatgtttaaaatggattagatcaaacgctttgttctgaactgaagtaaaaaaagatctttagtatttgattaaaatgatctcttaaagaaacagtttttttttacaaatttagtttattatcaaatatccaataaaaattcttaaccgaatgaacaagttaaaaataaaccaacatttaatatatataatataatatggaccaactaagttatagtatggaccaattcttgagttgaaagtccatagattttaacatggtattaaagtttagctaacttgagaaagatgtgttgttcgatatataatttttggtccaatattagaattttgtttgaaatagacggataaaagcattattttaaggagaacgtgttaaaaatttcacatatacacttcaatgctctacattatctttcttggttttctcggatcagcttacacgtcagctttttacatataaaatatcatcttttaatttgatgtaaacaagaagttcattaacagaatttcatatcttatttaccttatacaaataaatttcattaacaaaagaaattcatatacataaggaaaaacacagtgcataagcgactttgtctcataatcgttatctggcataggttagtctaccatgtggattcaagatttcgtatttgaatccattagttaaatcatatatagcccgttattggagactggagaccatatataagccgagatataatgatgttgggccggaataaacgggccaggtttgttataaaccacgccatatagtctatcaagactcgcgaggattacacgttagtacaaagagaagctaagaagaagatgcaaagaaaaccaagagaatagtcaaagacttaaaagcccatagaaacagagacatataatagttacacattgaccgttacacacaacgtaacatcccgttttctttatacagatacattgcacttgatttaatagttttccccatgacacatttttagcttcgagacaaacaactgtcgtttttatgttttttttgatatggtaagaatctgctttcacactatacagacaaaccacatatatagatgtgcacatatataagtacatgtaactggtgtttatttacatatatatcctagttcacggtgactatatttgtatatatatgtagtttgtatatgataacttaacaattaaagagagtctagtgacacctcaaagtggggaatgaaaggaatcccaattagaatagccaccggaaatacaagtatcaaaccgagaaatatcattatctccttcatgaacccatggaaatcctaacgacattgtagcttcttcccatattgaagaatcatccattaccggcaaatccacgtttatatgctcccatgatatctcctctgtcactcttccacatgatgacatctcgttggatgaacacggcgactcagagtcgctgctgctttttccaccggtgttgctgcttggtgtagtctgggacgccggagacgacgccgttttagggtaacttcttaaggactcagggaggttgagatgagcctcaggcccatagagcttacgagctgcggagtcataagccaaggcagcttcacgggaggtgtcgaaggtaccgagccaaagacgagctcctcggttaggctcgcggatctcagcgacccatttgccccaagtgcgttgtctaacacctttgtaagtgcaagacgcgttatcgggtccaccttttcctctcatacaacctttcctcgaactagcttggacggttcgttgtttcttattagcaccaaccatcattacttttggctctatggatgacatgtacggatgttgataactcgaaagtgatattatgtgacgacttttggtgagtgataaggcaaagacatgaggtaatggttaggtgtgtatatatactagaagagagtgatgaaacgtggcgaggagaagatatagctggcgcagacatgacggagggtcgtgtcgagaggaggaagctggtgttgtgtttgtaatcctaacacttgtctcgagagacccttctttttttggcaacagtaatcgtaaaaccagcagagagattgatgagtttgagatttttccaaaaaaaaaaagaaaagagagagagagatatggataaggtcatccgcgattggggaaatataaaaagatttatcactatgaattaatggctcgtcatgtgaatgcttctatctaatatcaagctatggctttattcatcagaaaacaaaatcaagctatggctttaacttaattataatttcaaatagctaaaaagaaagaaaaaaatacatgatttttcttatatatacaaacttttttaattaaaaagcctttagatttataaagcttttctctatgagtcatgtaatctctccttttgtaaaaaaagaatcatcatctaatgcataaacattgagaaagaattgtagttttttttttaattcgttcatagagtcaccattttctttcttgatgttatccatttctccaggctttttaattgccacgtgggaaattatagcaaagtacaagtatgaatgtgtgtaagggtcagtcatgtggcggcaatatgtccacgcaaattaaacgtacgggacccgaaggttcctcgataagagacaaacaaagttcactgaatcttacttctctgtcttagaacatttgtggccgagacacacgtgaaaaggcggcctttttaaccgataactacaaagctccggttccaatttatctaacttattttttgttctaaatattatctctagtattctcagatagaactttttaaaaatttgaagtcgttcaatgtcaagtagattattatggaaattgcaaaacataatttaccaaatcaatgtaattgcaactaaaatccattaatttgttttggatttttttttttttgaaaaaataaatttagcaagagaaatgaagatgatttatgtagatcgagaaaatagtgagatacttagtatgaattatcttgttcgattgggaatttgttatgatggatttgactccgatgtctgcttatataactttaacatatccacaatataaaaaatgttgaagatatgcaattaaacttatatttctagtactatattctgtgttgacagctaaaaaaacaaagctcttaatgcactaaattaattctctgtagaaaaatgcatttgaatggggatcatctgcgattccacactctgaggatgcaatccaggtgacacagcatgctgctagttatttagtcaggtaagaatgtaagatcaccctcatcaacgttttcacagttttcccaacaacattttttgttttctcaatggattgcggttgaatgtggtgcagtgaagctaggacgtcactgaacagacaccatctaagaaagtgctgagcaatctcatatacaactataagcctacttactacgcagggtaaagccactaaggacagtctttgcacaattctcttgtttttcgttgttgacaatgatgtcctttaacgatgtctttggatcatacaatcttgcaggaggggtttcgacgaggtttacatttttacacaaccaagatcccgtttctaagaagtttactcgttactcgtcgtcgtgtgtgtttgttttgtaactctgatttacatttagggagcctgcatgatttcccttgttgaatttatctttttggaattagatcatttcaaaagatacaactgtgtttgattcgtctttctagcaaataacttctgacttttgagattggttaccaaaacggcaaaaccgaagctttgtaaatgagtaatattaacgaagtttttattgcattgaaatttaacaatcacttagattatttgaaaatggtttttatttgaacttttcaaataccattttcataatcaaaaatataaagtaaagaaaaaaagtttacataataaaaatttttgtaacaaaaaccataaaagttaatgtaagagttaattttataacggactttcaggatgagacgtgatacttagttcagtttgttttcaattcattaaaattcaacatttagaaattttgaaaaccaaaatattttatgtaataaaaacttttacataatataaaatataattaaaaaataagttacataataaaaatattctaacaaaaatcataaaattaatctaagggttaaaaatttgattacgtgaaaagcggttgaactaataagacctcttacgacccatagaaacggacgagatgatgcttagtcaggtttgttttcaatgtattgaaattcaacattaaaccaaaatatttatagaataaaaactttagtgattaaaagtttttttttgtagacaaaacattttcataataaaaaatagaattaaaaaaaataagtttacataataaaaatatttgtaataaaaacaataaaaattaatctaaaggttaaatttacttgcataaaaagcggttgaactaataacacctcttaaggacccgttggatgggacgggatgcttagtccgatttgttttcaatgcattgaaattcaacacttagattttttgaaaaccaaaataatttatataaaaaaaactttagttgaaaaataagtttacataataaaactatttgtaaaaaccattaaaaataatctaagagataaatttacttgcgtaaaaaacggttgaactaataacacctcttacggacccgtataatgggacgggatgcttagtccgttttgttttcaatgcatttaaattcaacacttaaatttttgaataattaaaatattttttataataaaaactttagttaaaatttaaaaacatttttataatcaaaaatataataaaaaaataagtttacataataaaaatatttgtaacaaaaactgtaaaaattaatctaaggattaaatttacttgcgtgaaaggcggttggactaataacacctcttacggacccgtaagatgggacgggatgctcaatccggttgttttcaatgcattgaaatttaacacttacactttttaaaaccaaaatattttctacagtaaaatgttcaattaaaataaaataaaataaactttttctgacaaaaaaagaagagaaaaataaaaaaattgaggtaaaaaagataaaaaatcaagaggctaaatcactaaattccaaaatgatgaacaaaaataacattcgcctaaaggacataccagtaaacgaaacagtaggcaagaggctaaatccctaaattccaaattccaaattccaaatccctaaattttaaaattccaaaatttcaaatccctaaattccaaacaagaagctaaatccctatgttccaaattgatgaacaataacattcgcctaaaagacataacagtgaacgaaacagcagacaagtacatgatgaatttgcgtaaggatagaaagttataccaatttacgatcgagatcgaagcattctcgtgttatcaaacagtcacaagaaccctatacatgaagaacaaaaaaggatactaagtcccagcgatcaaaatcaaatctcaaaatcaatttaaagtaagaaatatctcttaccatagacataaaattaaaggatcaaggagaatcttcgtccttacttgcttgaatccgagaagaatcactccctgcgagtctgtgacacgcaaaaatcagaaaaacagagtcacacgacaatgaaaagagaatcgatgaaccctagaagaccctaatatatacaattacaaatcatggataacataatgaaacagaaatagataaaaataaaagagagagagaacgactacaactaagtaacctgatcgtagatagatgactctctcaggttgagattggtgatcctttagtcgatcggaatcataagtgtaatgaaagaattagagagaatgaagaagacggacaacaagtttaaaagattgtagtttgcagttaaagttaatcttaatctgggggagaaactctcgtctccgcataaataacaggagcgtgggaaaaaaaaaggaaatcactataacggctacttatgaaaaaaatggaaattaataataggaaccgactttaatttcataaagacgcttttgcccttccatcgttgacgtcattgtttcttcttcttctctcctccatttgaaaacgcaaacttggaaagggaaactggtttgttctcagatagtgaagacatatatctctagtatactctctcagatagaacttttaaaaaatttgaagtcgttcaacgtcaaatagattattatggaaattgcaaaacataatttaccaaatcaatgtaattgcaactaaaatccattaaattttttttttagcaagagaataatgtaattgtagataacaaaagaaagtcaaagctgctgttataatcaacgttgtaacagatgattaaaaaacaatcaacaagattctgaatgtcttggaaaaagtcgttattagccacaaacatttcatgaaattgttatgagaaagaatttaattaagattttttttttcaagaaaaatccaaatttcaaaatttgattagcttgtggattggtcatcatcgtcgctcttctctttgtgaataatatagatataacacgagacgctaagagcagctgcgcctaaggcgattcctctgaagacatcgaaatgatcgtgcgtgttatataaaaaagccactagaagcgacacgatcggccacgtacagacactgatcacgttcgagaacacggcggagacagcgaacactagccccacgatcccgacccagtagatctgccatgcaacggcttgacccaccatagtcctcacgtaggcaatatctcccttcgtgaacgtttccatctctttcttcatatcgtgatgttcaccagagattaaaacggctgcgactaagatgatggttacgacgagagacaagaagatgatcatctcgagaacgacaacgaaactgggttgttttctgttggtggatgtgttgcagaaagagataagttcctcgaacaccttcctgataatgcagaggagcaaggagaaaaagatggcagcgccgaaagccacattaataattccatagccgtaggatttcttcccgtagatgggtgacccggcggagaaagtgtagagagtgaaagcgccggcgaggacggctaagatgagagagataaacgtccatctattaaatttgatatcgttgtaatacttggagaaaatcagggtgaataatagctgcgtcgtgtaagtgagagtgaaaactctatagggtatctggtttctaacgtcggagaaaaatgcttgacaaaacatgtagatgcagagaatagagtaagttatggctaagtgcttgagggaggtttcaccggagaaaatgagaagttgtttctgtttcttgatgaggaagtggagaaggaaagggagaaggaggatggggaatccgacgacttggagaagtgtttgagtcaagataccgcggcggcggctcaggtttttgtggaggaagtaatagttctcgaggagtctagcgatgcattgacctgttacggccaagatggtgcatatgatgatggtaacccactggttacgtctctgattcgagtcacttgttaggctgatcggtgtggttaggcggtgctcgatatccagggctatttgcacaaagtgttctgtaaaggaaaacaatattatgattggcataccaatatatatatgtgacaagggaatataatgagacagaacataggcctaccttgtggatttgacgactgcattggttgattatgtcccatcatatttcttgagttctgggaatctaggaaactggcgtttgtgtgtttatagccaaacgcaatgggtctgagggtggactttgacggagtaagggttttgcctagttgagcaaatgggttttagttacttatatgcagacatattcctagaagtaaaagaccaagtacagattaaatgactttgtcatttgacactagataataaagaaaaagacaagcatcatactgcttttgcttgttctatttttttttatagaagtagtcaacttccaaagttttggaattccaggaaggcaagcaatttttttatggcaaaggaaacaactcgtgtacataagttttgaatgccaaattatattcaccaaaaaacctttgttaattacacaagatgctttgaagaaaaacagaacatggagccgtaaaaacagagtttgtaacagaaatcatcttcttgtcgcgaacacttgttaattcttatagcagaaaagttcgaaaatatatgtttggtgtagcaatttgaatcgatagagactatcttgactcgaaacaccaccagagtcactctgctaaaccctaaacctcgcagtgaaccatggacgaggctccatgatctcataattagacgacactcgatggcatagacataacgcggttattcataccagaaccagatgatcaaactagcgccgaatgactcgacagacacacagaggcaggcaatccacagcccaagcagtttatttggtaagtttccacttggttctagaggtcgaaaacgctcactagaatctacaccaaagataattaaaccagtaccatagttgcaacgaaactgatacaagtaccataagtctatagtatgtagataaagcaaccaacactacttagtctctatatgagtcgtagcagttttgacattccctggtttagtgaacatctctctctattaggaattgttgacatagcagattctctaggtttccactttggaagctaactcaagtaaaccacaacatttttgtgatcaattcagctataaatcctataaaaaccttcaaaacatatactaataccaccaaaatcaccgtattacaaaggcaattacactttcacaactttgcaggttttcataagtttcgtatattcaattactgacaaagctcaatataccaaacgcttagagagagaagaggttcagaaattctatgtaccagtaaaagtagaatacacactaagatgatgaaggaaacacatctttaacagcagaagctgcagtcaaataattaagtgtattcctcaaagtctctctttctctttttaacctagctgccgtatcttcaagctcaagcaacgcttgctgctctctaggagctccttcaaacgtacttccgacgaagaacgaaaacggcgtcggaaactgattcctcctcagatcttgaacttctttctcagccttaccattcaatctattcgataacctaatcacttctttcattagaacttcgacttcattagctaacgaatcaagattttcttcaccggaaggacgatcttcaagccacgtgacttctccgacaaggtagggtttcgtacgaacgacattcgtgactcggaatcgttcttgacctttgcagactagaaagaatcgatcatcgacgagacgctcgtgtttcacgacttctcctacacatcctacttctgcggcggagccagagacggaatcggagtaaactacgccgaatcgtagatcagattggaggagcgtgtgcatcatgatacggtaacggaattcgaagatctgaagaggaaggattgctccggggaagagaacgagtgggagtggaaacagaggaagctcgacgatatcatcggattttggagatttcgcgttgtgatgcttctcggagaatgaagaagatgaacatcggaaggaactgttgagtttacaacgccggcgattatcaaccgtcggtgataaagatctaagggagtgaaacggtggtttggatttgaaggaaggagataatgaagttgaagaaggtgaagagactacgtgtggaagcgccattacaggggaagagacgaagtaatcagagaatacaaaaaagagggtttattacattatttgaatatttcttttgccttttggtgggtttaaagaaaaaaaaattaaggatatgataattgacatgtcattataacagatatttgagtgatttgtatttttgttgtgtggataataaacgagaggagaggaagaagaagtggatgtgattctgaatatcccacgagtgagagactttatattatccatctacaaaattcttgtaatgccacgtgctctttagattagggattactgactaagaaggaattagtgacgcattttctagatgagaattctagagagaataaaaatgtgtagaagttagttggaagagcatttgaatggtgataggtgtgggttgatttatgacattttcccctaacttatttctccaatctccaaccaattatgtaccaaaaaatcatcattaaaccggttagtataagctttgtgcttgtggtaacttcatttcagggttgtgtaattgttgatttgtcaatttttttggtcaactcaaatattttcttggtttaagagatgcagtagaataagggcccataaagaagagtccaactcatctacccaactaattttattcttgtgataagggaaaagggaaactaattttttgtttacacataaagatttaaacgaataaggcccacaaataagcccattgtgaaaaatggcccattttatatgaataagggtttgtactttgtatcataaaaaatttgaaccttaatttgctgaaacaaacttacaagatctccacacttggagccaaatgagcgcgagttcgtttcataagctaagagtagatctgaaaaagacattacaaagacaaaaagaaaaacaatatattttcacaaattaaattgaaagggaaataaaaatgagaaccactaatcaaatatcaacgggagattaggaggccaatgatagaagtgtagtaggataaagacgagtccaaggcacgtgggctttggaatcgtttgtctatgttgcgacaaaaccattcttttttttgctaagaacaaaacaaaatcattcttatgcaaatccaattgacattaatttacagaaacaaaaccaataatcgcttgcgtagaacgcaacagtagtttcatctcaatgtattggccgataaatttcaaaataatatgtttgtttagagtttggaaccaaccatatgccatgtttttgtcgtcccatatatatgttttagtttttaatattagtttgacgatcagacttttttgtataaaattagtcttggtacatatattaggtgtttacatatttatttgtttggctggatataagaaacaaatatttagatgacagaaaaaatgtgatgggtatcccacaaaaaagcaccataataaaagttcacattacactcattatttttcaaagactttcgagatttccggagaatgattggccaaaatgtgatgtcgattgaggctttaggttttagctttggtccaaaactttgaatttatcaattgggtacattccaaagtctcagttctcgtcgacaatgaaaagggaaaaccaaaaagaacaaaataataatagtatttatgttttcttagaaaagattgctataaaatagaataacacaatgtcccttcacgatgattgatgacagtaacacgatcaaagcttcagagaatcttatatagttttcacattcataaaacaaaagtaacaaacaaatttattcttacaactatactattcttacagatgattctatatattattgaccaaattaagaattcttggttcaaactaagtatttaaatatattatgctcaagagttgaagtagaagttttccaattcattgaaaattctctaggttttaaattttattatttgttttttttctttcaaaaacatgcatatgcggatttaaatttggatggtgacacaaagccggcactaacaccaatagaccttttattttagttttaatattacaaatgttttgttgtagatataaaacacataacgatatgtattttaatccgttagttagtattctattgataacttattttcagtaattcatgtgatctactgcttcaatattgtatattgattcattctacgattaagagctaaaagacttgaataaatggtctatgaaaaaaacgtacatctcggtaaagcaatatatacatctcgttttagtccaactgattcgctaagatatctagaaaaatgtaaaaagttacttccattcaaagcttaatcaatgagactatatggtgttaatgtgtatagggtaaatcatgtatgtaaaatggtaagtctcgtctcttctattatttcaaagggtcaaaaatataatgccaaatttgtggagagtatagtgaaagttgtggctgcacacggtaaccatttttaggcagacatagtgaagatctcgaatcaaatccctttggctccgtatcttcaatgtcccaatcaaatttctttctttcatctttaccttacatttattatttcacatgtaccatatatagtccatatattattataattacgagttataagttacgtacaggtaatgtttaacgtacaaaagaacgttaataacttagtcttaacttatgcagttatgcttaatcttatactgctggaaaaaatatatatatatagaaaaagtaatcttaactaacactgtccgaccaagaattggaaaggtatcatgtgtgggtaattatgtgtcaatggttcaatattttatgggttttacaaaatattcaaaataaaatattaagtattttaaaatttaatttacatctgaaatgatttatttaataaaatatttttgaaagctttgttcatattttattaacataaaaacctagaataatactctgttttctagaaatagcacaattttattcaaaaacatgtattatgaaaatattaatttaaggttggcgaaaacactatatatatatatatatatatatagattaatttaagggattatacaacgatgaaactagccccaaaaactgtttattcgttcgcattatccataagatgcaagtagactacaagtgatggtcaaataccacaatttgtttagaagctattctaattttttaggaaaatttcatactttggacatcacttaaatattaaaactttgtatatcaagtgatgtccacaatatgattcattccgtatggtttatatggatgtctttcgaaaatcatgagatggtcttttgtgactagcaaaagtttatcaccaaaaattgttactcgtgttaaattatctttcatttggatcaaacttgaggtgtataatgtttatcacataaacgtgccatgaatccgaaatttgaaccgtacgtagtaattaagtccttaaaacgtctgcatttttcaatcgccaaagcattgtagatctggcatatgctatagaaatatgatacacagaatctaattaaataaattaaaatgtctctcttttttttcttttttttgtaaaacaataacaaaagaaaagttgagctgtaaatgagcatgaaaaaaagaaaaaaaaaaagtgttgggaactcatatcactaagttgctctgtcgctctcactttttcaaaagtcttaacgaatctcttttacttctaaaacatctccacttctctctttcacgtgacactaattatccacccatatatgatatattactttcataattaagtacctttttaaaaatttattttatctacgtatctgttatgtatacgtatcttcatctatgatatatatacgtgtgtaattcagagtctgatcatagggtcgcgaataagaaattaaaaattttcatttctagtgcactaaaatttaccaaatgatattatatggtttagtggaacaaaaccattctttttttctagttttgtaatttgcacccaaaaaaaagtcaggtgttttactcattggtcagtttaatattccattattcggcgtaatatatatgttttatttaacaaatagtcaaatagtaaccattgcatatatccaacattgatcagacatcgacggacgatattggcttgcttgttcacacgagattaaggatttggatattttttcccaaattaacggagattgaaaaatgcatgcgttttagagttgagattggaacggagagaagtgagattgagaagggattagggattgggaatttttttcccaaattaaaactttcgatttcctcaattttaatgacttttttcaccgtgtcacataagatttaaaagaaagcatactcaagaaaacatgtcattatataatggaccaagacaatacaatagcttggagagcaatcatgtatataaaagaaagacccacataaccccttttttcttaggaacactaataagtcattaactttataggaaacctaacttgaacatgtaatctaagagaaaaaatattcagtgatggcgaataatatcttgaccaaaatgatcagatatacaaaataattagaattaaatcatgtatgggacactttttgcatgggaaaggtggatatgtttggttcatgaccaaaaaaactcgcaagtgacagttgtgtgtaaggtccactaatcaacttaaactcgacattacaacatactgtccattcaaatattataacgaattataataaatatatgcacaaaattttcctaaccacttatatggctgagagactgattcgaaaaagatggtttcgaactcaaaaaggaacccacgatatgccatgataaagttatacatactcatttcaaaccaaaggaataattaaataagttgcatcaaaagattgacgaggcagagtctttagactttagagcaaaagtgtttaaagtaattgatggtgttcttcgtttttcagaaaagatttatttttcttataatagttcatttggtctaacacgtaagaggtgagaatgagaccgactttcttatcgtcgccgtttgatttgcttagaaattgtagagtcaattttagaaaaaatgcagttttaaagtacgaataaaaattaaatttacatgaacaaaaaatacttccatgattcttacgtcaaacgaaacttgaatcttagatggtgacttaccatatcataagtggagactattgatgttaaaaagattgtggaaaaaacaagaaaaaaaaaagaggattaatcttgcttgattaggaccttttgtgttaaagaaaataataattgacatttgaaatctaaaaattaaatcggacaatagatagatataagaaaaaagagagtcgtgtaaagatcatgtaaccaataatcgaaaacttaattatgaacaagaaagaatattttacatgttgtacttccaggaattatatatatacataaatttttcagagaatgatatttagaaagaaaaaaaaaaatttaaactaacgaagagtatataggaaaggaaggaaggaagtaaacgatgggcatgtgaaaaagagaagagtagtgttaggtcgatgtccactgtttttaacgtatgatgatctctttgttaggttatctccaccacttcgtcctcatttttcttgcttgactacgacctctagctcctttattttctcttttattaagctctctctcatatctccatcatacaactctatttcttaaaaaagtttgtatacatgcatttgtaattatttatttccgtaaacgagagaagtcctggttttagctcgtacgttcctttactagtagtggatcttttatatatgaatttttagacgttctttttactagttaaatgttatgtttccactttccaattttgtaaaataaataattaatctttttactagttaaaatgttatgtttccactttccagttttgtaacataaagtattaataaatgcaaaataaatccaaaattttgctttgtatgcatttttacgtttaagtttgtgatttccaaatcatatttgattaaaccatactaaacttatattttgaaaaaagagtatgatctataaacccaatcacaaaccaaaacaaaagaaaggttaattcttcttaaatttttttttttttgggcaaacttcttaagtatttttcataagttaaaaatagtgagttagatataaaaaaaaatagccaacaacaattatctgtttaacaaaaaaaaaaaaaaacgaaaaacaacaattatctgcattttggtgtatatcttaggaatgctgatcaatcttaggaacaaggctgtcgtaatttaacaaaaacaaaatgtctattacaggtaatattttaataggtttttgccaaaaaaaaaagaaaagtggtaatattgtaatatgcataaatcaatgagcttgacaagggaatattgtttacaaaagagcgttggatttggtccgattcgtagagtaatttatacattattgatgaagaccaatagaattttcatggaaatgcgtaataatgtggctgtctcctcttttgaggtaaggatttactaattgtttttcaactctttatctctccattacacaaaaaaccactatcgctatattacactacatatatatggttggattttgtcaacgatttagacaaattttacatttaaacgtcgatgtacgatcatgaaaaacgttactaggctgataaaatgtgcgttctaaacatagatgtacaatccgtttcaccaacaaaaaaaaacatagatgtacaatcatgaattatcctctttctcagtttctctgtaggtcagaataaaagtaaagataaacagccatatatatgaatatgattttaaaattaatacaatatggaactatggaccctattttaaaacattataaattgtagaagggtattttgttctccttcgtgcagacatatactgtgccattgtcacttcatatatttcattttggaatatatatcaaagatataaacattgtattgctgttttattcgaagtcatatcaccgaattagtatgtgttatgttttggatttgctatggataagtaatgatccaaagcccttaaaatcatgatgtgtatttatatattacttatcattaatatataaatccaagtcatgcagttatttattttccaacactagacataattattcccaagcatatgagtataaaacagttggattgattctgatatgaggtgtgttatcacttatcactctttaattattaaatcagatggtttataacatatatttataaatattgaagataacaatgatattattgacataatttactatgctgcaactttaattttaattcattttaaaacacaaatattggctgatcttttttattctattcatcggctcacttttttttttttttttttttttttttgtcaaacattcatcggctcactaatttacaaacaaacacattttttgaaacatactggcccccacacgcgtcctcttctggttatatcgctatcattacattttcacaaatttcaatatggatattgttcataaagaaaatagaaagaaaaaaactagaattgacccaattgaatacaaaatatagtacatccgtttcacgaaaacacactgtatataatatgcagattacatgtggcaaggagtaatattgttggctgattcactctaatgtcatttttgataaaggtgtctcgcagtaatgtcgcttagtaatgctagctattttgggataattatatgttatgaagaaagcatatactaatctcatcatcagtggccaaattttaatcttacgtctatataaacttatttataccactaagaacaccaagacgtaggtttcatgctcaagtggcaatatctgattatttaagtactttttttgtttaaaattaaaaactgatcggattttcgcagttttttagtcattgtttataagaatttcaagtccaactggttagggctgtagacttgtaggttttcctttttttttttttttcttattgtcgagaaaacctatagagtctaaagatttcagatttcagatttcacatcgacaaagagcaaattatgaagaaagaaaaaatgcttgtagaaccaaccggcatagtttttttgatttagttaaatttatacgactcagcaacgcaaatagaaaaagtttaaaaattgatattgaccattatatattatataagacacaaatccgcaaaaagaaatcaaaacatgagaacaagatgacaataatgagatatgaaaatttggtaaaacgtaccgatctctattatcgtgcaaaggtattaatgtttggattagcatcaaatagataccaacttgctcttcactcttcttatagaaaaatatggtaccatatcgacccaccaaactaatcatcatcgaatctagctaggcgttaggattgcacattactcagaaatccaaaatataataagtaatttaacgaatttatataaataataaccacgtacggagtcaaattttgttaaaccaattttttgacttcacctattacatatcattcgtagaatcatatcttcgtaagtacaaaaaataaatagggagtttttgatttgagactgaaaataaattaaattttgttaactaaaaattataaaattaatctgtcgatgaagccaaagagagaatctaccgactgcaaaatactgcataagaagaatctaaaaaataaaaataatctttttttttttttgtttgaatggttttttatttaaaaaaaaaaaaacaatccattttgagtttgtgttattaccgtgcaagtcaccacgtgaactcacttcttcatctcaggagagaaaagggcccactatgattctccgtatccaaatgtggaccctgctctttcactacacacgtgtgacctcatcctctcccacgtgaatatccacgtggcgttcttccgttccgtttctcccatccctcccatgcctctccccatgactctatttatcccaatcctctcttcctttcattaatttatcagttaaaattcctcttttttcctagtagtatttggagttttcatatcaaaaagtttagactaaccctaaaaacattgatagaaaaacttatcattttaaacgttcttggggaccaatcaaaatggttaattgtctagtgcctgttcttgattcttcagacatggttgcaaaagtccatagtcaaatcaaggttatatgtagcttcaacactgataacacgtttattaacaaaaccatatcaaaatggttgttttttgcattttcagtcttgacgtatacactgccatttttgaattagtcaaatcgttacgtagttggtctacgatgtctcgctgaaacaaatacatacgtgtgtatatacactatgcaagtagtatagttaacatcataattgaccctaaggaaaaaagttaatgtaaacagtgacacgtagatatcacacggttcttttttggtttttgttaaagatgaacttgttaataaagaatatgacgtgatcttctccggtacaactctttgtcctataaatagagaactcttgtcttcatattctcgacacacacatataaacgcacaaactcgttaaatttgtacgaatataattttttttaaaacactcgttataatatattaaagtttcacccaaaccgaaaaaagagagaatctgtgcatgttgctcagaaaatcttcaaagcgtaatctgggcttacgttagctctcacgaacccccaaggatcttctatatatgttttttcatttccccataaaatctttcattatctaaaaaatattattatcgtatcttttttcttctatatattcttcctcctcaatcttgattcttgtttcttgagtattctttgatgaatcgtgaaatgacgtcaagctttcttctcctgacgttcgccatatgtaaactgatcatagccgtgggtctaaacgtgggccccagtgagctcctccgcatcggagccatagatgtcgacggccacttcaccgtccacccttccgacttagcctccgtctcctcagacttcggtatgctgaagtcacctgaagagccattggccgtgcttcatccatcatcggccgaagacgtggcacgactcgtcagaacagcttacggttcagccacggcgtttccggtctcagcccgaggccacggccattccataaacggacaagccgcggcggggaggaacggtgtggtggttgaaatgaaccacggcgtaaccgggacgcccaagccactcgtccgaccggatgaaatgtatgtggatgtatggggtggagagttatgggtcgatgtgttgaagaaaacgttggagcatggcttagcaccaaaatcatggacggattacttgtatctaaccgttggaggtacactctccaatgcaggaatcagtggtcaagcttttcaccatggtcctcaaattagtaacgtccttgagctcgacgttgtaactggttagtattaaaacattcaagttcatatattttaaatgcttttgtctgaagttttactaataacaagaaattgataccaaaaagtagggaaaggagaggtgatgagatgctcagaagaagagaacacaaggctattccatggagttcttggtggattaggtcaatttgggatcatcactcgagcacgaatctctctcgaaccagctccccaaagggtaatatttttttaatgactagctatcaaaaatccctggcgggtccatacgttgtaatctttttagtttttactgttgatggtattttttatatattttggataataaaaccctaaaatggtatattgtgatgacaggtgagatggatacgggtattgtattcgagcttcaaagtgtttacggaggaccaagagtacttaatctcaatgcatggtcaattaaagtttgattacgtggaaggttttgtgattgtggacgaaggactcgtcaacaattggagatcttctttcttctctccacgtaaccccgtcaagatctcctctgttagttccaacggctctgttttgtattgccttgagatcaccaagaactaccacgactccgactccgaaatcgttgatcaggtcactttcattattcacttagaaaaaagcgatattttcattttttatattgatgaatatctggaaggatttaacgctatgcgactattgggaaatcattatgaaaaaatatttagtttatatgattgaaagtggtctccatagtatttttgttgtgtcgactttattataacttaaatttggaagaggacatgaagaagaagccagagaggatctacagagatctagcttttccacctgaacttaataatgcacatttatataattatttttcttcttctaaagtttagtttatcactagcgaattaatcatggttactaattaagtagtggacagggtcatggaccactcactcaccaaataatgattcctctttactcttaagtttaattttaataaaaccaactctactggaatcttaacttatccttggttttggtaggcttttatagcaacacggtttttttaattttcctattccagattttgtatattaaatgtcgattttttttctttttgtttcaggaagttgagattctgatgaagaaattgaatttcataccgacatcggtctttacaacggatttacaatatgtggactttctcgaccgggtacacaaggccgaattgaagctccggtccaagaatttatgggaggttccacacccatggctcaacctcttcgtgccaaaatcaagaatctctgacttcgataaaggcgttttcaagggcattttgggaaataaaacaagtggccctattcttatctaccccatgaacaaagacaagtaagtcttgacattaccattgattactacttctaaatttcttctctagaaaaaagaataaaacgagttttgcattgcatgcatgcaaagttacacttgtggggattaattagtggtccaagaaaaaaagtttgtcaaaattgaaaaaaactagacacgtggtacatgggattgtccgaaaaacgttgtccacatgtgcatcgaaccagctaagattgacaacaacacttcgtcggctcgtatttctctttttgttttgtgaccaaatccgatggtccagattgggtttatttgtttttaagttcctagaactcatggtgggtgggtcccaatcagattctcctagaccaaaccgatctcaacgaaccctccgcacatcattgattattacattaatatagatattgtcgttgctgacgtgtcgtaatttgatgttattgtcagatgggacgagaggagctcagccgtgacgccggatgaggaagttttctatctggtggctctattgagatcagctttaacggacggtgaagagacacagaagctagagtatctgaaagatcagaaccgtcggatcttggagttctgtgaacaagccaagatcaatgtgaagcagtatcttcctcaccacgcaacacaggaagagtgggtggctcattttggggacaagtgggatcggttcagaagcttaaaggctgagtttgatccgcgacacatactcgctactggtcagagaatctttcaaaacccatctttgtctttgtttcctccgtcgtcgtcttcttcgtcagcggcttcatggtgacacaggacaaaaccaagaggaaagtagtagttgagaaatattcttcctgatgtatatatatgacctaatagagaagcatcagagagattaggttgggtcttttgttagtaggggttttaaaattagagtagaagattcaaaattagtcaaatttattgtgttgtttttatacatcacggattttggaaatgggtttgggacagcttaaacccaattaaattaaaaatagacaacaaacctcaaagactgttttggactattttacattttttttggttgatcgaggtttatactttatcgtcgtggaaccaccatcgggtctcctttggagatcttccgttcttacaattcttcacatatcggtcattatcggttggtcgttgctgcaacaaaacaagccaagcgagacgaaggttcagcttcagcaacaaagagatcaaagtttatatattaatggtgagtgtaagagctgtaagtaccttttcagtcgagcttgagagcatggagaggatgctaatgcagatagaactcaccgtcatggctggagaccacgaatcatacaaaatatctgcaacgatgatacacaacatcagatacttcttccaggaggcctatgttaaataataagctactgaaatttgagtgtacccttggatctaaaagcaaaatctcaagcaatatgagtttcgaagagggtcttatcttcgggtaagacttcaaatgagtttaggtatacaaacgacttatgttacctctcacattgtgattattaatatattagagatcatacaatataggagttgtgtgtttatcattcggaccacatagtatgaccagcaagtaaagaaagtgatagataataaccaacaaaagagtaagaaggtatcagaaaacagaggacacagtgacatacctagacaaatatgcccattgctgtaaatgtgaggatgcagaggagctggatgaagaaaaatcacctgtacaatatttaaaaaaaaaaaaacattacaaacgcaaacaagaagtaaagaacagagaactcaagtcaactcgagacagatcaaaacattccatgacaaggcagagaccaaactcggtaaagatcaagacaatcaacaataaaacagagaccaaacttgataaagatcagagattctatgattgatctaaattaagtactcaggttacaatttcagaattcagaacactcacttgtggcgattccataggataatgttctggaaaatcaacttgaagctgataagtatcgttggcatatagagttcctggagctccaataacttcaattatccatctgcaaaccattgaatttgacatcacaaaatttctaaatcttatatgattctcaacaagaataaagtaaacctaattcataatttacctttggagattatcagtgactttgtgtttgaaaccagtaggtggattcatctgccattccacaagctctttctgaagacgattagtcgcgatcttactcagagtctacatacacacacagtttcccaaaatatagtcaaaaaccctaattccaaaaccaaagttaaataaacagagcaagtgagagagagaaccttgcgtgaaggagcaccagaacttgacatggagagagtaaaggagacaatcaaaatcctcttggagaagaagaaggaaggaaggaaggctcgaggaagaatcgaaaatcgaagggttcagatttgtgggacctttcagattgatgagatcttaatgatcagatgatattcagattggaaggtggtatctagggacggtaaagatcatgccacgtgtactgttttgtgctttttagatccacgaccgtttcgtactttcgtgtatttgtgtcagggaagcagccaggattgctggattttgctgcgtgaaacggtccaggggtataattgtaactttcaatattttgtgtgttaccattttcattttcggcttaactaattatgaatcaaccaaccactaacccaaattatttatataaaaatcttatcacaaaatgatttatatattcggtaacaacagaacattaaaaaaataaggtttttcgatagttcatccgacagaaagatagtcgaaaaataccaaactcaagcatggaaagaaaaagaactaaattaacttgttcttgtgttgtgcctaattcgaggaagttatggacttaagtctagaaattttggttacagaattctataaattatggtaatgaaaactatatctttctgcttttttttctcattttatgaaaactatttgttgactacataataaacgatcaaaaattatatgtagtactagttgaataaaataaatagaagctacggataggtcaaaagtcgaagactcgaaggcccattggatgtgttatagcaagttgatatgtaagactaaaaaagccaaagcaatgtcctcaagatctttgcagtgtcttttcaacatctacgagttgtcctaattagcagctactatcaacgaatatatacacataatactctttaaagttttcatgctcctttgcctttattattctgagttcagtagcagacaaaaatctctgaaattccaataaataatagcaatcatgaaaatcatatatataaaagttggccaactctctccctaggagtgacacatcatcacataagaaaataacatgtgtcattctatattaattaaaaaaaattaatagaattaattgaggaaaaatcaaaagtcttttgttgcattaaattctctataatctctcttttaaataaattttcttaaaacattcaataaataaaaaattataataatatatcaaatactactttcattttattctacttatttttaaaaatatttttatcaatagttatcaatttataatagctaaaatctactttgtgttgtagtttaaatgtttgctacctaacctcatattaaatagtaattttagttggatatttttttattattacgttatatgaatatgatttatcatatgaccttctttctgtttctttttgtgcattctgataacttggtaacactgatatacatttttcacgtaatgttcatccgagacattagacatatccacacaaaaaatacgagactctatatggctatattcaagggacgagaattaaagtgttgacttgaattactagcatatcatggtgtggttagtgtactagataacgagagaatatatggaataaagaattgtttgttacaattaaattaggcaagttttaaaatacataagtaatataactatatattaatatatcatataattttgttgtatgtatttatgatagtgaaatatttgaagaataggtctataaatatttatattatagtaaaattgatatttcgaattatagataaatttaattataaaaaattataattctataaaatagatatgactttattacttacacattaacacacacacaaaaatgaacatcaaaatcaacaaaagatcataatcatatattccgacaattttaaaaacaaaaacccatgcgtaggatgagttttcatctagaataacaaattaactaataataacaaaaatgtaggtaattttataaatattgtatatataaagatcataagtttatatattatctatatgtggtgtaatcatatatatgaaaattggcaaactctcttatatgaatgacacatcatcacttagcttttaatttgccacatgtccacttaataattaatgtaagttaatggtttatagtaatttattatttaattgtatatattataaaatgttaaataattaattatataaataataattttcttttattttgtatgtctttttcttaaattaaattatttaattgattttctcatactcttagatatttttccctaatttttgtaattttaagttaaaatatgattaaataattgtatagtggattagctaatagttttcataggttgttttttttttatataatataataaaaatggtgagaagtacttgagaactctagcatcaaattcttggactcaaatcctctagcattttgtcttatttttttggtttaaggttaacacaaatgaaaaaaaaatatgaaataatgtatactgagaaaatattttgttagaaatctaaatgcaaaatgcaaaaacaaattgttgatttatggagtttagtatcaaataggaattttgtcttcttgcctattaaaaaactaacctaaattttacatttaaatacttttaaattacgaaatataaagtgaaagcccgcacgtagtgcggatactcgtctagttccaataaatattaaaccaagtttttccccttttcaccaaattttgttgcattgacattcaatgaggcaaaattctcatgaaatctttgaacaaacatgtatttatatgttttatatgaaatattaaaacaatttaaactccaattcgttttgtcaacttttaattaataactccattctttaatttaaagagctgttaaatttattttactctgtagaaaaagattgtgaatatgtgatatcagagtcgttattaagactaccccaagccctaatgagtctctcattggctccataaaaaacttttaattcaaaagtagtttatcccttttgagtattttgtttatcagctggactttagagatataactaatctttattttggaaccaaagaattcctaatcttaccccttttctaataacaaaaagaaaagcttacagcgataataaaatttgcatgttatatataatttctttaaaatatagatattactgtatttttgaaaagaagtatatagaagttaatacttgttgtttgcatgtgtgtgtctttttctctttttgggctttgaacttcccaacaaagttagaagctcaaaaagggattttagatgctgaagcaagataagaagaagcatttatgcaaaagcctgttgtttttggtgcgcagaggagggaccatatagatttgaaatcccttctcttcttctttttcttgacaaggatatacaaagtcatatttcttggacaggtcttaattgattgcttttatttgtttaccaatatttataatactaagtgctattagtaggatgaggtataggtaactattcatagtgcttttgctgtaggatgcagcattggctcttactctctaggtgcttcgtgatttcaaaaatctttttcagtgcacaaataattgaatataaacttagctttgaccatggattacctcaagtagtgtttttcaacgtcaaagattatttatgtgttaccacaaatatgtacgataatagacggtctaatcgaataatgatctacctcagtaaacaacacaagttttcaacgaacaattctttttcaaatttcatttttaagcaataaagtccatcgaatatatagtatttactcaattaacaaaaagaaagagatataatgttatttcgtttaatttttttttttgaggcactctggttatactggtacctagcatcagcctagtattatgggtttcaaaagctacaagtcaacttcaaatttttagaaaatgaatctgaataatatatattgattgcttcttggttacttattttatgtatgtggagcaaaaaagagtaacaaaacaagaacccaaaaagtttttttttttatttgcattatttttcctcttcaacaagtagaagaagatggaggattttagggtaagacatgagtgttcatctctccgtggtactttgttggattcaagatatgctaaggcagtgcaatgccttgtagaagaagttatcgatataggtggtagagaggttgagctttgcaacaacattctaatcaatcagctgtttccaggaaggagaagacccggttttgctttgtcttccgaaatcaaatccgaactttgcagttctggtttcatgtctttgcctgagaatcatgagattcatatcaaaatcacaaagcttctcagtttgttgcaacaggtcagtcactctaatcttccaaacaattatgagaaatagtctaaattttatatcaaatttaaaagtagtctagcttttttattaattaacaaaatagtcaaattttaaaccttaaagcttaacaactatctaaagtataaaaactaaaaattaagtccaaattttaaaaccctaactcattaaacccaaatgttttgatcataaaatctaaacaatatggttaatttatttgatactttgattttttgaagggttttcctcctaattatgcaatatgttttcctttggttttcgtttcaacataattttggttaaatccggttcatggacaggtagaagaaagatttgagcagtactgcaatcaactggagcaagtgatttcatcatttgaggaaatagcaggagaaggatcatctaaagtgtacaccggtttagctctccaagccatgactcgacatttcggtagtcttgaagaagcaataatctctcagctaaactctgttcgtcggagattcatcatttctcatcaagatgttcccaagatcatcagctctggcttatcacagctcagcttgttcgatgggaacaccacttcatcatcacttcagcgacttggtttggttcaaggaccacagagacatgcttggaaacccatcagaggcttgcctgagacttccgttgcaattctccgagcttggctctttcaacatttcttgcacccgtcagttttcttgttgctcaagtgtaataacactagtgatgaatcaaagttaaaatgttggagaaataacattagtttgattgctgtaatgaaaacagttatccgaatgaagcagagaagctggtgttggcgtctcaaacaggactttcgaagaaccaagtacactcctctgaatctaattctgctttttttctgaaatttttgttatcaagaagattctgactaagatcatttttgttgttgatgattaaaggtatcaaattggtttataaatgctcgagttcgactctggaaaccgatgatagaagagatgtatagagaggaatttggagattccttagatgaatcaatgcaaagagaagccaatgatgattcaaactaactgaaaaaaaagaagataaaaacagaacagaggttcttcttcttcttcttctacttcttttgatgattcttagtctttttatcccttcttttgtatgttcctatctttactcttttccgaaatctgcattgtacttgcactggactcaagtttccttgcttcgcctagttttgttacagcctgaaaacgtgttttagtattgatcataagatgaagattgcaacaaataatccaaacataaaaaaaacatcacaataagcagaaacgtacttaccttgatgaaatcgttaggtcaaacacaatgaacctgtttcttgcggaacaattgaaatcaaaatcaaaacaacaaatcaatccaaaacttgggaagtttaacaccaactcgttgctcgttgaaaaatttcaggatttgtgagaggaagttcaatgtaatgtcttaggtctctgatttgtttagataaatcaccaagatctgagtagctaacatctctaccatgccgatgcaccaatattataaagagtaactcgggttccagaaactagctttgattgatccactttcgaccccaaacgttttggttttatcagtttaattcctggagattcacacattatatgacacaagaatacggcactttactttcagattttagcagtaaaactcatctcaactcgtatttcgaaatttaaaacatcatacacaaaaaaaaaaaaaacacctttcctttgggtagtatttgtaattttctatgaacagaataagtaagagagatcaagaaacattttacaacattctagtgatctcatcgtaaagcacgagcctttgcgtgttgcaagacttctttgagtaccgaagctattcgatgtgacatatgatgttccaaaaacatctcttttactctctcatacccattttttcccattctcagccgtaactcaacttgcgtcgccaacttcactatgttcttggcgagaggtatcactccttctttccctgcactatgtaacagaccagtcgttccattcactacaatctccattgttcctccggctgcagtaccaagtacaggtagcttaaaggccatggcttcgattgttattctcccaaagcattctcctctggcttgggagttttggacaagaacgtctatggctgctatatatggtgctacggttagagttttgttgacgaagtggacaaagttctcaagtttcttttctcggacaaagttgcgtagctctgtctcgaactttgtctgcttgctcatgtcgcttcctactactactgcatgcattgttggtacctgaagtttcttctctttgattctttcaagactttcgtggaaggctcggaggaacagatcctggccttttccacgcgatacacctggaaatagtaacaaacttaaagtaaattcattggtgacgcgtgaactcttactccttaaaagatgatgatgctcgtcagaaaacagagaaaaagaaagacttaaaaaaatgatggcatactattaataatgccaaagagtaagtcttcattccgcactccaagagattctcggacgtgctcacggagaactctcttggcaacactatcttcagctacttccatcaattccttgctatttcctaggtgcacaacgtaagttttgggcattttaatcctgtatatcaatagtcataaaacaatgttaatctttaagaagaaaaaacaggtgaatccagctgaaatgaggcaagactatacacaaatatcttagttttctgtatatcattcacatgaagcaggaggtgcaaagaggaaacataccctaggcgagcttgtgttctgtttttccagtatccagctgttgcatgcgaatcaatcatggcccctgcaacaaaggggaggtgtttgaccaaatcagcattgaaatagtgtcctctcatctcatgaatccaccataggatcttaggtagaactttaacaacattttcttttagaacagcatcaagccatttcccagccacagcagtattaagaacaatcaaatcagccttgagagatgtatctacagctttctgaccctttgcagagataacctgaagtcagataccaaaaataagaacttgtcaattaacagagctcaagacaacatctttccaacaaactctgaagtctattggtaggaactacgagagaacctgaactcctcgatccaacatcttgtgttcaagactatagacaacttcatcatcttcaagtggcttttgattagtgatccaaacaacgtcagcaccaactcctcttaacaaaaacgccaattccatcaatagcaaaggtccaccttttgtcacacaaaatcaatcatcacctcaaaaaagtatgattttttcgagaacccagatcaaattagaaatcaaatcagcagaacctgagagtgatagctcgtgggatactaacaaaacgagcttcgatttcatgaaatctagaggattcgattgaaacttcgcggcgctgctttctccattcttttcttccacgaattggctactaatgctacaggtttcaaagctagatctcacgagaatcatacacactgttgatacagatagaaacaacaaaaccatcagtgcccatctcttcctttgcatcgtcgacgctttgaccattgttttcctttgctaaagacacatcctaaggttttcaatagtctagatcttcgcaaatgactcgtcgaaactaagctaaagatctcaaaaatcaaacctttgaaaatcaaattcgagacgagaatgggcaagaaattggatctctgagtagaactgtaaagtgagttatactgagaagaaccttgaaagaaaattttgatctttaaaggtttcacagtgcacgccgttattggaagaacgtcttgccgtttttaatccctctgggccacttaaacccgcatattattatgggctctaaaaaggcaattatgttcattaacatagaaactccagtctccacttttagtttgtatcacgattaatgaggtttaagatactaatgactttcacatctcatgcactgaaaatttactgtgtgctacgttattttatgttttgaaaatgtattttcactggtggaatcaatctttatggcaagaacaacaatatttcccttgttagtttaaatacaaaatatttatgatcataaattgtggatcgtgcatatataatttctcaaacgctatacagatagagacttgagtgtaacgcaaaactcatattaatctgtgaactgtagtattactatttacctgggaacatctaattaaccgtaccataaactcttactttgttgccatttacatgtagtttaaccagattgctcttgaaaataggaaaaactcatgtggttaaacggtccgactatttatgattaacaactgcgattaattatatcttaaggatattaattattattagctgtcataccatatagctaggtgtacaaaaagctttttgtccaaacaaaagctgttgatttcttactcgtcatttcctcatttagcactatcatcatcactcatcatcgattcatcatcttcttcaaattatatactcacgatatgtataatattattattcataagaatactcatcataaatagctttagaaaaccacattcatttaacctattttagaaagttaaaaatatttgatcctttcaaactttcccactgtatatactcccatattcaaccagctgtgtgtagggtttatcagttgtacatttaaaaacaaacaaataatctactcataaatatataaaatttcataaaaaaagaatttgttgtaacacattgattctccttgaaaggtttgtgtcggctgttccaatctatgacaaaaccgaaactcaaccaaaaacaaaaaaaaacattaaagaataaaagaaataaacgaaatatacagaaattgaaataagaataacatttattaagatggacacaaagccgttagcttcgttccgttaaggaacgtctctacgaaacaaattggcgtccaagtctttcgtttttggccactttcaccaacttcgcgtccgacacagctaccttatttatttcatttttcatcatcttctttcgaattctactttttctattatttattacacaacctccttagatcctttgggacatggaatcgacccatcataacttttcttttcattttattgttttgcgtataaatacattttcttcatgtaggtcaaatgaatcacttgattatttaagaaaatatgtttatttgttagtcaactaattggattttttcgttccaagtaaggaaattgggtagtcaccaactggttgttaaggtcctttaatccctcaattaagcaattgagcagacacaacacttcttcctcaaagcaacatttctggcaaatcaaaattctctaggcctagggatactttagtaattttaattactttatattcaatatattgatttgttgacaattctacttatatctttatttttaatatgtaaataataggaagatattgaaaaaatggagttaattagtttcctcttttgcacgtcacttaataagagtatgtgtgtccaatgtattacgcgaagaaacaagtatataacgtataaacagtaggagacctcaaaagatgtttaattttaattttgatcacaatctttttagagagttccgtcgttataataatttaacaattatacatcaaaacatcatagattagttatgaagtatcatgtcacgtaacacatgtttctcgttcgcttataaccagggatctgcaattatgtaaagaaattaataaaagcatctgttggttcagactaacccatgattttatcatcacaaccacaactaatttgagattgcttgagttaatttaatctaacaaagctttggtggaaaattttaatagtaaaaaatttcaacggttgcttgaatttatgtccaagctattaattaaactttataaaaacatagaatacgaaaactcaactcttttcttcattttaaaaaacatactttatttttaattatatttatttgaatataagcaccaagtcaagtcaatgacaacactgcacagtattccttctggttccaataatattcttttgttttatcagataacttgaaatataaatgcatataaaaagtcgcatttgtataaatattctccattatctaacaataatcctatcagagaaaaggaaaaaaaatatgaaaatttccgctcacgcgtgttattctctaaatggttggcacagaaaaaaaaccaacaaaaaattattaattttaatatagaagcttcggttggaatagaaaaacaaacaaaaaagaattactggtagagaatagagattgtcaaatttctccataggttagtgatacactgatattttattaaacattaattaaaaaatctgggtttgttgtcgaggttccaatgataagatggtttggttctgttctttgttagtgaatgccaaataaagttttaaaatagtatcggaatttaataaaaatcgtctcttgggattgggtgtcttctctttctttctctctctttttgtcatcgactgttcgaagttcttcttcttctccctttttatctctctgttccctgattcagccacatccacaatctctctttctcttttgtatagtttatcatctagctctttctcaggtttcatttctttaactataataattcgattgttcttattagtagcttcttgattcaaagctatatgattgacttgttgtactctgtttctctttttacaaaaagatttcctttttcgaattttatcatcatcttcgtctctgttaaattcttacaaaagtatgaaatcatcagaacttaaaaaaaattaactttatatctttcatgatttcaaacatcatcctctgtttttgtttgcgtcactgaattgaagtggaaactttacctagggttttgatatcttcttgacctaaattgagtatttcatatttttttcatttcttgaattcatctgtaattgcggcgtatatagagattaagatgttttaacctctttaaagaattgttcttttatttatccagtttcagtttcaaactcacacgtctctctctctctctttctcttttttcagacaaaacatcaatcggatgaaactcacttaaacaacaaaacactttcgatttattatccaatggctgtgtattaccctaatagtgtcggcatgcaatctctttaccaagaatccatttacctcaacgaacaacaacaacaacaacaacaagcttcttcttcctctgctgcatctttctccgagattgtttccggtgatgttcgaaacaacgagatggtatttatcccaccaacaagcgacgtagccgtcaacggaaacgtaacggtgtcaagtaacgatctaagctttcacggtggaggactttctttaagtcttggtaatcagatccagtcagctgtctctgtttctccgtttcagtatcattaccagaatctttcgaaccaattgagttacaataatcttaatccttctactatgtctgatgagaatgggaagagcttgagtgttcatcagcatcactctgatcaaattttaccttcctctgtttacaacaacaatggtaataatggtgttggattctacaacaattaccgttacgagacatcagggtttgtgagtagtgtactgagatctcgttaccttaaaccaacacaacaattgcttgatgaagttgttagtgtaaggaaagatttgaaattggggaataagaagatgaagaatgataaaggtcaagactttcacaatgggtctagtgataacattacagaagatgataaatctcaatcgcaggagttgtctccttcagaacgtcaggagctacagagcaagaagagcaagcttttaacaatggtggatgaggtaagactaaatcaaatttgaatactttaaagtgagagagagactttggagttttgagttttgaaaacatttttgcaggtagataaaaggtataaccaataccatcatcaaatggaagctttagcatcgtctttcgagatggtaacaggtcttggagcagctaagccttacacatccgtagctctgaatagaatctctcgccatttccgctgtttacgcgacgcgataaaagaacagattcaggtgatcagagggaagcttggggagagagagacttctgatgaacaaggagagaggataccgcgtcttaggtacttagatcaacggttgagacaacagagagctttgcatcaacaacttggaatggttagaccagcttggagaccacaaagaggcttacctgaaaactctgtctctatacttcgagcttggctctttgagcatttccttcatccgtaagtttgttgtttgtaagacactttctttctgctcctcattgcttcattgataaccatttcaatcgtttttgtagatatcctaaagaatcagagaaaatcatgctttcaaagcagacaggactatcgaaaaaccaggttcttattggctcaatctttggtcttgcttttatatgagtggtattctgattcttggcaatttaggttgcaaattggtttattaacgcgagagttcgactatggaaaccaatgattgaagagatgtataaagaagagtttggagaatcagcagagttactctctaactctaatcaagacaccaaaaaaatgcaggaaacatctcagctcaaacacgaagactcttcgtcttcgcaacaacagaatcagggaaacaacaacaacaacatcccatatacatctgatgcagaacaaaacctagtctttgcagatcctaaaccagaccgtgctactactggagattacgacagcttgatgaactatcatgggtttggtattgatgattacaatcgttacgttggccttggaaaccaacaagatggcagatattctaatccccatcaattacacgactttgttgtctaaaagattcctgagcttttcacaagcttaagaactggcaatgccagttgattgggggagtatgattcttgaagcgcaagaaaatgcgctcttggcatttttatagataggggttatacaaatatgtatatctgtaatatttgttgtggcatatataaaggatagattttgtgaaaactttaggtgttagactttacatttgtatatgaaaattgagctttgtgtacactttggtaagccgatattgtaatgtttttgtttataatcttcatgatggtataaacaatacttttaagtgtgaacaaactgaaaaagatttgatctaatttcctcattttgttacaagaattggaacagattttgagttcctctgaaacttgtgtaaacaacgaaacgttacacaactttttaaacattctctgtaaatggttggcaaattctcaaatcttttctaaaatgacaagtttgtttcattactgaaaattatccccacaggttacaatgaaacacacaaaatatccaaaaagaaagttaaaacacagctctaaaggctatagctgaacctgaatatctgttttatacaaagctttcctaaataacccgcatgcctctgatccagatggaggggtttcatcatagcggagatgtctgattaagtccctgaaatgtgtgtattattggttatttacaggaatgtttcatttctctagcaaatcaggattgaatattcagtgtatggatctttacctctatgcttgaagaagaccggttatttcgatgtctagaccagaatcccttcttcaatgcagagtctttggacgagggtttattccacttggagctgatagaagcaaagtgccatttcaagaatgacttattagacgagctcttgctactgcaactagcttccagcttgagagctttgccttctcgtttccccattttctggaatacaaactcatcgcattcactctcaccgtaactatctaccacacggtttttacatcttttgtactgctttgcctttgcttccgcctccgcttttagggctttccttgttattttcgcaacccgtttctccccaattgtgcatatgggacaagcaggatcatacttctctatatcagtagtcatggtctctaagcactctgcgtggtaaacatgaccacaggcaagaacagcagcgattgggagctcaaaagtggctatagaagacctctcggttagcaactttgaacaagctccacaaacctgctgatcaacaacggaaggggagaatgagaatctgctgctaccaccacttagtttccgtctgccagaacccaagtgttcgctatcaaaggaccatctatccctttgagaatatgccacgagctcagaaaaagtgttcatagaccagccaccttcagaagatgcgtactgggatccagtggcgaagtcattgctacaggtcgaaagcacaaaggacgaccttccttctgagattgagtaattattaattggggatttcagtcctaaaatttgactatcagaaacctgcctaaacaactgatgcccaggtgaacgccgagcccgtcttgatggtgtggatttaggaggaagcaaacgcgtgtgagccgatgaaagatcactaactggattgggaagagaaggcgtggagaacaaaggcttcgattgagctgaagggacaattccaggtgagtcaactaagttcttcacctgaaacaatgaagatccaacaagggttaaagatacaccgaaggaaagaaaagaaagcttccacgagaggaacactagagtcaagtcgatcatctcacctcaatgagatcactgcttgccaaggatgaacctgccgcacagaaaagcataacataagacacagcaggaatacgatacgcaagactaattcattacaataacatggttcttggtgacaaaaaggaatatagtcattaacgttcaacttaaaaatccctatgtcaactatatctactcaacaccgtgaagagatcatgaaaactagcaagctttacttatacacgttggtggaacgaaaagattcaaggaaaaaattaaaacgactcaaagcaaagagttagattacagtcagaattagctcccaatagtgtcattgtctcaaaaaaagaattacctgaagaaggtggaaccatggaattggtgctcatttccggagttgctgatttctgagaagcaggagtccctaaatgtccatcaggaggggttcctccttcagataaagttcctctctcagagcctaatgacatcttatccatactaatacctctactcgcaacataaggactgtaataaggtgaaccctcaatctcatcagccactcgcctcctattatcacgtcgaaaactccattgtggcgaacatgctgaattccgatgaacagatgaactcgcaggtccaccactaggaggaacctttctgtctttcacagctacacaacaaactgaacccataaccttacacaagaactattctcttctctatcagacgatctccaatactctgctttaacttaacacaacttccaaacaaatttgcacgtccttcctcacacagtaaccctgcagtaagcacacaagactcacttcaaaatcgataaagcttaagaaaccaaaaagatctgaagttcttattaaaaaaaaaaagccaaaacgatctgagattaatcattcaatgaaaagctcctacgagagaggagataaaccgaactcggaaactcaggacctgaataactgagtcaagaccaaggaacacgaatttcatcagagaaatgatctaacaaatacacaagcaacaagaaatcaacctacgatttctaattcaattcgcaatcatcaccacaggagaaaccgatatagtagattagattcaaaaacatgggccaggttctcaccagaacaacgaaaggtttcggggaaaatcaaaacacgaaacgcgtatacgaaagggcatacgtagacggagaaagatcctctccggcgatgaaatcaaacggcggagattaaccgttgatcggcataaccgaaaatcgatctgagaaagagacgacgatgatgatgggaagagagagagagagaggaagcagttttttttagtttctgggtgcgtctgcgttttgcgtctggggaagaagaaacacgcacggggaattgtgccacgttccctcctctctttttcttttcttcttcttttttttttcattttatttttataactttctttttctttttttatttttatattacttttgctttttcgtaaagtttggtctacatttcactatttcataatcaactatatatgaatgacgaaaactaaacattacttgagtttaaatgttggacaaaacaacatcagggagagagtttcaatttgaattaccatttataagattaatttaattaccatttccaagttttggtgattaattattttaagaatttgggtttagtagtgattaagagaggttggtggggtttgaaggaccacgaggagtgcgctctacgtgttactgtttctccattagccgcaaaagccaaaaactttgatgccctccaaatacatttatttttaattattacttatataaaggcttctttttttgtcaacactcatatagaaaaaaaaaaaaaaaaagagtttaacgagagtctcataattataaggatattcgttcacccactctcatcagttaggttataaattagtgttaaggattaaataacattaatcaatgttatgtacttacaagtataaatgccaaaacttgtcagctacttaggttagaccaatttattttcaaactcacgcgcgctcatgcttgtaactttgtttttattcgaattgtttaaaaatgttttttttgtaagaatgattttaattattagtattagttttcaattagcttaatttatgaatcaatatctttggtaaaataaatacgtttctttttgtgtgtagtatgagatggtcatggaagtcccaatcagccaatcttgatgatgtttttgtttcatcaagagaatttgattttgtcataattagtatttaaagaatgggctttattttagggcccattacaaacagagcttggaccagaccaattaatcgctcaacaacctttgcagagcataatatatggcagcgactgttccttcgattgttttttttggcaatttggcccatccaaacatttattatggcaagtaaaagtgtttagatgccaaaaagaaaaggaaaaataaaataaaacaaaatgaagcaactatctaaagaactgattctggtaaagctttcgtacgtggattattcggatcgattgtaaaatagtggacacatattactgcccagaagaagagttttattcttacgctaagtcagagtcgtgagtacaactttttattcctttcacagagtatatttgcaacaagccaaataaggacaagatcactaatcaacacactatatatcgattcattgaacatataagttaatcatttcatccatgaccactattttcttgatagatttgcaaaagttgatataaagcactgttctgatgcctgaaaagatccttgaaaattaaaagtgattttctttgtcaaaattttattatcgactgttatgattgtacataaagactatctaagaagtaagatccatgcaatttgaaaaaatagtaaagttagttgaatctttatataagatattaaatgagatattttgattatattatgaaagttttagttcgatatgtctgacagaagtatctcattactaaaccaactttgtgattccttcaacagagctttaaggaggttgattacatgtacatatagctcaatctctgttgggtaatgggaagaaaagaaaatgaaaccaaaacctcaaaacgaatatgtgttctccattctccaatgatctccattcaatagttctatatagtgatacgaaaccctgattcattagtcaaatgctttagaatcgttagaagaagatgcctcacaagattcggagtgttcatggtgatggtgatggttgttgttatcttcttcttcactgtcatcctcatcaaagggcttttgtttatgaaagatacaacatttctttgaactcttcttctgcataaactcgttgtccaccgtcccgtctttccatgaaactttcttcttcttcctgttcaaccgaagcactaatctttctgttggctgtgaatgagaaacaggattttctcagatggtagtcgatgaagacgaaggcctagtcgcagtgctcatggctcaaaaaaaggttttgatatctacattgggagacaaaatgatcaattcttggctgctcaagacaaaattatcattacctattcaccttaaggaacaagaacagaacaaaaaactagttcttaaaaatcattttttctttcgttgtataattgtattaacgattatagacctgtttgtgattcaattattcaatagatggtgttaacggaaatatattcgtaagtaaatgaattttactccaaaataatgaagaagcgaatggtgcaactatctaaagaatcgattcttctcaagctttcgtacgtgtattattcggatcgagtataaaagaaaatcatgataacaaattgtggtggggacaagaaatatatgccacataatattaccctgaagtgtagttttattcgtacgctaagtctagagacatgaacatctacttgccccatttgtttattcctttcacagagtaatatattttatttccaacaagcaaataaggacaagatcagtaatcaacacggtatacggattcattgaacatatacatgagttattcgaaactattttttattttgtttctggtttaatcatttcgtcagtgaccacttacacccatttgcttggtagatttgaaaaagttgatataaagtacttgttttgctgcctgctgacgatcattgagggtgatttgtttgtcaaattagctcgtcgaatgtcatcattgtaattaaaccccgttattattgccattgtaaacttcgttgaaactcattcatgcatgatatattcatatatatagcctagggttacgttgaaagattcatttaaggttaggatcggagatcattgtttgagtttttccaaaaaagaattggaattgtatatgttaaaaaaaatttaaatgacgagaatactcgtgttttactttcacagttccaaagattagtgtagactttgttttaagaaaattaatattagtgttgaccttagtttgagattcatcgataaaaaaaaaaaaaaaaagaacgtatgttatgaaaatttcagatccaaatggcacaacacataataatgaactggtttagcaatgatatgatttcccttaaccacttcatgaaatattaagtgaatttgtgaatgatcgggatttgagatcaaagaattggcattcagatatttaaaggatcaaagaaacgaaatgattgagaataacgagatcatatggcctcgtacgtaagagcatcttcatcgacaaaagtggtagagaatatctcaaaaaataaataaattagtattttaattaaattaatatattttaattagtttaaagtaaataaaccattagttgaatgacaactctcaataaatgctaagaatcgtctcttttgccagaaacggttcgccacttttctttctttctctcttgttttttttctttttaattattatttatttgatgagtatctcaatcagatacttcgatggagatggtataaaattcttaaaaaagaaaaaaactcgagtgacccatgataacaactcattttgatgtaagtaccaaaatgcataattattttatcacatcgggaaaatatagtctctaacacaataatcacaacacaccatttctatatagtattttaaatggaccaccgccatctacaaaaaccgtccacgagctttcacattattttcatttatttcactaatagccaaaatttcatctttctaataagagcaacaataactcccaaataaggaaacagaaaactctaagaaaatgacaaaatattatttcttcacttttaatatatagaaagaaaagatcttaaaatatttgtaccaaactcacatcaccatctccatgatatcacacatttcttacactgtctatcattacaatcagttttaaacactaattaaccatcttataaaataaagaaacaaagcatcatcacataatttataagaaaaattacagttttacccctgctgcgatgattagtctcactcacgatgataatgatgtgaagttttctaacagttgaaaacatcaccagcagtagaagcagaagccatgattggttgattataaaaccctagattcataggattcatcacgccgtcgaataatccaccgtcgaataatccctgaccggtctccataccgaatcctgaagaagaagattcgacgaaatcaacgatctcgttaagagattggagacggtggttaagttcaagaacctgagctctgagaatgtcgttctccgcctcgatagtgacgtagtgctgcgtcgtgacggcgattccggcgacgatctgagcgttttctttacgtagatgagtcacctgagcagtgagatcatccaaatgcttctgcttcctcatcctcgacctcctcgcagattctctgttcgactgtttcctctttctcttccgctcgtcgattagatcacgttgccggagatcagattctgaaccggagttagctaaaccagtggttgaaaccgacgagcaatttccacttgtggaagatcccatttcagttttattattcatattaaaacacacagagaaaattaagtactatgattaagacgcaggacccaaagtttattatgtaaaaagattatagtatatagttttaatatattattatggttatagaatatataataataaagggctaaaggagagctgatttatgagaaaacatagaaccagtagagaaagacgacggagaaagattgaacaagatgggtcctgcgtctaagagacgagtctatagttaaaccagatctaaggatttcactaatcaccggagacatgaatgtttgaacatcaagatccacaagagttttgccacatcaaatatttatcaaacgcaaactgattactagtgtttttttctagagaaaactgaaaagagagaaaatataaaaaggtagaagaaaacgaggaagacaaaataaaaacgctaaagaagagagagtgattgattcgagagcgaaggggaagaggtgaattaaggatttgtgaggggattttatagagttagcaaaaagggtttagagcatactagatttaataagaaaataaagagagtataaagtgaatatcagaaagaaggtgttgagagatgaagcatgtgaagtgggattttccgaaacagtcaagttacagctgttttgcaatattttatttatatatttatgtgtatgggtttaattgtaaattaatgattctgtataattaaccaataactatttttagacatttttaatatggaaaaggaaagaatcttcggtattgggtatcctattttgtgaaaagttttgatttttaaaatcttcaaattttattctctgatgaaaacaacgcgtttaattaattttggtcaaatgatggctttcaacaatattacagtaacactgataataatagttttgtattaatgctaacttttactgctaaagaatcttaaagataataataataagaataattgaaacttttgtcgttggttctcgacttctttttaatacatcaaaatcaccgcccaaagtaccagaattaaccgttgagcaacggacacctggagcatgagacaaatcatgaatgagggtagaggtggtattttcgttatttaatttcttatacatatatctttttgtcaataattcaatcaatttcgctgtccaaaaaaataatatatatatttaggataataaattaatagtttagaaaactatcaactaaccagccgttgaatttatcgccgtatgaagcatcaaaattagaactattattatctttacaatatttctataacgttttggagtccactataaaatatcaagttacatatcgaaaagaaaagacaaaaagaaaaaacaataaactttaaacgagtaaattacagtacggtaaaaaactactatttgacaacaaaaagaagaacatatatacattatctaaacattaagggtgtcaaaaactttaactcattgaacttcatgtgaccgacgtgttgtggtacgtatagttacataacattggattgtagaatccaagacgtaaattcgtgtcaatttataaaataattttattgtgtgtaacatattacatgtggaccatgactacttaatcatttggttttggtgctttaactgaaatggtttgtgagaaactctttaccaaatttttttgttcatcctcgagctcgtaattaatcaaacatttcggcaaaactttgatatctataaatctcataaaaagattgaaataagaataatacgtactcatctacagctctataacttacaataatattatatactaaattttgtaaaacacacatatatatatagcttaattaattgaataggaaaattatgtaagatggaccgtcatagtacggacatctcacgtgcaattgcaatgcaaagagtgcgtgctctgtgcgcatgtggacccatgtcaaacatcgcagttgagatgtaagatcgacacgtgtcattttattattgaaaatggatttttaaaaagaaaaaatgttggttcaatcgaataagtgaagtctaacgttaattaggtatttccaattaatgaatgtgtccctgcaaacattgcaacaggtaagaaaaagtaatttgtactaatttgtcttcttcacacaatgcttatttggccttatttttttaaaaaatctttcattttaaatgaaaaattaattttattcgatacagaaacataattttctttacaaaatcgaagatttttcagatacccaaggtttcatcgaactaattaagatatctcaaatatatttatcataacgcaaaatcaattgaataaataaataaaaatgcgacatgtattggaaaggcaaaagatcccactataaattaatgtctaaaatacaaatggttaccacttaccataaaaataataatcgtcacctcaataatttttcattcaacaaaaagattgttgttattgctttctactaaggcatatcacatcttcttttttttttgggcaacaggcatatcacatctaatttcataaaataaaaactgatgtagagactgttttattttatatatagtattacacacacaaaaaaataaaaatcatacaaccataatagccgagataatattatttaatattaatgtttattacttattatgtcaaataaattatcaataaaactagttcacctaactaatttaattagataaatatcttaagaaatttcagaatattgcttgcttaactcagttctatatgaaacaaaattttatcagaatatatattatatacttagaacctatattttgacatagtaattcaattaaaaaggtgtaactaatactatgcaggttataaactaacgaccattttactaagtttcgctttgaatctcatgataatgccaaaagtcataaaaactatcaaagtttggtaagtggtgtgtgtagtgtgaagtctctttttacccaacacaaaagggatacaagttgcttagtgaaacttatacacagatagggaaaaaagtacttataaaagcaaaggcaaagatactgcgttttggcaaaaacaggtttctatatcaaaagcaatatcaaaatgtaataattattattgtttacaaaataaaacatgccttgagagagaggaaggtaagaaaacaaaagttgaatgaaagattctgaatctgcctaacaccctcaagcacatcacatggccttatgtttcttccttagcattgatctcttttcccattactttatcctcttttctttgcgagcattgtggagttgttttatatatgtgccactttttatctacatatgtactaccttgaagctaagtaattgatttatgattttttttagtagcattgtataataatggaaccatgaaacaataacaagaagttatatatatatagaatagaatgataaaaccgttataaacaaacaaaaagtaattagaaaaccgtaggccaacaaatttttatattttagttttgttattctagcttactgaagtgtgaattaccaacaaaatctgtatatatgcatgtctataaaaagtttatacgttaaattacattaacaaatctttcttttactgaactcgagttagggccgtagaaaagagcctatactcctaaaagtatttatctttatatcatatgatctgaatcgattatggccgcaaaatttataactttttggtcataaaaagggagtaagaaaataataaattatgtagtaagcgggtgggttgagatgagtaacagaaaattgcttttacaattaattgaggaatccctcgatcgaactggaaaatgaaaagccaaaagaagttttgccaaataatttgtaggtgggttctggtgactagtcaatttaaaatgaatggacactttaattaatgtatggaaatactattaaacaatttgaatgaaggcatcgtagaaaaatatgtccattttcagttaaaatgtgaacattttcacttattgggtttacttagtgaaggtcagattacaatcaaacttgattgatataataacagaatcgtacatattttagtctaaaattattgatacaactgtgtaattatataagtggaggtggtttgttcgtaaaccttaattaagaccacttaatggaaaacagttgcctaatattcgttgagcatctctatcgtagacccttaagatttgtaattatctatttttcctgaccctatgattgttagttaatatttgtaagatagacccatgcaattgattttttcaaacaatagtctggactctgggcgaccatatagagaaattaactatgccactcaaagaccaaaactgttctactaacatcaaaagtctgaaaataaatccatatcaaatgaaggagaacagaaagctataaagacactgaatctctgatggttggcgatgtagggtcaagagtaaatgcaaacaattagggtcagtttcatatttctaaaagttagtctttagaaaagcttagttaatgggtatgttcttgaagttcttcttcttctactgtttttttgttcaccaacggtttgtactgtcttacttgcgaaacatttatttttacaaaatcttataaccatttttcaaggtttatctagcttccacaaccgttctaatttgtttcgtaatacataggtgcattataatatttgtgagtttgagttatcaaaaagtgacggcaatagtacaaatcgttatactaaaaaaatccaactattataatttataactaacttcaagaagaaaaaaactaaaagtccttaatataaattgttttcaaagttcatttaattacaacaactaaatataaatacaactatatgaataaaaaaacattattagattcataatatttattttatctaaattaatcgctataaaaaaaacagaagatattttcaaatatttatagacacgtgcatgatatatgcctctcgttgtaaatatacaacgacatcaagcgattaattgatatatttcacatattggccattcattataaagaaatacatacgtaaacattttcttttcgcaatcacatcaaaaccgatgttgcaacttaggggtcgagatttcttgtctacctttgtacggtcctgggggttttccttcggtactaaggcaaaaaaaatgtgaacatatatattatttgtacatatatgttaatattaatagagatttgcagtatcaatcgaactttggtagcacaatttataggacttatttaattagctaattaacacaaatttcgtgctcattcgatactaactaactacggtggaaactaatttttttccaaccttttttagtagagtcatgcaaggtccgagacaatatcttgactggtaaaaattcaagatttttccgacaaaaactaaatcaaacaatttttttttgtgcgtatgcagttacgtatgatttataatggttagaagatctgtaaatggaggggatattctcttgctttagaaaaatgctttcgaatgtacgtgaattctgaaggtttctcctattaaatcaagaccaaagtattgaacaactagacgaaaagaataatataaacaattctgggaacaagttccagacacgagcaccggacatgcatgatctatcaaatcttgaatattataatcagattcgatatagacatacattatatacacataattatagagcaagacaaactataatggtgtttgtccttgttaacttagcatgaccattttgaattcgttgtctcagattttgatgcttagaattcgtgcctcatatttgttagaagaaaaacacaacaatatcatcgacgtatcaagtatgaaaattttgatcattctttaaaaggagataatttagtaattgcacagaaattagtcaaaaggcgacgggtacgtgttttcaggttcatgcactcttaaaaaagaaagaaagaaagatatactattttatggtcgctcagactgttgtctagtgtatggatttatcaaattcgttagttaagcctgcctatactattaattaactaggtttgctagctgtgtgaatagcgataaatatgatttaaggaccacatttgttttactttacatgggttgtgttttgatattatgtagtccaatttatggatttcggattaaaaataaaatctcgttaaacaaaaaaataactaagttatcattccgtcatagttgcgcatctcactgagatactagtgtcatttcgagtgagtaatgaaccacataatctatatttggacattggagaaaataaacgatatgaagtgtgtgatttgtccaacatgacaatcaaaataaaaacataatatgatctatgtgaattaataagaaacagaaaaaggttaaaattgaaacaaaaaaatacgcaaagtgacaataaaaagaaaaggaaaaaagaatgaaagagtggtagggttggtcgggagaggctgcaaaagtcgtgagagtgagtgaaggaggcttcgagcagccgacatcgagaatctttaaaagtcgcaaaatatcagtaacaccttatcacatatacaatatacgagcatctgaatatattttctattttaatatatgaccaataattaaagtttcaatttagcttttcttcaaacaaaagggcttgaagcttcctctggatctatctagaaccattaaaaaaaaaaattaaatgttaaagaaaacaaagagatgtcggcaaagcttagtagaagcccaacaatttaaaatataatcgctacctcgctagaagcaaggctcgttagaaaatatgggtacttattgggccataactttgggccggaattcaacagaatttttaatatgtattgtgcaatcattttctagagatccgagtactttcattctttcaagttaccagcaatgtcacaaattggaggaaaaatacaaatgagtaaaaaatccaaatattgagggagatatttttgaggctgggaaaatggataacgaaggaacgtttgtgaagccatttacctatcaatttttggaccgataaggtatttgcatatcaatgggcccattattgacattgacttcttagctacaatatagtttcaacttgattatttcactttcctcgattatgacttgtattttccgcttattggccaatactcaaagaccttaatatattgctattcttttatattatcacctgatagaaaaataaatcttaaattcatattaaattaacttatgtatttaagcttataaaataaattgctcattaatacaactctttatttaagatcaactattttatttttgttaatttataaccaaaaaggtgcatctagaagctggagaaaaaatacgtaagatagaaaagagagcccatgtttctaataaattctactactaccttatccaaatccatctgtgtgatacagatgcgcaagtacacgtggcatccatctaggcgatttatttttcgtctgccgttagttgatgacgtgtctagctggtacaatttctcgttctcacgtcatccggctatattattgaaatccctttttcacccttccattgcacacattttcctctcttgtttttaagtcgtaaatttcacacaatttcctaatttcttattttaaatgaaaatgaatgaatcaagaaacgacgaaatcaaaacttttccaccaatcaattttaaaagaggcttttgaattattttgtcgaccaaaagaagaagtgaattattccatgcaattttatattaatagattttattattatctattaatattgtgttggttgatctttgctcacattacaagtaattgactgtgtcctaaaatgaaaacaaaatcatgtgttcttttagtaaattatttggaactatttatatatatatatatatatatgttgatgtctttcgttagtatatttttttcaattattttatacaaataagttgaggttagtactacaatatcatattagctttcaatattgttttttatatacaaaaaaaaacaaaattaggaagattatggtttacataaaaagttggcaaaattttattttcatgactaaaaaattaggcaaaatgaaacaaaatttggtgaaagggtaaaatcgacaattaaaacaaaaactgcgtcgataaagtaacggagattctttcactcctttgatctctcaagtgaagaatctctctctatctctatcttcttccattgatcctttcctctctctggcttgtttcagagctcttcgatcttcttcttgatcgatctacgtgccactgtttataccattcacgatctaatccggtttcaattattactcacgaaatcgtaagtgaatcaaaaactgtttacaatctttctaattattgatcatcatcatcatcaaaatatttgtgaatatctatggtataattcgatgatcattgattgttttgactttttgagaatatatatggaaactactgtttcgttgtatggatcagtgatctagaattttgccatgtttcgtttactttatgagattttggatttcgttatgtttgacactaaaatactctgtttgattgaaggaaggaagatgagatcggttcaagcaccagttgtttgtcctgcaattcgaccaagacaagtaggtgcatgtgcttcactagtcaactacactggtctgaaacctagaagccaattttggggtaatcggacaaaaggtgtcaagtctcagggcactaccacaacaatcactcttagattgtgcaacaagagtatcaagtgtgttttcagctctcactctgatggtaatggaagcactgctgaaaatttcaatgaaaatgatgaggaatatgttaactctagtgtagtggaagctggtaagttagtggggattagtagagtttccttgtttggtttgatttagttcttttagtttttcaaagttggtgtctttttgggtgtttttgaatgttgtagttgaagtaaaaagtggagcagatggttttatggtgaagatgagggatggtaggcaactacgatgtgtccataacaatcctcaaggagggcatttaccagattatgctccacaccctgctattgtcttgaaaatggaagatggaactggtcttctccttccgattatcgtctgtacgtgaaaatctgtgtttgagttgcttagttttggtgatctcaaagtgtttctcttatgccactctcacaaggttttgagtatgttgatttgtgttttgttattgcagtggagatgcctagtgtgttacttatggcagcaatgaccaatgtccaaattgtatgcttttatttctcgtttgttttgtctctctgtttggaatttagttaagagtgattgaagagagattttatgatgttttatggttacttgttgcaggcaagaccaaccatgtatcaagtggtgaaggaaatggtggacaagatgggttacgaagtatgtttcgtggtttcagtttctgctcttttatttaaatatccttgtctcgtgaagattgtgtttcatgaaaattttctgaactattctacaggttagacttgttagagtcaccaaaagagttcacgaggcatattttgcccagttattcctttcaaaggtctgcaactggtctcttatatacaacttacattcagccttggaaacttaaatcatttcctatgtattaaggctggttttgggacgatattgcaggtgggtaatgcctcggagtgtgtcagctttgatcttaggccttcagatgcaatcaatatagctgttagatgcaaggtattacatagctatgttaattaatcagctgaggtaaatacaaatgtgtgtttggcggttgaaaattgtgttgatcgttttgtagatacctatccaagtgaacaagtaccttgcatatagtgatggaatgagagtcattgagtcagggaagatatcaacaccggcaccagcttcagatggtttattatttactgaacaagaccggtaaattttcagacaccttaaagatcaatctttgcagatcacatctttttactgtgaatttgagtgccataaacttttttgactttgtgcagaccaaatggtcaggcttgtcttgatacgaaagagttcaatattttgagcaaaatgatgcaagccgttgatgaagagcgatatgatgaagccggtaagctttgctctagtctctatatccacaatgtacactttattagtggttacataacttactgctatgattggtggcccagcatttgagaccaatctgatttatgtatgtaacagaaacttttatagcttttcgtaaatcttggtctaatctctaatgatcaatacactgttggttatatgatttgcagctgagtggagagacaagcttggtcagtttcgggccaaacgtaacttgaggaaatacacatgagagaggtaaggagatataaacgaaaatgcatactaaatgacgttatcatttctcgatacttatgtttctccttggggcagctcgatcaacaattattggctgtgtacataaactaagaagaaagtcattggtcggaatcaaagtggaggaagaagcctgaagtgtcgtctctgtatgatggagatcgaagaatgcttctgcactttacccatttccctaaaaaataaacaaaaaaaaatgtataatgtatgtatgtagcgtgatgtgtacatattacttattaatctatgcaaattaagctcactctaattacttttaagtttccttttaagtcttatgttcgtcgtatttgttttcgtgcttctttctttttataataatttaattatatatttttgttattacttgcagctgtttgttgtttatcatagaagcaatgtggcatatggttaacatgaaatttgaagaaaagacaaaatcactggctttgccgacatatctgcagtgtctttgttttgtttgttagtactgcattgtctaaatctaaatcgtgacaataaaacaggataattatttttcattatgatgttctttggtaaatatgtctataaatattcttactaatttacaaatatatatattcatgtaaattttattattcaagagatcttacgcagacatggttttcacagtaccattaagattatattcaactggtttgtattatatttaatttataaataaaaattgtcaattgataataaatggaaagaaaaaattaaaatgaaaaaaaatccatatccattcaaataaaatatctcgcaacatacgtttcatacgacaaatagtgtgacaaactgacaaccacttgtcagaattgggctctcaatatggggaaaaaatagtcaatgttattaaaaagacaaaaataaataaataaaggaaaatatatctaaaatcaataagagattaaaaaatagaaataaatcatgtatttggcacataaacaagtcatatatcgacaaaagcctaagtttggtagatgaatagtgattttaaatggtacataagcaattcaaatatgtatagacaaataagcctaattttataacatttttttgttttatattacaaatctaacatttttttaattcaaatatcccactatcctttttgaatcaacagaaaaacatctcattaaactaaaaaatctcagattttgaacatgtttaggtaaacaaccatcatctcgtcgtttcttttttaccaaacatcaattttactaagttatcagaaaaacatttttcttttatcaagaattattcaaaaaccgataagtttacatgaaaaaagaaagtaatacagatacgcgccttcttgattaaacaatcaatccgaatattgttataacgaataaaaaaatatattaaaagaaagaaaagaaataaagaaagatcgaaagtagccatttgaatattgatatttgattcttaacaaatttatctcatatagtaagtatccgtctcactaaatttgaaaatacattagtcgatatataattattaactaattataacggtatttagtaacggtatttaccgtgcgcggggactcatctaattaaaaaactaaattgaaaaaacctcaaaaaatagtagttaccacttaccagcaaacattcaaaaaaaagaaaacagagtatgactgattttaaagtttctaagaagaaaagaaggaaaaaaatcaccgacgagtctttgtgtttccggtcacaattaatgaaaaccatttctagtctaacttttgttgtaacgcaagttttgaaacttattaattaaagaagactaataattattataaaaccccatcatcactttacttctccctcttacgtctctttcaatttcctctctgcagaatcgcttctctctctctctcggctccgccgattccgagttccccgattctcggattcttctgaagatttctcatgtcaggctctcttgatcgatttgcgagaccttgtgagtaaattttaatcatcccctttctctcgattctcgctatttcgaaatcacgcaattctggtttgttagattgagtttgagaactagacgtagacgatgctctgagttttagattttagggatttgttgttgttgttgttgatgttgattgagattttgtttggtttaaggttttgaaggagtttcaagcaatgatgagagaagagaaaggagatcagatttcgaagtttcagaggatgagaagaagacaagaatcgggaatttcaatttcaagaagaaagctgcgaaagcttcgagcaaactcagacattcgttgaagaagaaaggtagcagtaggagaagaagcagtgatcgtactttctctcttaccattgaagatattcatgatgttgaggaattgcgagctgttgatgaattccgtaatttactcgtctctgagaatttgcttcctcctacacttgatgattatcacatcatgctgaggtgagactttatttctgtcgattcatttttcatgatgatgatgatggtgatgatgatgattttgatgttctatgttctctgttagattcttgaaagctaggaaatttgatattgggaaaaccaagttaatgtggagtaatatgatcaaatggagaaaagattttggtactgacaccattttcgaggtgaattacatgtttttaaaaaaaatcttaatatgttacttttaatctcatgtgatggttttaatctcaatatgtgtgttaataggattttgaatttgaagagtttgatgaagttctgaaatactaccctcatggttatcatggtgttgataaagaaggaaggcctgtttacattgaaagattaggactagttgatccggccaagctcatgcaagtcactacagtggaaagattcataaggtatcatgttcgagagtttgagaaaactgtcaacataaagcttccagcttgctgcattgctgctaagagacatattgactctagcacaacaattctagatgtccaaggcgtggtacttataaaaccagattctgttagtttttcctagtgtagtgtttattgtcctgcatcttattacttataattgcttaacttatgttttgcaggggttcaagaatttctctaagcctgcgagggatctcataatccagctgcaaaagattgataacgataactaccctgaggtatgagctggttgctattgattttgttacaaattgtgtgttaattaaataagtttgataaaagataatgtgaggtaatatttcacctatatgcagacacttcatcgtatgttcatcatcaatggtggttctggttttaagctagtctgggccacagtgaaacagtttcttgatccaaaaacagtcacgaagattcatgtaaatttacccttttatgcatatccatccacatttcctcaagttatcctaaagattatctttaatcgtattaactattgtcgatgtgttgttgttataggtcattggtaacaagtaccaaaacaaactacttgagatcattgatgcaaggttgagacatctcaatcctcttgtttggttcacatgagtccaaaatatgatatagcttgtttggttcacatgagtccaaaatatgatatagcttcctaaccatttttggaactttttcagccagctgccagattttcttggtggcacttgcacctgtgcagatcgaggtggttgtatgagatctgataaaggcccctggaatgaccctgagatattaaaggtaaaaatcgatcttccgcagcctattttggttaaaaagattaacaccagacagaatagtgttacttaactgatcttccccaccttgtagatgcttcaaagtggtggaccgctctgcaggcataattcggctctaaacagtttttcccgtgtgtcttcatgcgataagccatctttttctggggtaaaggtcttctatacttaagatacgaaacttgttttcaaaatttgtgtcttaccgtaacaacaatgtcctcattggctcagataaaagctagtgacacctcgacagcagaatcagggtctgaagtggaagagatggcttctccaaaagtaaatagagagcttcgtgttcccaagctgactcctgtttgtgaagatgtaagaattttttttgtacggaagtgaaaatcacagtatgcatttcagactacttactacctgatgttactttcagattaggggcactgctatatcatatcctactgactcatcagagtatgattcaccaatggtggacaaagtcgtggatgttgcttggatggcccatgaaaagccaaaggcttcaaaaggtaaaagagaggaatctaaatattatgatatgtaaatcagaaatcagatcaacgcaaagtttaactgtaatggaatatgtttgtgcaggttcagaggatacacccgattcgggcaaaataagaacggttacttatatctggaggtggctaatgatgttctttgtaaacttgtttacgcttctcatatctttggctctgccacagagagaaggacactcccagtctgaatcttcagttgatggaccaaacgctagagagtctcgtcctccttcaccggcttttgcaactatcgcagagagaaatgtgttttcttctgttgtaaacagactaggagatcttgagaaacaggtagaaacactgcactcgaagcgtcatgagatgccgcgtgagaaagaggagttgcttaatacagctgtttatcgcgtggatgcacttgaagcagagctcatcgctacaaaaaaggtctaaaggaaacctctcaattccatgttaaatgacttttattaattaatatgaaaagcaactgtctttgtgtgtgtatattaacgccaacactctccaatgattcaggctttacatgaggctttaatgagacaagatgatcttttggcttacatagaccgtgaagaagacgagaagtatcacaaggtaaatcatttaatttctttcacccacccaatcacccgtaattttgtgattgtttttttgatatatgaagagaatacacttacgtggtttttgttgggaaaacagaaaaagaaggtgtgctggtgaagactgaagagagagagagcttcgagttatacgagttacaagaagtggtgttgtactctgctttatgagtaggttcgtaaacaccaaccctatagagagaacaatgtttatatccaaaattaggtctcataagcaaagatttgatacttttgggggaaattttagaagaatgttttttcagttaatattcaaagtacatttttatttatatcagtgacaccattttctcccacttccgtctctgctttgcctcctatcgcagttatcatacagtatttgtttggtctatgcttatatgaatgagtcatgatgaaaaatgtgtctatttataatttaagcttgattcaaggctaactccataaaagatgtggtaaacaacataggtagtcggttagtcgactttttgatatcaaaatttgaatgtctttgaaactactaaaataatggctgactgagttagcaaatttgatatcaatgataaaaaaaattccccaaattcacataaaaattactatttccgtatttcatttcattgtggtgccaaagaaaatcgaaaccatcgaaaatgaaaatcaagccagctaattttaaaataatcaccagcatcacctaaagtagaataatactaccaaactttagtcatttgtgagtttttactttttttgttacctcttctctacttccaagtcagctatcaagactagcacgagccatagccaccaatgaggccaggtctagatccaagtacatgacatcgaacggtgtcgttttccgaatcacgtgctctcttcttctgcgttttcaagaaactctctaccaccaaacgaaactcttcactactcagcctatctatcggcacctctttcgccgattccgttctccgaatctctatcaccggccggattatctctttcttcgtctccgatttcgtcctcctataaattcccggtgttgtaaccatctcccgattagcctcatccactaccacttcctcatcatcctctgggaaatacgccggaacgatttgcttctccgattcatcgtcttccaccactttctccgactccgttctctcatactccattgccggccggcatatctccgatttagtcctcctagaaattcgttttgtcttaaccgcctcatcaacctccgcgttaaacgtcggaacgatttgcttgttcgaatcattatcatcaactttcgcggcggaggcgtttgcgatcacggtggagaaagaagaggtgtattgatcgtagagatctggttctgtttcgacattactactactactctcgttgttactctcgccggagagaaagaaaatcaaaccgacgattaggttagcgaagaaaaagacgacggaacgatcggttattaaaaccgctccggtccaataaatccagtcgccgacggtttgtagtataatcgccaccgtcgggaaccataagtaacacagaaaagctacgccgactaaacgaagaatgcctctgaagcttctacggttgttgtatctcctcatcgcttccgctttctccgcctccacgccatggaattcgaacggcttctccattttttggtttttacgcgctctgtttttgtttgtctttgtttccgtgaaattgaaaacagagacagtataaatgcttggtttgatgattaatactacaggttttgagaaattgattacgatggagatttggattattctgggaaaatgaaacgggaaagtgatattttccgggaaaattgaatcgggaaagtgaagcgattttgttaaatgagagaaaatattttattgtaagaaggagatacactgacactgatacggaaatacgatcgcaggactagtctttttatatatcctcaataagttaaaatttaatgactcttttttgacaatttaattttatactatggttttgctttttggacacccaaccaatgataatagtacaaacatatagtaatggttcttttggttttctttagtattcaaaatttagaaaagaacctagagaatactttgtttgttttgtctctcttcctatgaaaacaatgattagtttgtttactaattgccatccataactaattaattgtggtatcgaaacaatattttcactatatagaaacttgcacgaagataaagtgactgatccacttaaagatactgaatttgctatagaatatactgaacatatttcaacttactataatttaacgatgccagatataacgcaatattcgacttcatatttgaggataaagttgattatattacatggatatggatttatctaaactagtccatgagaagcccactaatctttttaagaatacacgtgaaagtcacgcgccgtcaaagtaaaagaataacagacttatccacacattaacgaggttcgtggatcccgaacaaaagaataacaggaaaatggtcgagaaccacgtgaaaataagatgagtcatgtgccctaacaggactttttacacaatacacatagtataggggggtatatatgcaaatattttaattaagttaatagcttaattcataattattataaaattgagggagctattagtgtttactgcagacaaaggctgatttggaaagatcaacagagtcagataactgtccccgaacaaacaaacatacgaagtgcattattttcgacaaatgaacgcaacgaacatttaaattgtatttgtcccagcaaaattaaaatttatttaatccaacacattgtatttattccaacataattaacaaactaattagatatggttagacatatagtttaactaacccaacacagcgtctttcatcaatcttatgctaggaaacaggagaccattagtttatcttaaaacaccttctttttgtgtgtctaaagtctttaagataatattttaagactcaattttagtcaagatcgcaaatcattgataagaaaggatctaagacttcaaccaacgaatgaatttagtttaactcaattattcagattcaactgcatcgatcagcatatgaagtatgtagagatgtcaaaacccaatttactaacggattaaaaagcccacaggttttccttttgaacttcagtgaaaactttggtagcttagttaagaagcagaagactccagctgagaggaaatgggcctaaaatagcccacacattcgactgtcttcaaatgggcttgagacggcctgatattggtttggcttgatattggtaaaacctctgattgagctggagtattctgtttctgttcaatattggtcacacaaattcagtagtagtatacaattgggcatgatcacagaatcttcaacttcaagtgccaaaaattttcttttatgttctcaagcaaaacatactcctacgccatggccacagttcaagaatctgctcactattagtacgccacttcgtcgtcagaagacaaatgttttgcctgataacttcagcagacacttacatagaccatgatcatcatgttcaacatcttataaatctatgtaaaaatgatctcaatcaactaatcaacacaccacttacacatcaacaacaactacctacactagtcattaatctcatgccataactttccaagattatcacaaaatgtggcaaaagccacaacctttctttcatttgcaattaccatttcataggcattgttgctatgtttctctcaccagtgtatatctatctattatccatcacaaattcatgccaaactcacaagctaaagatttgtccttgagattcgctactacttgtatcattgctctgagatcctagtctcactctcaatgaaaccaaatagatcttaaagaaagcataaccaatagcattcagaagaaaattcacatacaatttttaacagcctaagcagtatctcgacttcaattgaaaagacaacaaattcaaagacataagctttaccagaaaagactcatcatttcttcttccctttgggacctttacttttcttagtaggcataatgatttctcctttaagcacaggaatctccataatctcagaaagcccagcgaacctcttacgaaacttctcaacttgatcagcatcaaccatcaaagccgaacgattcccgaggtaaaacggatggttacctgaccatacatcaaccacatactctttctttgttcctcctgtagtcatcaccagctctccattgcagtaaacctttgcgtcttcgtggaattcaggatgcaattccttcttacgacacgttatctgaaccaccgtattgctgcttcttctcaccgattgttttcctcctttcactgccgccatcaccggctaattttgaaaaaaaaacacaaacaaatttagtgattttggggaaggaggagaaatagacgaagaatgagaaatcgatttcgagcttacctttcttaattgcagagaaggaacacatgggctaatctgaagaaacgagttcgggagagaaaccgccatttttgtcttcaggagctatcttcttcttttttcctggtgatagagaagaaacgaagtaacgattgatggataagagaatgaggatgatgaagtgtattggagttacgtttataaccctaaatactttgaagatatgtaagggtaatatggtaatttacatagagacttccttttgttctgttgatacactcttcgtcaatctaacgcttcttcatttttctcgagagaagcaaaactacatatatatatacgcacatacgtacacagttcgaaggttttagctgcgagtatgaggaaggaactgtgtagaaactttcagcgtggcaggtaaatactcttttcatcatcatcatcttcttcttcatctgttctagtttttgttttgattcaatttgttgttttataagagtttttgaagtttgtttcgattgctgaagtttaggtttcgtgttctatattctggggtttaatttgaaatcaatcgatgtgcgaaggtggtaatgtgttagaaaacgatgtctattgagctgaaatctaaatgaatcatacagtttattgactttgatagattctaatcttcgtttccgccattaatgagggttgatttgcttcggaagttatgattagtgatagtagaagcttagagacgtaattattggactcatcgtcctttgtgctgtttttgcagttgtaggtatggggaaaactgtagatttcttcatccacaacaagctaagccaaataatccctttggctttggtacacaaaaccaacaacaacaacagcagcagcagcaacaaaatagttcgaacccttttggatttggtgtacaaagtggtggttccagcagaccgaatcagttccaggtcaatttgtttttttcctcttttaagatgcaagtattgctttgatagaatgcaagttatcgttcggctttggatgagaaaaatggtgcatcttctttaagaaacgaaagcattttgcctgttgaatgaatggtgacatgatgatgcttttgcaaatcagaatacttggtcacgaacggcttctacacctactggtggtggtgctgctgcttctacacagcagactggtaaacagacgcagccggcagatcataagtgagtgtatatatgtttacatatgcttgttctatcaattatcatccttttagccgtttgtttctttggaaatttactgtttctctcttggttactatacaaagatgcacagatcctgctgcgtgtaagcgggtaatgcaagacgattttaagaatgagagacccatgtggaagctcacatgctacggccactggaaatagtatgtattacttcatttggtttagcatccttgatctttatccattctttataaacgtgtctgattttttctatcttttttttcttctagttttccatgtgatgttaccggtgatatcagctatgaagaactacgtgcagtggcatatgaagaagctaaacgaggaatacctctacagtcgattgtgagattaacctttcttgtgtttgttatactttacactggttttcatttcatactgataagacataagttgatttcctcttttcctggcttattatggtgcattatataggttgaaagggagaggaatctgcaaaattccaaaatagccgagtttgaaaactttctacggaatccatacaaaggctctgttaccgccaatcaaagcccgtttgctgcaaccactcctagtatcttccctcagtccagtcagatcaattccccttctccagcattctctggctttaatcaacaaactgcattctccaataccaatgcgggtggactcaggtatcaacttttgtgggatttctccaattttcatatcccaaaaagtttgtgttgccttcaaactaactctcggtttccatttttcctcgacatagttcatctggacctccgaatgcctttgcaagcttcaatcaacaaactacattccccaataccaatgctggtggagtcaggtactaactttctccatattccatattcaaacaagtttgtgttacctttataacctcttggttcccatatttctctttggccaactattcctctgcatagttcatctggacctccgaacccctttgcaagctttactcaacaatcaaataatcaacaaactgcattctccaataccaacgctggtggtctcaggtatcaacttttgtgggctttctccattttccaaattccgtaaaggggtgccttcatgaaaactctgtttccatatttctctctggccaatgattcctctacatagttcatctggacctccgaatgcctttgcaagctttaataaacaaccaaatgctttcagcgtcaacactcctcaacctgttccttcaggtactacttctaatgttaaactttgcttaaaggccaagagactcgccatcatctgaaacctcttttgcaaatgatcacaggtccctctggtttccaaaccaatccatcaacaacattcaaaccagcatcatttggacctggacccggatttgccacaactccacaaaacaataacatctttggtcaatcaactccaacaccggctacaaacacttcccagaacaatcagaccgcattcaacttcaatgtccctgttgcatcttttactgctcctgctataaacacgacaaatacatcttccgggtaagtcctcaatctgtttccaggttttttctatagttaaaaaccgttgttgaacatgttgacagagttaatcaaaacatactatgatgtttcatacgtttctaacttgaatcatttgcggcagaaccgagctgcaaataggtggtgatcctgttgatagtagtatctggctaaaggagaaatggaatccaggggaggtaaattgctcaaaactaatcatttaagttgtttccaaaaaatttattgctcttagattaatttgttgcttttgttgtgcagattccggaacaagcgccgcctgatgcctttgtttaacaatatgaagaatgtcattgaaacaattacgtataggccagagtcgcaaattggcgcagaagagttgttttttcttggtcatctcagatttgtgaccaatgtagtttctccacaaaatccaaagttttgaaccttaacaataatttcaatgcagataacagaaactataaacaagagaattctaaaaatcaaatctttctcaccaagtgaacatctttcaactacaacaacattcccacaaaatttgaaagcttttcttaattccactacaattttttgatcaacttcaaacaacgatctcgctggattttctctttttcttactcttcttcctctcttccgaacccatctctcgatgactcttcctcttcttcttagagcttagcttcgtctcctttgatttaatctccctatggatgctcttcaattcaataaaggcaccggaagctcgtcgaaggtacgcgctaacatcttgagaggctccattctcagaagaaacgaatccggagagaagagtagccgcctttgatagagagattggctttgcactgttaactcttccggtgaccgtcttcatcggaacaacaagctcaaggaagatggtcacaaattagggcaagttgaaaaataaataaacctttttatacatagaattgaaaatgggcctagtggaaaaagcccaataagaaaaaatgtcatcggtgtctctcttataaaggtaaagcgcagtgtcactcacagagtcaacaactctctctgaattaagacgatggcggctgcaatggcttctcatgtttcgacggctcgatcaccggctctttccttctcttcttcgtcttcctccttcttccccggtactactcttcggagattctccgccgtttcactcccttctcctgctctccctcgccttcgtgtttcatgtcaagcctcctccgtcacttcgccttcttctccttccgatgtcaaaggttagccttttaggcatttcattatcatttctttcggaaacttccccaaagatcagattttgtttatgaaatttgtatgttggtatcggattttgattttagcattcgaaaatgtgactcattattgcctctattgattgagaaactacgcaagtttgatacttttagatgctttcatctagagattcatttccagtggattgtgagatgataagattttatttttttgcaggaaaatctgacctgaaagactttctggcaatagatgattttgacacagccaccattaaaacgattttagacaaggcttcagaggttaaggccttgctgaaatcaggggagagaaattatctaccttttaaagggaagtctatgtctatgatctttgcaaaaccttccatgaggactcgggtttcgtttgagactggttttttcttgctcggtggccatgcgttatatctaggtcccaatgacattcagatgggtaagcgggaggaaactcgtgatgttgctcgtgttctttcacgctataatgacatcattatggctcgtgtatttgctcatcaggtatgctggtgagtttttgattgattaataagggaacattagaagtgtacaaacatttctatggcttgttctaatctcagaaagataactgcattctcatgtgtgctgtatgttagtggcatggatatttgtttttcaactcttttctatgcttaagtttgcacgtctttccaatttcagaaagatgaatgaacaaacttgaatccacttcatttgcaggacattcttgatttggctaactactcgagtgtaccagttgtcaatggtctgactgatcataaccatccttgccaaatcatggccgatgccctcacaatgatagagcacattggtcaagttgaagggacaaaggttagttaaccattttacccgctgcttgctattatctatgttcctcctcatatgtcgtcaaaaaaagttctacctcatttactgcttgaaggaaactgaaacaaaaccaagattatttcatgaaatctcgacattcaagattgtccattttaaagcacagcttgtattatgatctcattgttctatgttttgcatacatgtaaggtcataaaaaaatgttatctatactaacaccaattcaacaaacttaaggttgtgtatgttggagatgggaacaacatggttcactcttggttagaattggcatccgttattccattccactttgtctgcgcttgcccaaaagggtatgaaccagacaaagaaagagtttcaaaggcaaagcaagctggattaagtaagatagagatcaccaatgatcctaaagaagctgttattggagcagatgttgtgtactcagacgtatgggccagtatgggtcaaaaggatgaagccgaagctcgccggaaagcattccaaggattccaggtaaacataagtttaatctggcttagttttggtgcaatgctcggtactcttactaaattacactgcttcacgcttacatattatgttcaattgcaggtggatgaagctctgatgaagttggcgggtcaaaaagcctatttcatgcattgtttgcctgcagagagaggagttgaggtgaccaatggagtcgtagaggctccttattccattgtctttccacaggcggagaatcgcatgcatgctcaaaatgctataatgcttcacttgctcggcttttaaacctctttgttatcttagctctcgcatgcggttggttcgtgtaccacattgacttaataatgtactatttattaaccttagtttgagaaaccgtatgatgaataagatttgtggctgattcagctgggaatatgaatgagctacttttctatatatgacacatagttataaatatttataactagttattacatctctagatctgtcttcatcccataccatagcttgatcctgtacttgttaacttaggttcttaggctgctaggttctgatttgcagggtgacttctgataatagggtaaagaaaaatccaaagttttacaccatcttacttatcgttcgtcagcaccaaatttgttccatgcttcctggagaatcagaaaaagccggtaaatgactgatttgcagatggaggtaactcaatcaaatggaattaattttctatcgaggatttatggagacaaaccttgagaaggtcaaaaactttctcacaaatgtacttctgctgtgtggatgcgccacgttgttgaagcttgtcgggatgaacataaagagttgccttgcggtaggcttttctcacagaagcgcttgagacaagatcagtgagaggaatcggtttccatccactctctgctccaagtatctgcaaagaacatttgtttaagacttatcatctaatccattaaagaggtaagacttaagagctgtggacatatggggtaaacaaattacatattggagtgttgagatcaacgcccgtaagttgttttcctttccactcgaccaccgtttgacatcagcatcaagagcttccgcgagtctctgtaaattcaatcagacaaaatggtggtttagtacaaccaaattcaaagatatatgagaattttctgatgatataatgagtattgtctatgtgagtacatttctctctgtctgctctttctgggttttaagatcacgaagtttcttctctgcaagagcctctgcctggaatgatgacaccgaacaaacaatatgttttaagtagagaaaatagtataatataaaatacagatgaacagataatgtacaactgtacatactgcgcggtcagatgttctctggtgtctctcagatctagctttacatctctggattggttcacctttggcttcaacacgaaaatcatatgtacaagtcagtgtatagctcaaaatcttggaaacaacaatatatatatagacataccagtctggtttgaagaattggaaggacctgaacttttgttctccgtaccctgctgaaggatttcatggatcaaaatattacatgagagctgttaaaagaaaaatattcataagaaaagagggcttgggcttgaaactcacagaagatgaggagcctcgtctttcaccagaagagctaaatgacttgctgccgccataactttttgcttgagaagcagcagacttaccagacaatgctttttccatggcacgttctctgacctcagtgattgctcgttctacagcagcacgctcagctctgagtttggcttgcattgaagccttctcagctgatgataacttatcgtttacctcaacagatcccttttctgatttccttggaacctctctacggtgggctactgcctttgccttctccattgcagtttttcctgctctttccatagcatcagcaaatgccctttcgcgggcttcacgaatagctctttctaccataactctctcttgctttctttctctctctttctctcttgtttcatctatctttttcagatgttcctcaactgtctctgctttgttttgtgaaatatcagaagtagcatctccctcttcttccatagatgatcgacaactctcctctccctcattttctttcatgtttccatctgttgctgcgccaatatcagaagtagcatctccctcttcttccatagatgatcgacaactctcctctccctcctctccctcattttctttcatgtttccatttgttgctgcgccaataatttcttctccgtttggaaaacgacaggaagactcagctgcctccacattgcttctatatgtttcattctcttgacactcaaactggtgctctagttctttcttatctccatttctctctacaccaagacttgttttcatttcatcactttcttctttggtttcctccaattcgtcatgcttactttctgcctgacttgcccctccatcctgcagtgatctgtcgtcatcctctacaacactccaaccactttgaatcgaatcagaatctatttcttcaatgtgttcttccgtgttactgacagcactagctttttcagggaattgatcactgcgatgttgctcaatgccaacctcctcaatatatgaatcaccttgtctcatttcaaaagatgacctgctggtgtcagtatctatactaccatcgatcatagtttcttctgcttgttcctgtgtttgatcaaatctctccctagaattatttgaatctgtttcacttcgatcatattcaagcatttcagcatgagaatctgcatgctcatttatctcattaagttcagaaagtccttgaacccagccagcttcttcagatgcttcctgcacatcttcttcttctaggctagccatttctagttcttctcctatcagttcacggaccaaagacgttttaccttgcacttctaccttaccatcctcttttctacaatatgtttcttgtgccgactcatcttcattttctctggtatgtgcataggcttcataattcgttcttactgtctccacctcaacctgttcatatttttcttgagctttttgatggatatcaagatgtcccctttcagattccactaagcagtaagtttcatcctctcccttagtatctgctgtctgaaacatctgcctaaacatctgtttaagaacggtccaattttcttgcaatcctgaatcactagcttgtccagatgtgctttctatttcctcgctagcatgatggatccttacaccttcctcatgaaaggacatcgctgtggtttcattttccgcactttctagctgccagggcctgttgtttcccttcggagcctttatcatattatagacgtcttcagaggtcttccaaactcttcttcgcctgggaaccttgtgcactgcctcttgcacctcatctatgtttcctggctcagaaatatttactctgttaaaagacaccatagctccaacactatcatcggactgagttttattcaaactcggtgttggggtttcttccacttcccttacatatgttttggaatcatcaggaccaactaacatctcctgtggctcagagactatctccttctcaccttcctgatctagaacattgcaagtgtggtcaccattttcttggaaatcttttaccccagatccatcttcgaacttgcaagcacttttaacttgccatcctgtttctttctccatattctgagaagacctttctgtgaaagcacatatggttgattcagacttctcttcaatattcatttcgctcttactctcagtttgttgtggggtctcttccacttcccttaagtatgtttctatgactggaataccagctagcatctcttgtgagtcactttcctcatcttgaaccatttgagtgacggtagaattttccttctctgtaaactgtttctcatccttttgtgaaactttgctccccgtgaaggcctctacaacacactttaatttactgccaagctgtccaaatgtatagaagggattctcagttattggttgcacctcttgtttcgtatcaggttcaggtttagctggtgcaaggttttctggctcctgctgcttactattcataactgatttgaatatccctccaggtaattcccagtgttttcgacctcttcgtgcttgttcctcttctagcgttatgatatcttgctcttctaactcttctggcttatggtctgaagttgattttaaaagtccttcaggaactccccacagcttccgcgctcttttagcatgctgatctccctcgtttgaaaatgattgttcagaaggtttcaccatttcaccgagaatctgagaattgttgtctctgctttcttctgtaattccttcaacctttgtgttccctttattctcaattttagagtcatcacaagatttcagttttgcacaactgcgaaagccggactttttcttttccatcatttgttttgcaatattcattcttatttgagcctcttctatagcctttttcagtgctgcagaagactcagcggcaaccgaattttcatctgtttcagcatcgaagtatggaggtgaacttggagaatcagcatcttcagtttcatacctttccgaaggcccagaatttaaacccgataacctttcagaagctccatgttcaccattcaatgtacactgaaagcttgaaggcggtttcacatcccgatattcaccattagaaacggtcttacacgtggagtcatcacgcgtactgcatccatctcgagcaaaaatgttctcaaaatcaacctcagttttagatccctgctttctagaagccttgacttcctcacgaccctcgttacatggcagcttcttctcaactgctggaataggagttgatttactttcaatcttgtgcaacaaactcgtattatcaaccacttgagtcggaataggaccaggcatagtagcagggacctgagtaagatgagtagccccattctcattacgagggaccgtctggtgatatgatatatcagagtgcttcatcctaaccatttcaggtgattttttcccctcgttgcaaagaggaacatcagaagaatttccacctttcctacgattcctacacattagagaaacaagccaaaagctcaccaacaaagatccaacatcaaagtattccactaattcaactagtttatcaaagatgtctccagcaaaacatcattcacaaatcacaatcatatagcctttaaagaagctataactacgccagtacttaaagagagtaatatcagcactgaatcagcaaagaaccctaaatatcgtagaggaattataccttttcttatcctcgttaatggaggttttcttctcggacttgatgatcacctccttaggagtaacagcaaaatcgcaagctcctaagccaccaaacaccgaagagtaatcgagcttagaactccgaacatcgaccttaaccttaccaacgttcagctccggaacatccagaaacggaatcgaagacggagaaggacctgaacctcggaaaatctcaccgtaatcaactaaaggagatttcgaattc

SEQ ID NO: 37 - DNA, 97554 bp, Arabidopsis thaliana
aagcttcgcagccatcatctctctcaaacaacaacattgaaaattttcgatcctggtgacaacaacaacaatgcttgataacataatgggcttcgatttctgaaactgtataagcccagttaaagcccaatataatcattaagttcgcaaatgttatacgtctctaataagacgacgacggatttagataaaatttgagcccaaaacgcaccaccactcagcgttttagacctgtcttctccagaggcagagaaggagaagcttcctcatatggcgttcatagccgaagaagccgtttgtctattccttcctctgaatgcaaatcatcatgactcatcccaaagatgagaatttgaaagatgctataaaggttttactatgcttatacgaaaagggttcaaatagacaattttttacgtgcattgagaagaaaaggatgtgattgttccacacactgaaacacgtgatacgaagtgtaagtctatatacagcagatgggtatggatacagaacgactaaagatgatgtattattgtcattgaataactatatgagaaaccaaatgttcttttaccttctgcagaattgaatgtcatgcactgttaaactcttcaaataaaaagtctgatcagctttgtgtttacaactctttcttgcgtatcttctccatctttatagatagttattttcaacgatcagcatcctattctctaatacctggatttgtgacgtttttccccaacaatgttacttctattttagtgatgttctcttgcaacccatcgagaaagggtttaatcttgcatgataagctttgtggatgggttgcagcagaagatgactacaacagaagttatattgttgggtaaaacgtcaaaaagaacagagttcttaaaaccatcaaacaaatccaggtagaagagaaaagtatgttgctcattgaacaatatcaatcaatagagataaagaacatatgcaagaaaaagcctaaacacaaagatgaccagaatttctatctgaagaatcgagcattgcatcacattcaattaaagcagaagaagtacaaaaaaaaaatgttaatggccctgcatatccaacatctcatcaagtcctttgattctctctaaaccttcactaatcagataccgaatcttttgtttgtcattgcagtctctgttcttttccatctcttgcctaacagtctgtttcagttcccctacaaaacatcaacacataaaatcaaacaaagtttatcctccgaaatctactaaacccctagatttcgagatttttaatcaaatggatgtacggtgaacgcaaatttattgtctatgtgacgaatctcatagatagaaaaataagagacatgaaagacacgaacctctaacatgaacaggagctctgtgagctatcttcaatgcttgtcggtaaagtttaagcactcgagcccggagaataaagctctgcagatctaattgaaccataatttatcaaccaaccgttgaattaagaatttacggccagagaaggatcgattcagaaagaactgaaatcaaaatcgaaatctagggtaagagagaagttcctgactctgagtcctgagttaaaagaaaaaagatcggagaaggaaagagtcacgtgagaaggacatgatgaagaattaatgaaaatatgtggtttaagtgtaaaccggtaatcggtgttaattgaaatcaaattatagtttaccaaccatctttaataacagttctgttttagatggtcctaattacggaagcccatccgaaccatcgtggtttaacttacagcaaacagataccaaaattaattaggtagctttgaataaatattaggtggtttagcatcgtgtttccataatatgattttctcagtgtacagcttcgcaatttctcaattgtttttggtccattttcgtttatttaaaatcgtttactagagttgttcgtcccttggttgactaatattctaccttttttttttaatttctttgaagcacgaaattgtaaacacaagatatcaataatttagacaaggtctcagtaatttaatatagactacgtaggatttaaaatatagtttcgataattaaaagacaatcatttaccaaaacgtgttactgaatgatttgtgttaatattattatcagaattcaaacatgcaagtatatgaagaagaagtatgtttatcgattgaaatacattgtattttttttctctctcttaggtgtttcaattacagaactttaaatgctaattaacaaaaaagtaaaatttcataaagctccaactagttcaatgcatcgttgataagttctaacttctaccttccttccgatatggctgaattttgcttgcatgtaggtcccaaatatcaccaccgtttcttaaagaaatgttatactattttgatttttggactattgaggcacaaactaaagtcaaattagtaattaactaatcatcatctttggaaaataaaaaaatgtgccgtttagcttttaggtagtagtaacaaaaagaagaaacttgaaacaaaaacaaacatgtcttccgcattttgattttataaagtcggccgtataaacacaaaggtctttcttcttcctttttagctctcacatttgaccaaaactcctccaatccaggcatcatcgttgactttttcaaactcatttcctctctttttccttcttctcacatcatattagacccaaacataaaaagaacgaagaatcctctgttcttgtctgcgaattttgctgttgtgatcagcgatggacattaagcatcatacttcaacttcaaaacctaagaacaagaacaagcttttgaagatgcttcctaaagcgatgtcgtttggacatcgagttccaccgtttagtcccggaagagatctccaccacaacaaccaccataattacacggcggctaacaaaatgtttttctctggtcctatggttcctttggtacctaacgcggctcgggttagaagaaacaaaagcgacgctgtttgggacgaacctacttcacctaaagtctcttgtatcggtcagatcaagcttggtaagtctaaatgcccaaccggtaaaaagaacaaagcaccttcatctctgattcctaaaatctccaaaacgtcaacgtcgtctttaacaaaagaagatgaaaaaggtcgtctttcgaagatcaagagtatcttctcgttctcgccggcgagtggacgaaacacatcaagaaaatcccatcctaccgccgtctccgccgcggatgaacatccagttacggtggtttccaccgcggcggtgccttcgttaggtcagatgaagaaattcgctagcagtcgtgatgctttaggtgattttgattgggcggttgagatgaaacatgaagaagaatcacccgctgatcatcaccgtggttactattctgacgacgacaccagaggagcttacttgagatacgatgatgacgaggatgaagatgacataataatccctttttcagctcctttagggttaaaaccaaagaaagaagttaacttgtggaagagaagaaccatggatccaccaaaaccacttcatcttcaaaccatttgattaaatttctttctttcagtatactatatcaattactgcagttcaaattgtataatgatcatcattcacaatgagtctggattttcttgttttgtgtatatatgtgatatattgtgatgatggatgatgatcgttcacttcaatagtcttttgtgaatatcaattttgctccgtccaaaaaaaaaaaaaaaaaactctttctcgctacatatttacagttacaattacaaattagtttttgtatttccttctgtgacagagagtatgacaacaaccaatgtctttccaccaccaaattgtccatatattaaatgtaaatcacaatcaaccattaatatcacatacaaaatgatgataatgtgtatatatttattgggaataatacaatatcttcattgggtaggtacaaatcattaacatctcattcttccttacggaaatattcaaatccgtcaaagtttccgtgccttcaaagttagaacacaaaagcaaaatcaaataatcaagaatcacactattttgagttttttttctttcatatcaaccggtttcggatggtacagacaaagaccaaaaactcattcttttttgaagtgagatgtaataaaattaaagttttgatacaaattaataagtgacacgaacgcctgagtaccgaagaatctctccaatgagttctcctttaccggaaccaacataacggccacgaatctcgccgtctctaatgaacaagaaagttggaacttcgataacattcatgtccttgagaaactccatacaactatcgttctcgtcaccgttcattctagcgaatacgactgtctcggacattgaccgggacagtttcagcacggtcggatacactttaacgcaaggaccacaatgttttagaccaacgtcaagcacgatcagcttgcctccagtgcgattctcgtcgatcagcttttccacgtcaggtcggccgtgcagctgcaccaccgcagagtggttgtctccgtagtatagaacgtctcccattaactggtccggttcaatacctgtcgatggtcaaacttttcaatttagttacgtctttgccactacattactttactaatttactaggtgacttattatgcttcatatacttttaaatggttagtgttacaacatcaaaataacaatattatgtacctaaagaaataatcatcgtacatcgtaatcagctaataaacgtgtgtccaaaaatctgctaaaatctaggtgattttgagagattctgttaaaagtttccttacttagagaaatttgttcaacaaattaggggcattatcggttaagtaaagtctaattccaatatgttttatttactttctagattaaatcgagttctctttttaatgagaaaagaaattagagataattcggaaattaccttcttcctcgtgtattttctccatgctcttataaaagctaaagtgaggaactttctcaatcttctctctccgacagagttctctggtcttgtcagattcatcacccatgacgagcaagaaaacgacgtcgttacaggtcctgctcagttccaccataaacggatatatcttattactctgatcactcttactcgtagcaaactctgcaaccacgagtttgctcttcgcatttttcaacgctacgtcgaattcctctccgctgtgaatcttttgtaccttctcgtcattcgccggtggtgtacccacctttcccggagacgccgctccagcctttattttcacggcggagaataatcttttcgggaggtttttcctccggaacagaggattagttttatggttaaagaatacgaaggaggaggtcgaagcaacggcggaggatggccgtgggactacggtggagattggtttggctaagaagttagcgacggtggccattgtttgtggtagtgtgtgtgggattggttagagatcagtgaatgatttaatgtggatagatgttttaaaatgggtccaagacttttatgtccacttgtttaacttgtgtggattgtgttcactgttgattagatttttttcgtgggaatataaaaggaatatgtgaacttggtgagattgctgtttctaaaagcaattcaagtttattttgttcaagttgttgtcattctggaaaattccaccagcatccaagtaagactaattgaaccggttggataaattcgacattgtggtttcttttccatctggtaagcggaaaatgtatcggccaaaagaaaacaaaagattgcgtcagctctcatagtttggacaattttctcagcttcgacccaaattgtccattgacttacacatgtatacgcgtattattgttgatgtcacgtacgaatataagcatatatccactcccggtggaactggaagtgaggtaaaccaataaaaattggccttaagcccatcattataaaagcccactatagaaatgacccagtgttttagtaaacttttacacacaaatgacacaatctttttagtaatgcacaaaacaaattggaaaaaaaaaaactaaataactaaataaaatatcgttttctaaggtaagccggagttcgtgcgaccacgctgctacccactaccgcaatgcgacaaaccataagcctaaaataaatcaaaatcaaatctttaaaagatacatagattaatatatcagacagttgacgacaataacatatgcatatcggacagcccacaaaatcccacacgaccactcccgactcactactacagacacaatgtgacacctaaggacttaccaaactaccctcattgatgatactaaaagtttatgcaactctatagacgtgctaatccggtttattccgagtttgatcttagaaattaaaactaaacagagacttgtaaactctacaaaattttaaaaaggtaaaggatcactccaatagaatttcccggctaattctttcagaaactatttaagaagagcgaaaaactaatttccagtgatccatcatcaatttaaacaaatcaaattgaaaaaaaaaaatacaataaacaacaaagtgataacattaatacgacgacaaagagattcttaaggggcaaaacatgaacttagaaagaaagaagaagaaaaacgagaacaaggaagaagattctcaatcattcattcagaagctttctctggttttctacagagaatcatatgcatcggagagaagattccagtctcaccacctctggtcaaataatcagcagtcttaaacaacatcttatgaacatcaacagttcctttaggagcaaccccaatagcagaaagaatcacaaccacaacatggtttctccaataagcaatccttcccatctttaaccggttccaccacggtttagacggtggtttagccaaatctttctccttcactacctcaaacccaactttcttcgccgtcacggctatatcagcgtagcttcttagtccaggaagtgcgtctcctctctcgatcccttgaatcacgtccttgtgttcttcgtcatcgtctctgtatttttcagtggtgacccattcgtaggacacgaacaaagatcctggtttcatcactctgaagatctccgagtatacttcttcgagcttaggagcgtgacacgtagcttcgatcgagtaagctccgtcaaacgtgttttcatcgaacggcatctttaaaaagttaccacaaacgacgttgcagagagaatcaagtccagctttcttgttgtgaagcttggctcgttgcacttggtactcgttgatagtgattccagtgacttgggccttggaatgggccgcgatggctctcatcggcccacccacgccgcaaccagcgtcaagaatcttttgtcccggtttcactttgatgagatcgacggccatttcttcgtggattcttgtggcgtctttgtcggattttccagggacatgaggagagaaatggaaagattgtccccatccccactcgtagatatcagtgacaagattgtagaacgtgtcgacgaagtcaggtactttctcggctgattcgatctcttttggtttgcggaagaaagaccagtattggttatagttgtctttgactttttctgcggagattgagccgccggagagatcagaggctcgtttgccttttcgttctgctggacctaggacgcatatgaaccagtagacggcgccggcaatgagaccagcggtgcagtagagagccaccgagtccattttttcacagggagaaagagagaagcagaggaatagagagagacgttaagttcacgactctgtatttgtgaaggattaatggtttttatttacaaaggtgtattgtgggaataatccagtttagaatcttgcaattaaataatcctttttaggaagtaaattaacagtaattttatggtccacactactgcctatagaaagaaattatattaaaataaataaaatcacctaaaatggtttgtgattgaaatattgttttaaaaactttagtagatcttttgactcttgttattcaatcaaaactttattaatttctgttaaaatgtattattagtttttgatttgtaaattaaaagtcttttaaaattttcataaatctgattttattagaatcaaaatttaataaagtcaataaattttttgtgttgtttaattaaaaaaaatgtatgattgttaatgaattaaactattgtgttattagtttataattttatacatttttcttcacaaaataaaatcatgaaaaaatcatcaaatagatatattgtttgagaaacttcactaaattatagaataactaataacaagattataaaaactctttagcacttgtttataatttatttactttctatgattttagtaaaggcatcaaaattacttttaaattataatccaataacaccttgtaacatcacaatttttcttgcgtttatatttgttttctcaaatcagttatcacaatgaaaaactacaattatttatagatccagatctacatgagtacatgtgaatataaatgccatgagatcattattttgcgatcttgaactcatatatctgagatgtttttctttttgtgatatccttaataagttctacaagcatttcactctttccacgttgtagggtcaggccagctccttataatatattttttatgtgaaagtcacctaacattttttcatatactgtaatcgtatgtatctctcgctctccgtacgacttcagatttgttttcatagaattgagactgtgtagtataacattgaatcatgaattaaggaaaaatatagccaatgaaatgtttgaaggcttgaagctctcggtccgggtataagtccgtgacgttgattttttgttatggtctcgaatgcgttaggttaggtagatacttttcttgatacgaattaacctatatcctaatgataaaactctgattaccaagaaaaaaagacactacaatcgttacacttttgtccaggatccgtgagctcatttaataactattaattagctggtccttggggtatccaattattgtttaaattaaaattttgttttttggtaaattggtcgtatcacatgcatgactcatatgatcgtatcacatgtctacgatgtgttagcaatctgtctctatgttaacacgaatcttgatcactccatattacagcttgtttttataacatcactcacgtgatctatttgctcacacgacataattaatgtgtgagtgaggacaaattcgttatagattggtccaattttatcgtattttatgaacccgatatataatttactctaataattccaactgtagaccataatgcacatacgacaatccatctccagctgttatattcgaagaaactatttttgaagcttgtcgaaatcatgatttatacattttaaacattatatataactgatatacacacagataagagagatgaaaccttcaaatatgttaataatcactttgtgcttttctctagaacacaaaatgtgacaactgtttgagagctttttcttcgcattaccaatgtaaactattcatattaattaattcagaattgcaactagacttgtcaagatatgggaatcatattcaacgtggaactctctacgagaaagagagtctcggttacatatcagctatatatgagtgtgctgatctgtgttatttgtctctttccctgttccttcagcaaaagatcaaatcaaaccaggcgaccgaaatagacatttttccctgcctgacccttggtaatggatccatgatccgtcttcatttttgctatttaaaatcaataatgatttcatcacgtgatattctctctttctcgtgatttgttaatgcaatttttttgggtgggtcagtagtggttgcgtaagcacctagctaaacctgtttcctatatttccccaaaaaacatgagtcgttaggcccaatttgtgatatataggcgtgctgggcctctaaaagactcaaacgttgggaccaaagtaaggcaagtaaacccaacgcagatacacctaaaacaaactttattcaaactaaaagctctttacacggacacagagaaaggttatcggattgtatgaccgtgacttaaaatgtacaaaagagccactgaaaccagtaacttatgatagtaaacattatatgatcctctttatcaatccaacattctcttccaaattagatttataaatcatgaatatgtaagctcctacacgaacaagagaatatctagacaatttacttgacggtgagtttcccaaccataccagcaccctggtgcggcgcacaatagaaaccgtaagagcctggctctgtcaaagtaacctcgtaagtctcccctgcaccatttagaagcgctgtctcatccatcgagatcttgcttgcgtccacaccactagggatctcgtcttcgtcgaacaccacgttatgtgggaaccctgcgttgttcttgaacacgatcttctctcctttagccaccgtgaattcagatggtacgaaagcaagggaaccgtcgtcggatcctaaaagaacctccatggccatcgcatttccagctaaaacgatcgaagctgctgttgccactgcgatgacaccgaaatccttcaaagaggacttcaaagcgagcttaggtggcgccctggtggcggaagtggatctactgatggtggataatgtcttaggttttgagctgacggcgagctttaggccggtgaaagaagggatggtgacggtagctgatgtaattgcggccattttctttactttttggggtgttttgttgatcacttgtaaagaaatgaaaacattatgggatttttgataagatttgaagagaaaataaagcgagagagttatctgcatgtgattggttaccctagatgttttgtgaggtgacgtggcattgtttgatagctttgtctaacgttgcataagtagataaggagactttgaacattccaagttttcattagtatttcttgttcttgtggtatttatattacttagttactaaccaacgaatcgaatgctaaattgctaatataacctaaacctcttttttaacatgcaacataaacctcttgtttaacaggaaaggtttacgaaaaaggattaatacattagaacatctaaaattcttaaataaataaagactcttcaagtttggcaagtctagcctctcactgagcctagttaagcaagcatggacaactacaataagctagaaaataaaagaaacggcgaggcgtccaatcttaaaagagagaaacgacctacaacaaaacgacttgccgttttaactaaatcacctaaaaagccttgccgtttgtcatgtcaccatccctaagtctcaacgtttctctgtactcattcaactccctctgatacctttccttatccttcaatccaatgtcttgataaacctacaagcaataaccaaaactcggttcagttatcgatttactacaaatctaatttcatcactaaatcggtaacggtttaaaagataatttgttaccattcgttcttcggtagagagattgctccacgattctccgataagtttcgtaaactctctctccttgttgggataaagtgatttgagcttgcaatgtttctcagcaaagaagaaattgtaaccgctccggttcggtttcgggtaattcggatcttctctgcgtctgcttcttcgtcttttacctaaacgacgccgtctcctcccagtttcaacataaggtacaacggcattgtttagaacagcggttggagatgatgatgggccgggctgggccgaatgataaagaacgccgttaagaatctctgagcccaacttaacttttaccagataaccacaatcgaatttgccttctattgtacctatggctgtgaaactcgacgaacctgtgccatgtattaaatatcacatgtataatcataagcaaacctagatacattatcttataaaaaatttctatgtgaaccaaatcttatagctactggtctggtccacgtcatcggtttattatccaacaaaatccaaatagatttgcatcaaacataatgacagtgggaccattatgattctacactatatttgaaaagtattgcgataaacactaaggtttttatgataagtacataaagctaactagacaattatcatacgaaattaaactgtgcccctaaatataagtttcacatatacataatcattaactaagaccttaatcattttttgtcataaaatgatgatataaagcatagaacaaagacaagtatatactagatattgataatacgtacgaaccttgagaaggaggatgagtattatgatatcttatactcggaggagtatattcgacgagcgccatttctttgctcgttgagggatttgcatgaaatgtagctgcaaaaattgattatcttatatgtaacataaataatcgtcgctaaataacttatagttccaagacataaacaaaattacaataaccatatagatagaaatgatgacaataattcgggtatatacaatcgttgaactcccacgtttgtagtaagaatgtgtcccacgattgaacccatgacttcacataattgaaaagttattcttattattttattatagattcaagcctttcagactatcgttaatgagtaacaacgaattgaactttctagtcctagggcattaaagacaatatgggaaccatcttatgattcattgattagcatttatcaaacggttgaattaaagattctcaacagaaacaaatctatgataattgaagaatataatgaaatgtatactatatatatttaaaagtaatcaattgaagaaggtttgagaaaaaaaaacaaacctatgggatgaagaagaggaccacgagcagtgaagagatgaacttgttcgtaatggaagagaagattgagataatgtttccttaagacaaacgaagcacttgttgttgtcgcagagaatctaaacactcctccaacttccctccattttttctctacgactacctatcaattcaacatgcattttcaaaacaacacaacatataagaaacgataataaattaccataaagtaaaaaaatatctgtattgaaaaagaaaacaaaaagtgttgaccttttcgtaacctcccctcctcgtgacttccacatacaaaacatgcaaatctagttcttttcctccaatcacaggaatccttgtttatatcacacaaaaataataaaataagatagatgaaatgacgaaaactaaatttattaagtaagaagaagagaaagaataatggttacatgaacttagtggacataattgagtgaaaccgcctgagagtatcccagaagacagaagaatccttgacgacaacttcatgtaaagccaatggttctggatactctttaatcttcgccggcgaagtcgccatcatttctaccgtcgcttgagacggtgtcgattcgttgtccgatgacatcgctatagagagacttttagtagagacagatatcttttttttgttggggagtttttttttttttgtctggtctctcttttttgggttttggtttaaggaaagaagagaaagataacgattcaagataagatttgtgattaaatcagagagatatagagatagaaaattaaattatttatttttgctacggatttaaaagtaacggacgtgaggatttgtcattttctttctttttgtgagttttaatacataccacatagatataaggaaatttaaaattttaaactttataattgtgtatatatttgctttcaaattattgtttttattttcgaggcgttttgagtgatgttgctttgtaatttttctgatactactaatactgtattaattactttttcactgtattaattaaaaagtaattattgcaccccacctactttagtttttatgcttacgagcagtcgaaatatggtcacatctatttctttccaacataatcaatcattattttatttttgaaatttcttaagtctaatttatatgaaaacatcgataatatctaaaaatcggactgtcttgctttttttctttaccggtttagcatattagattctttcacttttattttagtgttatatatatagtgagtattcaaaaaataagagcgaaagtgaagaatttgtaacacgatctatgcactttatacactaatgatacttgacaatttttaggtgaggaatttaaaactcgtacgatctttatatatcaaagtttttgggcattgaaaaacctctgaaaattaaaaatatgtcactgttgagtattgacatgcattggtaagcgaaagttaaagtagtacttattagtgcagacggagataggagtcacaccctaaaactcattgggtcaatcgaagtctgacattttatttaccctaaataacaattaaaatagtaaaaatgacaagaaaattaaatagaaaaagttatgggccttatgcttcggagaggttgacgtgcgattagggattttatatatggttctgctcatatgtaacgtcacgtccctctgcctgtagattcggttccacgtttcttccttataatcattttttaccgattcttattcgataaacatttgttcaaataagattcttctctcttccataaataaagaaaatcttttatatgacgacgacgttggaggataacaaatcaattcattagtgtcaccttacaacacaaaaatatactaatttgattaaaaagttacaaaaatggtgggattaaccaacaataacaaaaacaatgtcaaaatcttcaaactaagcttccatcattttgcttagagactatgacttgctctttcatcaattttcttatgaacaagaacttggtctgtgttttgtccacagctgccaaagtttaggtctggatagtttctatagttcaaggaatgtaaccaaagagccatatttccgtattttcgctctgtagcgccgatatgagaatagatatgcttcaatttgaatgcttcagcttcttctttgtatgcttccatggacacttcttcatgactgtcttcaaagtttctgttataagacgtgaagaagcattcgtccagataaagtccaacttctggcgccattggtacagttatattcacatccctggttacataatttccgaactgagtatcaaaacaaacaaaactatagacattgcaaagcttcaaaaccaaagaaaaaggagaagcttacttgctgaaagcactttggataagtgattcagaagcacaattccgcatgattgcaacagcaagacccatcatcttccgaatctgatgaagcataaagcttttgcctaagacttcacacttgataaagtcaatcccatcaagattaatcacagtattagcagtgaaggagatgatttgacgattcgcagtcggatcatctgcttttgttcttgtagtgaagttatggaaattatatgatccaacataacaacttagtattctactgaacctttccttttccttttcaccataacaaaacttgctctttaccttagtctctgatgaatttgtattcaatttacaactgtcttcttgtatcctacctacttcaacatctactgagcataagccagctaaattagaactcaaagcttcaatcttgatgtcacttcttaatgcactagagttgttcgacgaaatgtctgactgaaaatccaatgatttagtcccaaagttggtacctttccatttacccacaagacctggaggaatcttacgacctctctctgagcactcaaagcacttaacatattcctctcccggacccaaactagccattactgtttctctatcacgatgcgagattggatcaagagcaaacactggaagcagatacacataccttcttcgatcgcaaaacttcttggagctaaacgacggcgttacatgcttgtaaccgaagattctaatctgattagggagatttgaattgagacgattcacgaatccaagtggatcaacgataaagcgacctgaaactacttgtccaacagcactaactcctttatctgtccgtgcagatcgtgcgaaatcgtatagttttggcttgcctctaatggactccggtacagctccggcatgaaacaaagcttcttcgagctcgccttcaatggttttcgcgccgggattcttttgcattccttggtatcctacaccacaaaacgcgaagattatagcaactttttgaggctccgtgacacctccgtcgcaggacaagtctatttcctcatcggtggtagttgtcaacatattgagctacttctgatctgattctcaatcaggaacctcgaaccgggggaaatctctcggttttcaaactcctgagcctccattatagtaacaagagttcatcgaactctctattttccagctttcctctgcaacaacgttaatggctaccgcacaaaagtcgaaacccttgaagacgactgaggtatgcttctctacgacggcgtttttgatatcagaccgctctttaactgggcctataattttgttttatatatgggcttattagtctcaagcccaaatgtttctcttataattcaagtcaaatttgaaaaagtcaactatatccattgagcacacatctttggaaatacagtctgttctagtgggcaaaagaaagagagaaaattatagccgttctaattgtatcaaagtatgaaactttcaaatctccttgaggtataggcgttgttgtcttgctgatggtacacgcgtcgtatgaaaaagcgtacacaaatcttatttcaattgaagttatcgactttattctaacagtcaacgcgtgtctagatttttcttcaggtggacgaagaagaaaaaaaaaaactactttggcaaattatgaatcttcgtttctcgattgagttttaaaaccctaaaaattcaaaagagagaaaaaaagacatagcttttaatctctgagattctctgctcaagttgtttacagctttctactttttgaagaaggtattgtattctataattggctcatctcttgatgaataccgtagaatcgaatcgacactttgtgtttgtgggtatagtccaatttgctcttttaattcttcttcttcattgtaacatttataaaaggtttgttttttgtgtggccgaaagttgtttgacatttgattctgattcgtttgggatcagaaactgtttaatcacttcacgttctctcttcggctctatatatatatatgtaggattgtttctttaagggacttgtgtgatttagcttcttcgtttccttggtatttgatcttcttttatgtgtgtgatcttgttaaacagaattttggttagcctataatcaatctcaaattggaaacagaattttgtttttgtttcatttatctgtcatgaaacaaatgttgctcttcactgatttttttatcttagtggaaatgtttggaatttaggatcttttgatttattagtttgctgcttcagaacacatactggtttgtgtctcaatacgcttattacttattgttttggatctctctgaaatggtatcattctgtatgcaggtaatcgttctgttttttcgttgattactgtttgaggttttcattgaatcttgtctcgacatgggctactataacaatgtaagtgccttctgttttcttttttcccctagaacttttttttggatatttttgtcatctttctttgttctaaagcatgatactattgcaggtctttgatgaatgcaacgaccaaactgatatcggtaataacaaagcctttaatataggattaagccttgttcatgattcttttgtttcttagtttcaaagctgaactattaactccattgcttatctatatcaggtcgggttatacgcgatggaagggaagtcattctccaagtaagctcatctgtctttttatagtgtaacacttatagtttatagttgttcaattgtggtttgatccttgtcttttttatcaggcatataattgggaatctcataaatatgattggtggagaaacttggatggtaaagttcctgacatcgcgaaatccggctttacttctgcatggttgccaccaccatctcagtctcttgcaccggaaggttagaggaaactgattcctagacataatgagcctttgtacagtttgagttttgaaaacgaataaccattactaactgcagaaacgttgttactatatcatttcaggttatcttccacaggacctttattcactaaactcagcatatggctctgagcatctattgaaatccttactgcgcaagatgaaacaatacaaagttagagctatggctgatatagtcatcaatcatcgtgttgggacaactagaggacatggtggaatgtataaccgttatgatggaatttcattaccgtgggatgaacacgccgtgacttcttgtaccggaggactggtgagtgatgatgattaaattacatcttttgacatatcattacgttcttagagactctaaaggaaaagttttctactataacagggtaaccgaagcacaggggataatttcaatggagttccaaatgttgatcacactcagcattttgttaggaaagatataattggatggcttcgttggttacgcaacaccgtcgggtttcaagatttccgttttgactttgctagggggtaagttttaggcttttcgcttaggtgacttgtttatttgcttgtggagtcctcaatctgtaacatttgaatgtaaccgatgcagttattcagcaaactatgtgaaggaatacattggcgcagcgaaaccattattctcggttggagaatgttgggattcttgcaattacaatggccatggtctagactataatcaaggtttccttgcgtttcttcatcttatagcgtatgacatgtatgactagtgagtctagttccatgattctagtgttatgtaactatgacacttgttttttctacagatagccatagacagcgtataatcagttggatcgatgcgacgggacagatctctgctgcatttgacttcacaactaaaggaattctgcaggtaagtagattcttcaagacctctaaaattcattgagttttgcttacataatcccaccattgtattgaaacacaaatgcttcttgttacaacaggaagccgtaaagggtcagtattggcgtttatgtgatgcccaagggaagccaccgggtgtaatgggatggtggccttcaagagctgtcacattccttgataaccatgacactggctctactcaggttacttaacaattacttctgtaatcattttcttttagccttcatatgtttgcttaccttttttgttgctctcataggctcattggccgttcccttcacaccacgttatggaggtaaagtagctctctaaacaaaagtctgtccatttacttgcattttaagtctctccctaatcgaagaagatcggttttgtgtttttgtagggctatgcatatatacttactcatcccggcattccctgtgtgttctacgatcacttttacgattggggaagctcaatacatgatcagattgtcaaactggtattctgttcaatctctgcttatcattggaccatcatccatggtccaaaattttcgatctcttctaagacctgtcctctgtgttttttctttgttattattcattgacagattgacattaggaggcgacaagatatccacagtaggtcaactgtccgtgttttaaaagcagaatctaacttatatgcagccattgttggtgagaaaatatgtatgaagcttggagacggctcttggtgcccttctggtagagactggactctagcaacaagtggccatcgctatgccgtctggcacaagtaattcttttgtgtctatctagctttgagtccaaagaaaaatatatgtaattcattttctgtaccgggttttactataatgtcatgcccttacgtcttcatgacgtaagattttataagttatatttatgaatgtaaaatttgcatctttcgtgtgaatgttttgttaacatatcataaaaaaaaagtggatgactagtgagaaagagtaatggagactataggaaaaaagggttttgtgcttttccatgagaagtaagttgacttgtgctgtgtttcaaaagttaagtattcaggttacaagataaaaccatataggattttaaaatggtttgtacaaagcagatgataatggacttgctagggtttgttggtctatgaaactcaagttaagctattattccttggtcaaaagactcaaaaaccatatattcgtcctaaaggatacatgaggaaattaaaaaatacgtgaggtattattggtggccactagagtaggactagacgagcagagagatctttataaagtagatgatgtgttttgtgtatattatatggtcataagactacatgattcttgttttgaaaactcaacaacaaaagcccaataccctttttttactaacacagtcttttaatgctgttttaatccttatataaattttgttgggaactgcataaagaaacaaaatcgaatcaatcatgaacaccttctggcttcacgtgaacatgctgtgctaaaaagatcttctgttcatagaaggtctcctagatctttccacttttaaaattatactattgtagtcttctgaattttttaatggtcatggcgctacaagatgcattgctaattggatatcggaaactggtacatattcagttttcacaacttcttgttgtagctttcaaaacaaacccacggagaatataagtgcagaccgtacgtaatagactatatagaacataaatgtccaaaactccaaatataaagaaaattaataatgatctcataagaaattaatacagttattaatcaggagaaaatggaggtgatgatgagcttgagggagagagaatgtcccgcatgcaatattgcataagattaaaaaaaaaaaaaaaaaaaaggaaaaagcgaatggaaaaaacttgaacaaaactgtgattaggattttctggggttaactctgtctccgctgactcttttttcacaatttaccagtgttgagattttaagccacactataataattacagatcttactaatttaacgtcccattcttgtttcaaaattccaaatccaaaaaaagaagaagatggaacgtagcacattgttactttcttttttttgtcaacagtatcacattgcgtttttgttttgtcttgacttagcctatatattccaaaaaacaaatcttgcaaaaatttctacagttatatagtcaagataaatttgtcttctttattgttttctaaaaataccgtatttttttgtatttcaatatttttgtacaatttttttatataaaaaaaaaaatattacttcaatttactattctaatgcaagtaaagtccgatatttgtagggcgtttgagtcgtcttcattgatgcgttcggttcgtctataatggtacattttccataacaaatataaccgcattgacaaatatagagttctggttaaaaatatattgtagtatatatatcacgaagaacatataactaaaacaaaagttatagggggaggaatgattatttctgaaaattactgatacgacactaacaaagcaaagatgtgttgtgttatgtgtgtatatatatatcgacggttgctcctctttctgtataaagtcgctactcgcaattatagtttaccaactatccctgcatttctttttttacttttggtgcctttttttgaaacctctgcatagtttaattagagaaaatacatttgaaagtacatcattttgttaaatacatatgaaaatggtttttacgccatgttatatataacggaattcgatacaagtttaggcaatcatgcgggtggggtaaaaagcatttgtccatgcatcgagctctgcgttaaacgaatgatctaaacatgctcctccactatttttctaaattcaaatccatgtcatcaccaaacaaattaaaagcgatagatatagttatatatatacaatttataagtgattctcgtttgaatttttttagatattatgttattcatttttttttttttttttttgaacacatgttattcattataatgaaataattaaccttcagaaagataaaaaagaaagaaaaatattttaactaaaaagaaatgaaaatgtccggaagatagaatgcacatcaaaaagcctttctaaaagcgaaccaaattaaaagtgttgacatttttacagtcgagtactcattttcatgcctcaaatctgaaatcgtaataatatggcatgaataacattttttcaataattctgtgtatcatgtatggacggcattgcaaaataccgccatagtttggcattacgtcaataaagaaaatccgatatctactcatatgtttgtgtatatatacatcttctcttataacctttttaaaacataccaagacatgtgtataaatcgatagcatggtgatgttctggaaagtaaaatttaagccatttcttaaatgactcaatcataccactgacattttcactatgcgacaaacccatcgttttattattattctcatagtcaataacaataaattaaatttagactttaccaaaaaaaaaggatttagactaaaaatcaagttagataaatcgcgtgttctttattttttgccagtaaatatccaattgaacaaaaaaaaaacagtatgtgcacacacaaaacaaaagaaccaaaaaacagtaaatacgaaaccggttgttctagcacatcttcttcaataaaagtgtgttataagctagactccatttgttttcattttctggcataatatatgtttgaaagcaatgttgtacaaaaaatatatcattgaccttaataaatcagacaaaattaaatctggatacttatcattttacctttagaaagctaacaaaattaaggctaatttttctttgaagtgtaagaatttaatggatagaaagttagatgggggtggtagattttgaggcaataaattgtggggagaattatgagttgttccaattaatgcaagcaaggcatgcatttgttttctcatccactactaataataagtccatttttttgttggagtttgttccgttttataagaaaacgtaaatacgtgcacaaaaaaaaaaaaaaaacgtaaatactaccactgaatcaaatcacaaaaaaaaaggtaagagtatgtcaaaacaaattgtcacaaagaataaatgagactttgcaggttgtgggagtgatgagtgcgacctatcagtcgacagaagggaaatatgattctattatatattataaaatgaggttatttcatttgtattttctcgtcatttaaagtaagaaaacataaaaagctgggattgaccttattcttgaatgtgtatcatggttaaatactaagtcaaaagcttaacattttcttcattataaaatttgtgttatttacatgagccttggattctgcaatccactccatggtggagtttaaatggacccatcaattggaagttgcctcacacgaactgaagtcagaaattgttaatttacatgattctcatatacatttaaaacaaatatacctctttacgtattgttatcatgttatgagtgatttagactttagcaaatgttaattctgaataataattttctatcagtaacacagtttcaaaaagtcataacttttacattttattataatatttgcctatgtttagtggaaatgtacaaaatgtctatcttataaaattctctatttgattctattgttatattctacatataaattcatgatatgtgacattttaattttgttgttcaaatctatattttatcctgctgaacaaattgtaatagcgttataactaaaccctataatcaattaaaaaatggtaccgtttaagttgtggcccggaaaaatttttgagaaaaaaggaaaaacgaacggtaggtcgtagaagtaaaagagaaccccgttgaatttccttttgacatttgctaaaacaaataaaatccctagaaattttattgggggtttcgcttatatcattagggactttggaaaagaagaaaattatcgagagagaagaaagattgcgttgcccttttaattcctgttatttacttgttttcccgagaaaaaactctttcagtttctatttttcattgtttcttccacgtttttccaatcttctttcttcactgttttgctgttcatagttgttagatcttatgtcttttcaaatccgaatcttaaactttgatctctcctctcatctgattaaacccatccagcaaaatcccacctctcgagagacgattgttgttcgatcttctcggtagctttgtgacaacagaatctagggtttcgttttttgttttgtttttgtttaattcttttattaaagtcttggttcataaatattcctgctagaaacaacaactgtacatcaccatcattaagagaaacccatctgcctctttctcaatctcataaatattctcaccgttcgcttctctcatctaaatgttctctctgtagcttctctctctctctctatctttttccatcttaaagaaaaccctttttgctccttaaggtgtacctctcgatgttacattcgacagaaaggaaatgagtgatttgtttttggatctttaacctttttgatcatgcgggtttgacaaaagagtctcttacagagatctttggcattctgtccacctcctctctctatatttatgtgtaataagtgtacgtatctacggtgtgtttcgtaagaggaggtgggcatactgccaatagagatctgttagggtttctttgtaaaacccctcatgatttgatatataaagatagtgatcaatatcattcggtgaatactactaagatctaagtttgaagaaaactaggtattatctcgaaactttaaccttttttgttatctgtgactgtgagcgttacttgttcttgattaagtaaaattcatttgaattttgctgtctcctttgatctatctgtcaaactttgatcttgatcaagactaatccgattgatacattcattgtaggaactcatcatctttttaaattgcaacggcgttgacaaatgtgagatttcagagtagtggtggcgtttgagacgtttacatcatctaggaaaggtaaattatttcataaagaaagaggacccattactccctacaaggtacaggtagattgaagtcataggagaatatggtaatgaaaaggagaatttactcttcctttttatgtttgtgaagcccacacagtgttattatgatgtcttgcttttttttttttttaatttgaatctatatactatataggaagagtgagtttttgtttgtttatataggagtatatttgtttctttattatctgatgagttgtgttcaatcctataaatggttcgagaaatatcgagttcaatcttaaaatggagtatttttcttaggcattattatgacgttttcttttgttatagtcggaatgtatacattttctgtatagtcacactcacatgtttctatagatgtatttgatgtaagtgatctaagctcagtattttcaattgaggtatatatatgctgagttattgttgtccttgcgcttattttgatattataggtactttgtttttttctcttacatttatagttacgttatagtcttatagactattcccacatttttgtgtttatttatatcggttgttgactaattaggttttagatggtaccaaaatgatttgcaattctatgtggaaatatgaaagcaaaacaagtttacaatacgacttttgccaagctcttagcattgttacgattattggattctaacgtttttttcttctttaggtaaaatgaggattttaatgttgagaaagtaagcttcggatttatcatgtaatcgtgatgatatgacattcgatgacttggtagatatgtataatcctcgacgtctctgttgtgcatctagcatggtttataggggctcattaaacagggtgtagatttatacatttaccataagtttgaaaaattacaactccacgtcaaagagaaaataaagaaaataataagaattcaacaaaaactttccctagtaacctcatcattggaagtgtgtcagtagcatttaaattatcctttcaaggcaaatctccaaacttttctacgcgatttaactatgcgcgtgactcccaaatttcctttctcgtttattatgtaggtcaaagttgcttttatcttgtaatttttttcttatgttcggtcaattcactaaaactccagtaattatttatctgtagtgtagcgtatgattattattctgcaaactctgcgtaatagagactttttaaaaaacaaatgcagtagtccaaacctactttctagaaagaaaaagaaaaaatgttctttagtttccctcctaaacggtgaaaagtctctttgtcgcaatttgtttacacatatcctgataaaacgagtttattgggctttatgttgggctcgtttattcagcaggtctgaacctcaaaactatattataaagtttaagcccaaaaggctttaaatatggtatcaacaacatatgcttatgctatgcatcattttcgcaaactatggtgttgtatgaattagtgggttgttcaagatgttttttcttaagcgaaaacctatttatacagtttgcaatggatataagcttttgcaaagtctacaaaagtcacatctcaccacaaaaaaaaaaggtctacaaaatcacatgtatctttggaaaagtatccatgcttagatatttcatatttctgatccaattatccaaacaaacatgtcaacagataaaattaaaaaaaaagctaatcttttcaaaatatacaagtcaaactgtcagaatataacaatttagactagttgataaaaatatatttttgaataagaacattttagattaaattttggtaccataaaatgtttgatagaacgacgaaaccattttgacatattaacggcaatctcggggaagaagaagaagcggtagagagaaaaccgatgctcacagcgtttgcaagtcacgcgcgttctcacgttttcgcgtttgttaccgtcccaacaatcacgcgccgcctccgtataaatatcttacgccaatcacctctctcctcttctcttctcctaaacgaaaccttctccaatcgacccaattctgtttctcgtcgttgttattgttcgagctctgcgataatgggttcttcttcggtgtttggcgagcaattacagtatcctgcgactcggcgtgatgattccgtcgtcgatgactatcacggcgtcaagatcggagatccgtaccgttggtaagagttcgtttccagctgcaatttctcttattatgcttttaggtttccggatgagaacgatatttccaaatgagattttgaacacatcgctctgaggaattagcagacattggatttgacttggagattgaccttgagagaaattcctaaattgttcgtgatttcgtgtgatttgttcatttttgctatgatttagcgttgaatttgtcattctggattgttgctaggttagaggatcctgatgctgaagaagtgaaggagtttgtgcagagccaagtgaaattgacagattctgtacttgaaaagtgtgaaacaaaggagaagctccgtcagaatataacgaaacttattgatcatcctcgttacgattcaccattcaggcaaggggataagtacttttacttccataacactggtctacaggctcaaagtgtgctttatatgcaggtatttgttgagataaaggcgtttgtatcagtgcatactctgttctagctttgttttctcattgaatttgattgcattcgggttcaggataatctggatgctgagccagaggttttgcttgatccgaacactcttagtgatgatggaacagtggccttaaacaccttttctgtcagcgaggatgctaagtacttggcctatggtcttagttcaagtggtagcgactgggtgacgattaagctgatgaaaatcgaggataagaaagtggagcctgatactttatcatgggtatggtcttaaagatggtactgactagtggggttgatcaataaagttctaccgtccagatttctgatagatttatgttcctctcgtggaacaggttaagtttaccggcattacatggacgcacgacagtaaaggatttttctatggtcgctacccagctcccaagtaagtacaagatgtgttggaagaagcctttcgatatagttcagaaagctaagttgatttaccaattttatctgtttttgttttgcagagaaggagaggatattgatgctggcactgagactaattctaacctttatcatgagctgtattaccatttcattgggacggatcaatctcaagatatcttatgctggagagataatgagaatcccaaatatatgttcggagctgaagtcactgacgatgggaaggtaacacaccaagttcttatgttggttctttaactatggttacgctcttaaacctcaaatttattttttctgcgcatacttacggaaaatcattttgatcgtttccctttttctaaatgatggtcatgacttcaaactgtgttacctagttttgtagatctggaacttggattcttagttttaggtctaatcaatgttatttcttcttgtagtatctgatcatgagcattggagagagttgtgaccctgtcaacaaattatactactgcgatatgacttcattgtcaggaggtcttgagagtttcagaggaagcagcagttttcttccattcattaagcttgttgacacatttgacgcgcaatatagtgttatctcaaatgatgagactctgtttactttcttgacgaataaagatgcccctaagtacaaattagtccgggttgatctaaaggaaccaaacagctggactgatgttgttgaagaacacgaaaaggatgtcttagcatcagcttgtgctgtcaatgggaatcacctggtcgcatgctacatgagcgatgtaaagcatattctgcaaattagggacttgaaatctggttcattgcttcaccaattacctctagatattggttcagtatctgatgtttctgctcggcgcaaggacaatacctttttctttagctttactagctttctcactcctggtgtgatttacaagtgtgacttagccaatgaatctccagaagttaaggtattccgggaggttactgtacccggatttgacagggaagcatttcaagccattcaggtaacacactctcttgtagcgtcttcctgtttctttcataactactttttactttgcatatgttaaagtggtttctgctcctctttataggtcttctatcccagcaaggatggaacaaagatacctatgtttattgtggcgaaaaaggatattaagcttgatggatcacacccatgtttgctctatgcatatggtgggtttaacataagcataacaccgtctttcagtgccagccgtattgtgcttagcaagcatctcggtgttgttttctgctttgcaaacattcggggtggtggggagtatggtgaggaatggcacaaagcaggttcacttgccaaaaagcagaactgtttcgatgactttatctctggggcagagtatctcgtgtccgctggttatacacaaccgagcaagctgtgtattgaaggtggcagcaatggtggactccttgtcggtgcttgcataaatcaggcaagtttatatagccaataattcaggacaaaaacgaataatatgaagctaataatttgtaattttcgtctcatttagttgccacacttatacataaattttcaattctgctgcacagagaccggacctttatggttgtgctttggctcatgtgggcgtcatggacatgctacggtttcacaaattcactataggtgagtgagttcagttatctgcaatttgttttgtttgattttttgcttaatgtaattctaacttgaggtgttatgtatgtataggtcatgcctggacatctgattatggttgctctgagaatgaagaggagtttcattggctgataaagtaagtatatgaacttatgatatgatgttgtattgatttgtttcccaatgctgatacaaagttacaatctgggtgtgaatgtataaaggtactcgcctctgcacaatgtgaagaggccatgggagcaacaaaccgatcacttagttcagtatccatcaactatgctactgactgctgatcacgatgacagagttgtgccacttcactctttgaagttgcttgctgtccgtttccagactttatttctttaatgtttaatttattttcaatcttaccttaaatagccagcagattgttaaaactcgtatgtatacatctgcagacgttgcagcacgtgctgtgcacaagcttagacaatagtcctcagatgaaccccataattggtcgtattgaagtcaaggctggccatggtgctggtcgcccaacccaaaagatggtaatgattttagaaattctcgttgcttaagcgttacatcatataacatacattttcccatggttaactgatattgagatgttcaacagattgatgaagcggctgatcggtattcgttcatggcaaagatggtgaatgcttcatggacggagtaaaaaaaattcctttatctacaggcaccaaatatcttttctcaatatcttctgtccaaacaaggacgttgtatgagttagtgacaattacatgtaaacacatgtttcagttttttctcaggctttatgttccagttcattgacacccaaaaaggattttcttcaatgcattttgcttcatccggcatgtgcattttgcgtcactcaacatttattacaacagtaacacgatacaactaaccatttcagtaaattgtgaccgtcatcaaagagtgtttattgatggctcaatggctcattacgccaagcaaacatcaagagtcttctgacatgtttattacctttgcaatattatgacagcccaatatatctaaggacctaacattctaaagtgacgaagataacccacgaatatcaacataaccagctaacacagttttgttcctttccttcactttcgtctgatatataaccctgtgaatacatcaaaagctaagttcaagttttgaatataccagtgatatggataatctatgtaatatatcgccaaagaacaatacaaggtagagagagagacagagttctacctcaagccttcaagccacatttcggttatcagagtttcgccaggaaaaacagtcgtgaggaatcgtccagatatggttttgacagcagttgggtcacccttgcaaacacacttgatgattgccttgattgcaaacccgagtgtgcatagcccatgcaatatcgggcgtgggaatcttcaataaaacaagtgtcagtccagtggcagtgatgtgcaagttttggaagaaaaaaaaacagagaaacattacattggttatcccaacgattccatgtaatgccttagttatacaatgaataatgagggatttgaaacattttaatcttttagactcagataacaaaacttctttgacacaaaagagctttcacataccatcaaaagaatggtacaagttagcattgataactcaaaattatgatggaacttgagattcatagcagaaaaaggtagccaaagccgtttatggttatatcctccgaattactgaattaaaacgttgctatgtaacaagaaaaaagcaaactaggaaagtatgatctagcatgacaatgtctgaataagaagctatataagtggttcactaacccggcaagttttgcaaattctggatctgaatgcagaggattatagtcaccagacagcctataaagtaatgcctgccaggagaaataaaccagagggttagataaagtaaacaagtaggcgtcaaagggaacagaaacaacttaaatgaatatcagaagtacaccaaatccaaataagttgtttcaagaattaacttgcctgcgatggctgagtgcgctcttcgcacactgtcaaaggttgtctttgtgggattttcacagctaagccctggttacttggatagtttttgtaagagaatggttgagatgaatttgagaaaccaccagcacctcttaggaaaacagtcgtcctgcagagaaagtcccaatttagttaccgagtttccaagctttaatgcacaacagttcactatttacttatagagacgttttttacctattcatgcataacagttcccctgacccttcctcgtaacttctggtttctaattcaaggatagctgctttacctaaaagattgccatcagagagaacaaaaaagatcaatttaaagtcaactttctagttctctgtagtagttagttttctgcttaagattggagtatcaagtacctttatcttgcaaaccagcgaggcttactttgttaattaactgtggcaacacaaacaacatcaattcagaaaaataaagcaaagaccagtttggatattagaagaagaagccaataagaaagttcttgaagatataatttccacgttcatcaaaaaccaatcagtatgagagtacacttcctagtatcaaaacagttcctatacacacgtaataaaagctacttacggaagccttggaaggtaatggcctgtatatttcaatatactgctgcccatgcaacaagagactaggatcatatctgcagacaagatacaacaacaacatcatcatctatttggagctatctcattcaaaacatcaataaaatataagagagaacatttttgcttacttaaaacctggcaaatccagtccttctgtcaaagatccaagtgtgaatagtgaagcaaaagttggtaagacctataattgaaggcaaataacatcgattactcaatttttaataacaaaacacatcacaggtaaatccagatcaatcaattgagatacctggatcaaatcctgcccatttctgtgatacacaaacttgagctcatcggaatccacagcatcttggccacaagcgccgattcccaaagcatagattgctacatctctattttacacaagtcaaaatcaatttcttcatcgagttctttccttaaaaattttcaaatttcctaatctccttcgattttctatcattttcttcttcatttacacagagacacaagagtagggagagaaacacgaagagagaagatgcaaacctttcattgtaggtgtaacgcgtctgtgaataaaaccagaacaaaaaacgagagtgcggttacagataagttttgtctcgatcacggaaagatccgatcagaaatcaataagaatgtgaaaacgaaaacaaacctcgggaagcttgtgagcgagaagaagatcagaattgaattcagaatcgctagtcgccatctccgatcaggattagagctcagcttccgtgtcccacctggtttttctcctttcagtgttcaacgttagataagtcataactcattgctctatatgcattaaacgacatcgctttgtagattcactgaaaattcaaatcccaatgcctgctaatacataagataagattctttatttgtcttattaaataacacgtaatcaaacagattataatttttgttaagtgacttacacatttggtgtggtattatgcatttttaaagttctgtttttgaattgttacctgaatattcataccatttgaaactgtaacattattgataataagctttacgatgaaactgtggaattatattgaataaatgtttcgttccatagaaaaagaaagaatataagaatcaagaatgagacctcgagctgagatcgttacaaactgatatactgattttaacataaactcttctcattcattagcaaaatgaagaatgtgtataaaacaagaaacccgcctcaagaacgcgtcagctggtttggctgaccatctctccgtcatttctatatctaaccaccagctcaaagcggtctggtgctgcgaccactggctctcccgcagagaagagcgttcttggggattggatattcatctctgagagaagttgagggtgtgtacacacgtaaatacaattgttgtcctaagtattgcctcgcccagaactcggatcttagattccacattcctacgttgtcgagtgctatcaatatagccgtccatgagcttgggtatacctgtatatgaatgttaatcaaacggttcacatctgacaaaacaaaacatgattagattatggcttttagtatacagaagccgtggtttacctgaacggtgcagcgagcgactgcatcgcgtaggttatactcgttcctactatctggactccactgtccaccatccattctgtatcacaagaaccatctttagtccaactattatagcgatcaagatcaagatctctctttttgtgaatcaaagaatgaaacttacccaacaacccagaaagagtaaccatcaagatgccagctctggacaatatcctcagaattttcgaaaataatctccacaaaggttctgtaatcaacttgcataacagatgtgtcgaggtatattcctccaccagtgggttggtactgtatgcttccacttctgtaaacaccgtcaatcttgaagtagtccgcgattttcagaggagtgtctgcgggtttgaatgagacactgttcacagcgtatcgttgcttcccatcaacctgaccagcagagctagcaagtctgatcgttcttgtagtgtttatcataccgtagtggtacgatccttgtggatttggccttggtccgctcgctgaaaggttagtcctacaacacacaaacataacaaatcaaaacttttaaagcacaaccaaccaaatcctaaaagaagttttttttttaatgtgcacagttagtatacctgatggctcgagcctggttcaaggaccagtcgatttgaatggtaggtccaccaggaataggtccagaaacaccaccagcagaattactgtatcggaaaatacccgtggtagtaaggacatttgaggtaaaccgagaagagacgaccacgtaataatcccgtggagtctggtccgcggttacaaggactgagtaagattgtccaacatgaacatctagtgaagagaaagtagtctgaagagtgtgtgttccttcgacttccaccactttcatcttatggtcttgaatgcggaagttgagagagtcttgtaaccctacattggatattctaaacctgtatgtcttacctgaggaataagtcaaagaagaactcacatcatcagtgtaaactctgagcaatgccttaatcaatcagaactcaagaagaggaagggttaaaagaaccttgttcaacattaagagttgcaccacttgaacgaccattgatgaggatgccgtctggtaaaggaagcttcttaccattatcaagctgtgctctcaaatcctacacaaacgaaattacagacaaaatcgaaaattagttgaagttggttaaggagtttagttactctgttttaagccactctgtttttaagcttatgcatcttctttataaatacttaataatgagttgagagagccagatcacatggttctaataattaccgtgtggtttgctttgtaccagtctccgataaggacagtggtatctccggcgggatcagggaaagggaccgggattctaggacgactgaggatacgaatgccaccaaatccaccggcggctttgtgaaagccgagagaagggaagtagtaaaaacttccgatctgatccttcatctgaagaatgtaagtgtagttcttccccggcgggattgggcatgtcgttccatacactccatcaacgaaagagttcctcctctgttgaattccattcctgcgttattttcaaaaatatttatagttaaccccaaaactattatgaattatcccaaaactattatgaaattgtaaatcatgcccctggaaaagggggcaaccgtggatacagctaataatttggtagggtggaccattttcccacatgtaaatgttttaaaatatgctgtcacttttcataaattcccatgcatataaaaaaagaagaagcaaaagtcagaaaactatataataacatgatgtaattgaatttaaccgtaatcacccaactaatcaatgtcgtgttgagagttaattaattattacgtcgaccgaatccgacataaggtgtggccaaaaccaaatctttacgtaccacagttttttttttaaacacgtttttgtttttacatcactattttttaaaaaaggacatgaaaatactattcacgagaaaaagaaaaatacctactacacctagccactactatctatcgacaacgacagaattcaatatcaaatatcgaattaaactgtattatgaaatcagatttagatttagaatgaagattgaaaaaatagttaccatgaaagaaggaaaggttcgtcgaggctattgtagacgttgatgatgagattgtcattagtaaccgaatgaatgtccggtcccggaaacgccccgttgatcaaaataccctaaaccggaaaatgcaaagagatccatagtttttaataaccggatctataaacgaaaaccgggaataaattaaactgatatcgatacctgttggcgaacaccgagtgggtatatatcgccgtaagttatgttccattcaaagaatctgtacggatcttcagccgtgacggcgaagagaagagagagtccgatgaataatgcggcggcgaatgaggcactgcccgccatttttgtgtatgaaaaccggtgaaacaagaaaggtatatctggcgtggtctctctctctctaactctaagacacagatttaagtgtagagtttatgtagagaagagtcggcacgtattaaaaagagtagagagagagagatttaagagaaaacgaataagagagaagaaaacaaaggtcagtgtcggtggctggacccacgagcgactctgtgttcactttgaaatctgtatttgtcgtcccacaatccacatggctaagcaacttggtgccattttttttatgagccctaaaaacattttaattagaaacaaacgattatttggtgtaagataagctttgtaagatattggattacaatctcagatattattgagatattacaagatatatcattaaaaaaaattaggtagcatttaactacttttatttaaaatgacgaaaatcatatttttcatatatttaaatttcataatcaaacataatatgtatatcatgtttcctgttaattctctaaatttgctattattagtttctatgaatttatgaattttcctgagtatcaacatttctcatttttaatttgtattactccatcctcatttagttatctatacatattttaatattattaatatttaaacattaatttttgtatatttttggcaaagatttgagttttatgtgaaaattaaatattcagcatctatatatgataaattcgaaaatccgttgttgttatattaaaaaaacctatttagtgaaataaaattattgtttagttttaaatttatgatatcaaagatttcacactatcttctaaaacaatatcaattaaaatatatgcaacctattttcactatattttacattcaataatttagaaaaaaaattcatatattttgtactaaacttgatttgcaagaatttttcatatctttacaatttgaatttgtaaaaactttatttaatattcccacgctgcacagcgtagatctttatctaatttcgattattgtaatttataatcctcggttgtaattgattagtgattacatactgtcttggaaagaaaaatataaagcagagaaaaacttggagaaagttgtatttccattaaacgtatacacaaacatatatttatacatatcttagaatatactctaatcacaactaatccttatattactatatcataacaaaaagggaagtatatataacacaccttaggatttatcctaacatttagatccttaacaaaaaaaatctgtgcaaaaatagcggatttattttgttgtggattgtaagatttcattctctgaatacttttgctgtataaaaaacagtggtaaatagattactatatgtgtgtcgtgtgtgactggttaaacaagttaaaggaaaagaattcatctagttttgttttttttccacaaaaattcatctagttttcataagagaataattgaaataactcttctcttttagttatttttttgacattttcagaaataaataaaatcttagtgtagagaaactttgctctcttcttttttttattagtgttaactagtaatactaataccatatatatttgtttgtatagttggatttaagtctttcttactgtataagtttttaagtcaaatgtcacatgtgcattaaagaaccgaagataaggtcttctaataattgaatgggagacagaaatacatatatcctagcgtaattattctctatttaattagtaaaaatcaggctcacgtcggaaaaaagaaacaaagcttaacgaagataatcacaagcaaaaaaacttagattcaataaacagcctagattcaatagtataaaacttcgtaacgaaggtaatcacaagcaaaaaaatcggccatcaaaaggtaaattatatgcctctattgttcgaataaagaataatattctttttatcttttcatttttttgggttgttgtatcatgtatatgtcctttaaagttgctagaagataaacaagggacccttcttggtggtaatatcaaattcgtttggaagctcaattcaatttctttggcattttcgaatgtttttttctcttttatgtaactttaatttctgagcagaaacataacttcagtggtaattcttagtttttggcttttaatgaatccctactcatttggcaaaaaaagaaggaaatattgtagaaggatccaaaagtactcagaaggaaaaaacattacgtgtagttatcaaaaagtaaaacattaacttgacatgcgtttatatttccggatttatcgcctctcactactcagacttttctctggtatgagtcattagcactttaataaaagcctaactctcccaaaattaaggtaaagtatatgggagaaaaaatagaacgtctaactaccaaattagagaaatttcaaatttgatagaagaagattatgattggatgagtaagcgacgcgtcagagcaatttgaaattgccgtggggtcctagattatagaataaagtgttgatctagataggcctgtataaatgacaacactttgaaaagatcacaataataccaacaaaaaagagagaaaataataaataaaaataccaaaaaagatacaaaacgcgtacggtgtctgtaaaatgtaataacgacacatggattaggtgttccatgtgtggacaacaacattcgaattcttagtacattgataagaaccagaaacgacatcgtatagtaggtgcattttgcatagtactactacatatttgcttgtatagaaaactagtaaaactagtcagtctctttgttaaaaaggaacaattagacaaattaagcgattgtttcaatgtcaaataagtgtctattattactcatgaaaaccaggttgacttgaaatgagttaggttgatcagctagtggttgaggtcattgatggtgtaatactgcaggttcaaacatcactaaccaggaccaccactaagccagagaaccagctgcaaaaacctctgtgccataaagggaaacccataattcttctactaggataagttttacaacaatgggtttttaagtttaacagctttctatacaaaaacagtttggcaactatcacagcatccattgcagtctcatagctttggtttttctcttaatttagaaatccagagatccacattgtttgctctctatagtttttgcagtagatctagcctttatgtccttataatcaccatttacgtttcctcttggtcttccaatgcccatcttaggcagaccacggttcaatccttccaacaaaacacaagctttgcaccatttctgcatcatcgtataagatcattcattatatttactacagtgcacatctttttactctttgttagttcatatctataacatgacttgatgtgataaagagagaagtctcacctggctagaaatatacccacatcgctcacaagtcccttgctcaggcattttcgtggttgtggcaattctgaagtcttcacctgacttgatgatatccagaatagcccttggcctgtagtttatataatataaattggagaattacttgcttatttggttgtggtgaatatatacggcaacagttgaacaagtaccttagtctttccaagtcattgatgaactcacaggcgaatccacgataagcattaggggagtatatgcctgcaatcagaataaatgattcaactccaacataaatgaccaaattatgcattcagctcgtagtggacttataataaaaagctagttagctagagctctctttaagtgataaaaacgaacagaagcaacaaaactttgaaaatgcacaacttacattcagtggagaagtagtccagcttcttgaaataagcatacgtgtaactatgttaaggtctaacgaatatcttctgttgacagttaaagttgtttcgggaagcaaaacaaaagatttaatagcaaaggatatatgacaatctccttctcgtatgtatatttgaaaggtttacatcttggaattggaccatcttcgcctgtagtgattgatgtgcacctactcaatctacaatagccaaattacaaatcaatcaattaagggacatgagacatattatagccaagattcaaggaaaaacatcactagaaacgtatatatttacctagcaatatcgcctcgcagtatgtttaagacaactgtttcggctatatcatctgcattatgtccagtgactagcttatctactttcaataacgcagctcctcgatcaagtgccttcaaaaattcaaccagacatagaatcataaaacagaaaagacggttctgaagaaacttactcaaagagggaatgctatgaagaaacttgctcctcacctgtcgacggaatacaccacagaaggtgcaattgttcttcaaaccgatcatcttcacaatctcgtccattgtccatccatacagatctttgtatgaaacaatctgaagaggcaatccatactgggaaaacaaagaatgacaaatcatcacaaaattttagagtgaacacataacacataaattcaaaagcttacttgaacttcgttccttttaacagtctcgagagaatcatcacgataacccgttatcccttcatcaatagacaaaagaaaaagatcgagtccgtaactgtgacgtctgtttagttctgataacacatatgccagcactgaagaatctgcaccagcacaaacttttgagttatggcgcaaacatcaaactaaaacagagtgattcgtaaaaatttgaactttgaagcgaaaccatcattggagtgtaaagaaattaccttttccaccggaggcacctatagcaactcgttcaccgaacttaaacaaacgattcccaacaatgacttggtgaatctcttcctcaaaaacctcatagaaacactctctgcatatctttatacaaatactcacatcattattgcttatacgtaacaaactaactagcaggagattgagaaactatgatctttaacagttccgaaaatgccacaagagtaacgcaaccaaagacccagctcgatgattttgatcctaattcaaaatttacctgttgaagggttttcggtcgttttaggacaggtcgtcactggttacagatgcagcagagacgagaccctcctgctttcttgctcttctcttcccctgcctccatctccaccggtgaatgaaactccaagtttactagtcggcggtaaattgtcctaaccggaaaaacgacctaactcggagttatatccacagaacaccgtcgtatttgatttcggtatctgaattgttttagttattaatgggcccattgggctttcttacccaacattaaaatcccacatacaagattatagataattagatatacccacaatgatgagcgttaaagacattattaactaaggatgtggtccattaatggaaatgttttgtgattagctggatctcatgtgaatatgtgatcttatcataactagcatattagggaaacgttacgtcaactggtctacaaaaatatctaagttggtccattttcttacacgttttgagtagttgtgtcgaccgcaatgccaaatcaatcactaaaaagaagagtatacacgatcatgtttcttctataccaacgcatttaatttcctacatacgaacttgaatgctaatcaaactggggtcatgtttacggctttgagcaatagttgaagattatcaatacataaaattatatcatccatatcacttaatcaaatgaaaatattcataccattaaaataccttgagatcttttgtttttaaaaaccatatacaagagaaaataagaaattgtaatcaacaaaaaagccaacaaacttacacatcacaaaagcaaaagatgatcaatcatcacaataaaaaaaaaaaaaaacaaagcaaatcaaccatcattattcttaatatctttaatgataatcttcttattctttatctttcttctcctcctctacggtggtcttagggtggtatcctggaagcttctccttaatcttctcaagaatccctttcttctccactggatgcgcttcttccacaggaggaggaacaaccaccggtgccgcagcgacggctgaaccgtcttcaggtttcttgtgtccaggaagcttctctttcaacttctccataaaccctttcttctcttcctcctttacctcaacttcagtagttggcttcttcttctccttcttcttcttcctcttctcaccatctgaaccttcttcctcacttgactgtataaattcagacccatatagttagataagaaaagcattcgatcatgttatagtttatcatcaacagatcagatctaaacttacggagctagaagaactgtcgcttcggtgaagcttttcaagaagactttcgtgtttaacctctggctccggctctgaaatatgaaccttctgctcaaactctgaagcgatcggagtctcctctggttttgtttcgtctttcttctttcccaagaaatcgaacaatccacgatctgtaacctctgccgatgattcctctgttgctacctttggcacctcctgttcaggaacattcttgatttcctcagccatagttatcggaaaaagattcgatgaatgaaacacggattcaaaagtattttttttatgtgaaggtttgaaattcaaaagcagatgaaaataagaggtgatggagattagagaagaaagtgtgttatatagtgttgaggactcgggaggggtccaagccaccgcggatttcacgctctttgtacactttttttttgcaatttaaaaacatatatctaattatatgaaattacaaaatgacccgctttttatggcatcttctccttcgtccccacgttaattatcatttttctgttaattagataaagttatattggattaagaagaattcattaattaattgttaatagtttgcttacgtgatctgatatcaatttagtggaataaaaaataatggataagaatggcaactagatagttttttttcaaaagtagtgaaaacaaactaaatggtttgttcaaggcgtgtactgtttttaatttaaatattagactttcataagtttttttgtttgttttaatacttgttatgtggactttgtagttcaatgatcggtttatcaagttaaagaaaactgattcaaactttaaatagagtaagaataatatggaataagcaaaaatgttttttcatttcctctgaaagcaaaaataatttatttttgacaacgcaaaagagattttaaagaatgggatgtccctataaattattgttcttaaagtttcgggctttcttatatatatatatatattcacaaatataggaaccatcttgcaaattccaaaaatggattacagattttgaaaggattaacaatttaatgcaccatagattggaagacacgtgtcaagcattagcgcaaatcggacgacggagctcatagtcagaaatggaacgtcggatgtagacaaagaaaagagtcagagagaaatttagattaatcaattacatcttaaaacgtgtcaatataacatgggaagttgtccttttgtaggacccaatagtatgtactgattggcgtaaaagacgtgatgtcggttacgtgggtccacttgacttattgactagtgccacgctggaacaagcttgttcgagaagaaatgatgattttttagaaatttataacgttccttattttttctttcttctattctatgcgttacaaaatacaaacaaaccaataagaacttggttatttaattcttatcacgctatgaatcctcaacgattaggtgttattttaacttattattcactaaacatgttgaagaggccaatctagtaacgcatgatctttgaaattgtaaatacatgatcttggatactctaaacaaaaaaaaaaacaaatccaacaagtaatataagtccgattggctcaatcgattaggaaggtgttgttgcaatgctaccggatctcatttttagtcctaatgctacaataagacgggtaatttgcgcttgtgaatccgccaaaagtattatcaaagaaatgatcgtggacataaacaaactaaaactaaagatttagattttagaacgaatagaaagttagcatcatcttttgtttaccatttttggggcacataaaacaatctttcgtaatctcgtttatgggaaaagggtttgtgtatgtattttttcaacgtaaatggttatgttttcatgcagtttttaaagataaacttagatgtagataatgaaatcatgagtagacaaatgagcataagatgacttggatttcttatgaattaatatgttaatgtgtgggatgtcattttcgacctattgaaaaagatatactaaaaatattaatgaaggacagatggtaatcggtaaatgcatcatctcttaaaattcgcctaaaataaaaaaaatgaaccgacgtgccacatcagtaatctctggtctctaaatttaacaaagacgtagcacgaaccgtgacgtatcaacacacatatcaaacaaacctatctttttcaatactaacttattcgtctttttggttcttgttgtcatatacaccgaagctcagctcttaacttattctttggataatgttttcggtgatagcgaaccgacaaattgtagccgacacttagaattcacaactaaactatagattttaaaataatattaattaattcgaaagtttgagatatctgaacaaagttttctgaaaaacgtagaatacatatggatcaaatactataattcgaaagtttcagattagtgctaagtaatgaacgtcatgcgtttgttcttctgtcgatttcttctttttcaccgcccgtctgagttttatgggcgtgatattttccttattgtggtcaaatcaggaatattcaacaatatttagcactcgctttacttggtgggacatgagaatcaatcgatgcatcgctgttttatttctttttctttgatgtttctatttctgttagaacaaagttttcatgattcttaaaagcccaaatttcatggcatcggaacaaagttttcatatatgatgacaactcaaaacaaaagagtaacggtaaaagcccaatacccataaaatgggcttaagaatccagatcggatctataacccgacccggttgttgacaccgagagagtccacgcaacgttcgccgaattcctaacgaatcggacaccgtttcgtcgctgtaaaattttgatgcgaaattttccaattcacagattttgtttttccattgttttggatttctagattctagttatatgttggtgatagatttttcctacatctcgtgattctcaaacgcttcttgagctcttcgtcgaatcgggactgtgatcgggacttggtggagaagaagcgatgataacaagatcgaatctagcagaacagctcagggaatatcagattagatcaaagcatgattgggcctccgtttctttcttctcttccacctccaatttctcttcctccaggttagagatctccggcttatcctttcctttttaatctgctgtgatttggagctgcgtgcttagagttgtatttgaaaaattgtactttgtgatatttaattcaattggaaccgtaaatttctcatcttttaagggattgtcgttgaacattggatatctatgtgaatcctacacaaggaactataattttgacttgtccacgttgaaccatctttgacaatttgacatacacttttcattcttatcgactctgttgcaatctggattctattgttaaattttgacaatgaacattctatagtggtacttatgctattcgtttcgtttgcttttgattcagggttgatgttgtagtctttgtcatatgggaactagtgatgttagcactcgtggtgttttcagctgtatccttgtacttcaggcggttgcaacttgcttttatcctgctttgtgtcaccttactattactcctctgtatgaaaatcacaaagcaagtgagacatgctaggaagaagaagcgaaggatgcttcttcctctctctatgtaaagaccgaaaccattgagctgttgcgaaccgtttatcttctcacacaaccaaaccacaactcttctctggcatgagttttgtgcccatatgcattgatgaagatgacagctaagctcagactgactctgggacgcatcgcttttgtcctttgaagaatcgacctgaacttgagatatgaaaccagggactgcaatttcaaggcttagcttagacaaatcagaacaaaagtgctgtaaaggttgttttcctgtataaagtagtatgggaggttgctttatttttcctaggcacgatcacggattgttaacttgagcgttttgtgattaaagatagtttttccatctatctatgttacacttaatatcatgatgaagtgatttagatttgttggctgtaaaaagtttttaaaaaatgatttgcaggattttcatgtgacgagaaaaagaaaaacaacgaacactcatgaaagtagaagagagaactataaaatgaaaagtagcaagcaacttgctcgaaacgctcacatgtttctatcattacctttgcgctctgcaactactttagtatcttgttaaagaaaaagtggtaatagttagtattatttgtaatgttatggtctgtcaatacactagcttagcttgatttgattaacttaatttccaaataatgagatactgtctacatggtgatatagctttgtcaaagttcattaatgacaatgacaaaaacaagtgtgttagtaaccaagataattgcatttagtcgtaattcatgttttgaaacggaaataattagaaagatcgaaaatctctagatatttgtagaaggtcagtacataactccacgagtggtcgtgatccaatttgtggacaaatttgaaaagcaactaaaaacaatcaaataagcacgaacatccttttccctccacacacatcaaaatccacagtttggtccatatattgctatatatatagagaagcagttaggcatttaattaaggttgcatacagacagatacatacgcaacgaaactatcaaagccgaagtaacacacacacaaaaatcatatgaagaaactaaattctaaagggattagactctccgaattgatggagaaatggagaagaaggaagaaagggcacttcgctgtgtacacgaacgaagggaagagattcgttttaccattggattatctgaatcatccgatgttacaggtgctattgcaaatggctgaggatgagtttgggactaccattgatggtcctttaaaagttccttgcgatggaagtttaatggatcacatcatcatgcttgtgagaaggagcatgtcccatgattatgatgatgtggagaagtcttccacgagcagcacctgcaagggagcttcaatctcttctctctttcgtggacagagccagcttcagtcattagtttcctaaccatttggagtaattgttaactttttttggagaagggttgttctattttgtgtataccaacatgatcttgtaataaattaattattgtaatgtatcaatgatacagtatcatcatttgattttgagtctttttttgacggttaaaacaacgatttgggacgaagttataggccctgaatggatgctgattttggattcagtttttgaatttagattttagtttatagattttagattttagtttcagatttttattattatatttttgtttcaaaaaccccaaaaaattggtttttggtttttgagaaaaataacgttgattgagtaaaaactagatttcctaaattttaggagaactaaaaaactaaaatcatgaatggaaaactacaagaaaataatttttctaaattgtagggaaaccaaaattttaaaatcttgattggtatgaaaataagtttttggaaaacaaaaaccaaaaactcttacaaaatctacaaaacattcaattcatgtatccaaacttcttaaagggcccaaaaaggaagaaaacattgtgaaagaaacagatatagaaatgggcctttggtctttaaattgggcctaagccttttaattgaggccttactaaaagtgacgactcacatggttgaatcaaatctcaggtagtaaattgtcaaagctgaggagaaagaaagctttttcggtctgaaattgaagtgcgaatcggggaatctagggtttcgagagagagataatgggtggaggaggacatggcggaggtataacttacaagggagtcactgtccacactcccaagacttggcacaccgtcaccggaaaaggcttgtgcgccgttatgtggtacatttctgatttctctctttcacctaattcgcttttgattttgggacctagctaatctcgatcgtagctagatctcgccatggggattttgggctaattgatcatctgaggaattttgtatatagaatccatttgaatcaaaaaattggatttgtcaaattagtatcggagctaatcaggtagatgttaatttgaatcagatattgcttatgtcaatttcagttcgatgagaatggttgaagaagtaatcgcacataggttttaactttccctagcattcacatcttaaaaactcaatttttggtattttcaggttctggattctgtacagggcaaagcaagatggtcctgtagttatggtaaaactctttcattttttatctttgtctcgcttttgtaaattttattggtcctaatatctttcgtggtggctgaatctgatcttgctattggcaatggatagggatggaggcacccttgggatggtcatggtgatcacggtcacggagatcatcactaggtaatgtctttactagtagtattgtcgatggaatcattaagaaagatgattaaaaaatctcctttttcgtagtaaacacgcattattgtttataccgtatagcaattcctcaatgaagctaatgtctatgcataatgtagagtagcatttctaagttgtcacttactaacaagatctcttgttaactgctatctagttggttttgaagaaagatgatagctttgatctggttttggttcatacaagtggtgaaagtttagaggatctttaacttctctataggatgttcttgatttatatctactagaatgaatcattgaaactctcgggagtgaatgaaaattgagtgcctttattgtgaatgtttgttattagtttagtggtacatgttttgagttttctctttgtttagacattgatgatttgtagttatcctcgagttcacctttcatgtaaccatataagcattgctcaaactacttgacactaatctggttttgggttttgctgctaggtctcactgaacctttgaagatcatgacgaaaaaaggatcgtctcttgtttttttcttaattttcagcttcatatgtcgaaataaagagaactgtgaagaagacgtgaattgtttttgtacacaactttgtaagacttgctgcttctgttttaagttactacttgtgtgttgcacttcctgatcatgttgttattttgctgtcaacaaattaatttgaaataaaacgcattgcgagattcgtgtttttagatccagcctccaatgatacgaattacaaagaaacactagaaattagttatattcgctgtgttaagtatacaaattaacacttacgaaactgaatttgttaatggtttttataactatatctgaaaaccaaaaaaaatatgcaaaatcatcaaattgaaaatgtctattctagcaacatgaattgtgaataaataaacaaacatctataattcaaattttacttgaataacaatttcattttgactctatttttggtgaagacaaaaagtgtgccttcaacttcaagtctttaatccaagtagccagtttaggaaacgggtaaaaaaataaattatatagaataaaagaatttgatgttgcaaacttgaaaataagtttacaaatcaatctatttaatgttaactaaacatgtccgcttgaagcaaaacctaaccgatccggacatatcatatattatctagttggtgagaatattaagaagtgaaactctcgtctgaatcaatcgccggaaaatagattccaactctatttcaagctccactacagtaatctccgccgcctccaacctcgtagtcgcgctttgcaccgcagtctcgtcccattcatcatctaacaaataggaagaccgaatggaaaagatcgaagacaaagaccctttgctcgatctcttctctagccaaggaatacaaccaagtgagaacaaagactcaaccatcgtcacaacgactcttctcacttccttcaaaacttctgtgacaaacagaaggttctgttctattggcatggccactcttccttcgtttcctttcatgttcttcaaacagtttaagcatttcagtgtctccttcttgagcttgttcttataccgattatacgcagctatcttctcgttgacatcagatgattcgttgccacgtagagtcagttgtagatcttgcaagctgtgtttcacgagcgtcatcacatctttggatacgttacagatgtctaacatcctcaatgaagcttctgaaacttgttccgtccatttctcttgtccttgttgagacagagattctcttgttttcggacagtgatggaggagatagtttacgcagtcgtgtagctctctcaaaccctcaaagttaatctgagccatagatagatcttaatctattcgagatacttagctttatgaatgtaaaaaaagaatttgaaaaggtattttttgatgtaattgtgaatggtttttagggcttcttgagagttttaagcgaagattagagatatattgaatgtgtgtaagaatgagattatatatagaggttaagaaggatctgagggaaagtacgatgaaggttcccaagtttgggtttttgtacggacgtgggacatccggggaacagctcattttggaggtattatcaaaacaatgatttaaatgattcaaaacatgtcacaaggaaccttctttgtacgtaagaggcactcgtggattagggtacattgtggattcgtttagattttcaatttataatatatagttttaaagatttttattctaatatatagtcttaaggtttaattatatactatataccatgcatgcacgagcgacggtgccaggctgtgttggtaaattgcaacaatttggaacagacggacgaatattaaatgagatgagaaatgtttagattttggatcagactttaaatattatgttaagggtttgtcagatatgttttatgtatcaagttaaatggatatattaattaccaacaagaaagtaatataagtcttacagtaacagaaaacaaataatggtaactacttgatcaatatgaatatatgatcaataatcattttaaaaccggaacttatctttggcaatacatgcgattgtgacattgtgttacgtgttaacctctcaatatatgtttctggacaagcgaaatattcacagtttcacacaaataccaatataccttttctataacgtggacagtaataatacgcatacattaatacatatatgtttatatgtctaatttctctatcaatcaggtaaccacctcgacggctcgacgcatgaatacatcctggattagattttatgtttaagatctttatatctcaggttattttcaacaaattaatatcttcccacaaattatataattagattcatatccctccaactccaaatgctgaaatgctttcatttttattatgttgttagtgcagcaatcttattattcgatttcccgtttggaaggtatagctactaattataacgaataatcaaccatgcattatattttctctgttgtcatcatcatgtagagacattattgcgtgattaaaaaaagagaaataagaagacattattgcgtgattataaaaacacacagagaaaataagacattattgcgtaatttctttagctattttttttgcaaacaacccatcaaacataaaataaagcccatgaaactcaattaataagcccattatctcaaattcatccttactctgttttgcaacaacttctgataagaaaactgatacactcatcagtctcatgattgtataactataaacttatgaaatattcatagagtactgaagtgatctgctgataattgttatctcgaactcgtattcttgacaagtaatcgtttgaatatgatttaagaacgctgcacacaaagttttacaagttctaaagatcaatatgatctgagagactttgcctaaactaaagccaacaatacttcacaatgaacaaaattacatctatacaatctcaaagagtaagcatgttaagaaaagaaactcttgtcttcaacagtttcttatacacacactccaactctttctctgtttcttcaatctcatgttctgtttctctcaacttcttcagctcatccacatcaacttcttgattcttcttattaaaaatcctcgacacaattcctctccttgatcctttcttttgatctctctgatccttcgtcactacctcaatcaacaaagaaaccaaaacatcaaagctggtcttttcaactcttttcattacattaatgacatctccacaatctctcttcctcttcctcatcttctcctctgttttcttcaattgtttgacgatggttctgctcagtgctcttctcttaaacacgtacgcgtctgtctcacgcgccacgaaagcttcttgatcttctcctgacttgcttctgatcaatctcctcctcaagcttgattcgagttccctgacttgttcctttatctccatcagaacgtctctgatcgtgctgcagatatcaagaacctcgatgaatccgtcagaaacatcttcaaatcctgtgaaagacttttgagttttagtcgtttgaaaacggaggaaaacttcgacaacctcgtacagattctttaaaactccaagtttccgacgagcggactctggtcttttctttagtaacagaagatgatcttcgatggctcgagacagaggattaacgtcttcggaccagcttgttgaacgcacgtgtgcaccagatgatgaagtacaagccatggctgattcactctatagagataataatgtatagtcaacgaatgaaaaggtttagcttctcattaaaacgtactctcaccaatatatatgtatgtgtctctatgtacatgcatgattaagtttgaatatacatatacttgcacgtagaggtaagtcaataggtcgacgaatatagatacaggctggaattggctgttgcaattaagtttcttccgacagtctaacgacaaatctacactcttctccttcatgataaattttccctctttttttttttggcttggcattaaatattcatatatggctgaaacaaccaattaatcacataggtgaacatgctgcttagcaaatgattttcatgcaagatcatcatggacaataacattcacacggataatttcttcttgattattttgtacattttatttaggtaaatatgtgaagtctctcctgaatatcttttttttgtattaccttgatttaacaacatgatgagcagtaattcttctctaggtatcaatgtaatagttaaacagaaaaagaccaaatattgaggggggatcgataaaaacctgaaatgatcttacttccaaatttcagttgcttatactgattgcatgtgcggcaaccttggatgggctgcggaaatacgaaaccaacaagaaacaataaccgttggctgcgaagtcgctctcgtaatctctgcaacgtttattataataccattggagatttcacagattaagaaatgtccaaataccatttgtatacgatatacacgcatacatgtaatataatagttttccaattaggggaaagctgggaatgtgcacgaatgggaatacttcttaaactaaaccatcaaccaagttggtttcgtgacaacctggatgtgtttttataaacgtcatggtagatcataacattccatatacatctattgctattgtataacttacaaaaaaaaatagagcctatttaaaccaaaataataataatctatttattaactaggtgttatccacgcttacatttatctaaaatttgtaatttaaaaaacaaataataaaataagaccagaatatgcaatactaatgatgtggtttcatgctgagttaattagtgtgttaatatatcaaatttaaaatttattgttcttgaaaactaaactaattattgtatagttgaaacaaactacaattcatagatcattcttgctatcgttattatcacataatattaatggatcggaagagattgttttaaaacgatcaaagtatatgaattgctattattatttattttgacctatagggaaaattatacatatacacaacagacctaatacaaggaaaaaggaaatctaaaaaaggaacacttgtacaacaaattatatacaaatatgagtaaatagagatattcatgataagaatgtgagactacaagataagtagataaccaatactacaaggaaaaggaaatctacaaaaaggaaactcttgtacgacaaaaaattatacagattacgagttaacagagatattcatgataggatatgaaatatacatacccgaatagatcacaggctaaggctaaatccgatcgagggatgagaaaacaatacagagacagttagaacggaactgtatatggtaatacaaatattccgaattgaggcgaaaactgggccttagctaggaaacaaggaatctccacatgatctctgcagcaacttcatgatcatctctgcatcgttcttgatagcggctttattagtggtaacaacattcttttgctgattgttaccaaaaagccagtcatcatcaaataacgtgttgaatccagattcgttgcttggcttatacttctttctattctttgattcacaaattgcatcttcccttatcgtcttcttactgctatgactagcatcagacaaacacgcatcttcttcttctgtcaaacaactcttctcaagttgttctgattcatctgaaacttgcttgtttggtaaatattcctctttcgtattctcttcccgttgtacctttttagaagaagccatgatttgtctttccatcttcgacaaaagttctgactgaatcgaatctaggtttcagatcacgcgtaagacacctctattgttatatcgacgagagatcaaatcagcgagtttttgttgagaatgtaatggtaagacttctgtggatagtgagggttaggtctttatttataagacttacctgtggcggtgtggggataaatgcgacatttgcattgggctaaaaatgggcctacttataaatatggccgaatcataaggcccattttttagggaaagtgttcaataacatgggtgacattgatttaggaactgcgtgttgttcggaagtttttaaaacacgggggacatgtagttaaggcgtgaaatgaaccgttgcttttaatcatgtatatacttgtgcactaaaaaaggactttgatataaaggccccacgaagttttatattcaaaattcgtaccacacaaaagttacaacttttttagaacactactcaaaaatttaagtttggcttcgtctaaccccacaaagttttaaaactgtgtgtaaatttgttagccatcaattgttaacactttcaatagacctgagaatcattttatatgattaatcaaccagaaataattgctaaacataacctaacatgtctagtttagattccaattaactgaaaataaattaaaaccccaattaaaaaaggaaaagttttgtaagacatgatttaaatgcggtgtattttgttattttctctctgataattagctacaccgttttctatttggcattttgggcacgaagtaaaattgaattcctcaatagaatagatatatgtgacttgaaccatattccatttacaaatgaaactaaagtgtgacaaaaagaaatgcatatacaaatatgcatacatttttacaatcagctattaaacgatgaaaacattcttgaaagttaaaaatatatattagtttgtgtcgtaacaagaaaacattcgattattaaaaaacattcacttgatattaaggataaaacctaacatctaaataaaccccaactatacatattgacaacaataaccaactatacataattgatgtataacaaatagtgcccaataattgggtaaagatatttgaagtcctaaattattaggaacatgtaaagttcatcctaatttctaaatagtgctattaacttttaattgtgtcctaaactaatcaaagactaatcattcgtgttgaagaccaatatccttttccatctgtgttatcttctttgttgggagttggattgaaggcataaccaaatcctagttgtcaattttggcatcgttgtaacattattccaaccaaagtaaagctttttatcaacaataatacacgcaagttgcatttcaatgcaaccaacccaattatatcccaacggtaaaccggattcagtattttatgagtgattagtccggttattgaatccacaagtcgaaccggtcatagcagccaacacgtaccgccgctaagaggggaaagattctaattttgtaagttagagaaaattaataattaaccaattaattgttaaattaatagcactatatagactaaggtttgttgtccagcaaaccccacgtttaatacggtgttagtcaaataattaagtcctaatccgaatcagatcaagatgataattgaaaagcatccctaacaaaccatgtggtggcattctgagttatcactaattaaaacttaagagaggccacaaaatatcaaaacgaatccatcgacgtgaaatgcttacaagttatatgtcttcttatgtcctttaattaaattttctctctattatttccggcaagtatatgtgtcaagtgagtttgttcacgcatgctgtttgtgttcttatatttgatgttttgttgtctaccaaataaatgataatgcatggccatggtatgagatggcttgtgaaagaccttggttcttaattaacgcgtaaccattttttttctcttgtcaaagaactttttttttttgtaaaactagattaaaacaagaagaaattcgtttgaagcaactaaatctatgatcaaaatttggtatttttctaattataacataaaaacaacaataaaaaggcagcaaatttgggaatacggtaataaagcacacggttcatttataatttggattggttatgttttaagctagaaaactatatagtatttacggtggaaaataaaatttgtttaacaaattcaaataaaaatgtctccaacttatatacaaatatggttcgttatgtaattatgtttttgttttagctaatagtttgctgaattgtgaagatggaagtgaactattcaaagttcagttttaaaaataaaaatccttttaacaaaaacaaaagttcaattttaaaaaggtgaatttaattatcgagttatagatacaaggattatgtaaagtatcgtttatttatttgtttttctattttctttcatgtagttaacctcatacaaataataaaaataatgtgacaaaataacgcaaatagacaggaaacaagaagaaaaagaatgagagtgataattagttaatgtgttagggcattaagcaatgagactcgagtgctaatcaaacccctaaacactttctcactctcacattcgatttcacggatcgaattctccaattccatcatcctcttcatcaaactctttacttcttcgttcttcttcttgcttaaaccaatcaagcttttctcttcaacttgcttcaactccacgattccttcgtctagtttctcctttttttcggatcgtttcaaaaaccctataaacggcgttgttttggtggctctgagagataagtaaacgccgttaaagagagcaacggaaaccaaaacagttacttcaatgacgtcacctataactgacgcaagctctgcgtcaccgtacgttccgttaacgttgtctacgtggcagtgttggtgttttgtcttcggctcacggatcgatgacgtcagtttcgcgatatctcttgcgagagatcggcgagattttaggtaagatgcgattttctcgtcgtcttttttacggagagcgacttgagcggcggactggtgctcacggaggcagaggatcgacgtacggaagattccgtaagcgtcaacgaatcggagaagatcttctagaagattctcgaagaaaacaggacggtttcgtagagattcttgagattgtgggagctgaagtatatcagcgagcgtttcttgaacgtccttgaggagactgagaccgtcggtgatccaagaggtggtgcggctgtgagtttctccggcgaatgagaaccaggatttgagctgagagatctcgtggttaacgtgggagattaagggatgagaccggcagggtagactgatggatcttgtgtgatgagagacacgtggctttgacgatggagatgatcggccgcaaggtttgttagggaatgagagtgatcgtcggaaaactccaaccattctcggcggagagagagagaagagagagttgttgtgatggtttgattttgaaatggtgaaagatgaggaacaaggagcgtttatatacgcaagttggtggggtttcggcaattgaagtatgagatgatgtgcacgtgggagagttacgctattttttgagaataattgctttcttatttccccaactatatttttatttagttcggttaagatatacattttatacgtatctattttgttcttccaattttacacgagcatacacctatttattagacgttatagtactttcttgtttcaattttacacgattgtgtatacaactgtatattaattagacgttttgattacataatttccgacttaaactagagccaaactcaatgctatgtgacctatgtcatgtcccaatgttatgtaaataactacataggttttttttttttggcaaataaataactacatagattataaaggttaaaggatcgtatataatagttttctaataaaaagtataatagataggatataaggtgaataatgagtatattaatcagacttaacgagttaagagacataacaaatgttccatttcaagcggagaggggacacacgtgggttggccaccctagctagaactccaatccaaaactcctcacctttctaaaataaaattcacactcggtagtatcgtattaaataaacataattgagtcttctataatttatattggtataagggtttagacgcgttaagccgttagacagatttgttttcacatggttatgaacgatcatcaacatatatacacattgaatgattaatacaaagaatatagagttatatataagttttaatcatataaattttatacattcggcgaattggttcgttcaaataaacttttatatcaattaaatgtaaacttaatatggataaaattattaaaaatttatgatcggcttcaatcgaagaaggcgtgtaaaatctaaagttattggcgtcctatattaactctatcagcgactgaagatgagcacattcgggatatcaacggcatttagtgtttaaggtaatgaatatacacgggacaaaactctaacatgtacacgttttttaatcgacgataacaacaaatcagcttgacccaagacttttaatatatatacatcatagtatttttacaatgtacatctatgactatgataatctatataataacaacaggtctttcatcatattaataaactgttagactgaagattatgtgtctagtaattaacaaaagcacgaggggtgagctggtacgtgtcagagaagggcagctccaactatgcatcaaaggatcaacatcacggttttcttgttcacgacacttcatttttgtccaaccacgatcacgaaaacaagagatatataattgtataatcttacatagcccttaagtcgatattttacttaaaactaagcattagataattaggtagtgcaagcgtgtggacttttaatacgagtgtttcggcgtagatccacaaacatcaagaggggccttacttaacgctaacagtattagatttttgaaagcatgtgacttgatttgtggatttaattgcaactgacctgaaatgaaatgtgaggagccacagactctgtgatcggattttagagatatttctcgattcaagtgttttagatccacatgatgtttccaattattttgattataaatttttgtggtgagtttgagtttgatggtcatgaataataatgacatgtcattatttggagatgataccattaatatacttgactaactggatgttgagagcttgcccgacagtttaaatttgctataaaacactaaagacgagccatcgttttcattttgaagttctgttcgttgtgtattcatcatggtttagcatgtttctctacatgtattgatgatgactgaatttaattttgatattttagatatactttgttttcattaaagggataatgtttattgtcgtttaagtttttttttgttctttcacacaaactataattctatgtcattactcaactgaaaactgaaagttttgtgaaaaatctatattgaaatataacactgaagtggtatgagattagataattcgaaacaaaacatttgtcgaaaataaaagacagccagccatgtataatatatatccgcatctttcctcgcgtgatgtgacgagattccaattcatctgccaaatgttagataacttagttatgtatacatatcaatgtatacacatatcaatgtcttccaaatccataggaaaagtttccagtagtaaaacttaaaatcgtttgttccttaagagtgtatcactttgtgggtgcatgtaaggatgcgtaaaagatgtataaaatctgcactagtggaaaaaatcgaatcctgtaacagattcaaaattaggaacagatttgcttctttcacgtggtaaatctatattttggtttttttttttttttctcagaaaaggaagatcttggctcagctcaaatctcaatgtgcaattatatatatctagtttgcatttgatcaaatgtaacctgatatatatatttcaaaccaaactaaaaggcaaaaaactaaaacagattgggaaaatttgttagcgaattaaattggacctaaagcccgatatgttctaattgggccgtaagcccaaagtacaaatctgttcggaggcgggagcttcccatttaacggccattcctctcatattttcaaactcttccacacatctcctcgaatccaaaccaccgactcgtttcctcgcaagtgcgagtttttctccagcggtttcgtcaaaaatcttctcccaacctttctcccattctccatgtgcgtcgcacagctccaccgtctcgttttcccactctgtccagctccactctttattcagctttcccatcacttctgccacgcaagagccgttgcatgcgaccgtgcaaggacggcacttggcaccgtttaacggtccacggctcgatagtgccgccactggaactccgtatctatatggagggaaatcgtaggtccgatcagtcatgatgcagaaagggagaggtttggtgacgtaaggaacacgttgggttgtgagctgagccttgaaagcggactcggagttcagatgagttaacccggctgaatcgaggtcgggaatgagggagaggcgagagagagctaccgtcgaggtgttgagatctccgacgccgaaacggtcgttgagaccaccataagaggatccaggtggaactaggtattgacccggtatgaagtattccgggtcgagcgggtcagcccagtaaccatcaactcgggtccggactatccagtcgtatgtgaagttattctcgttttggtatgcctttatcatcgtgatgcaaccttccacaaggttgaagtactgtaataagccctgtcattgagaccaataagaaaacacacatgagaaaataatggattaacaaaataataataataatataacagaaacaaattactcgatgttaaaatgctagttttactagactacttatattatcatgttaaaatcactttttcaaacatgaaatgtcaaaatgttctaaaatgttatgaataatatcaactcaataaacgtaaattgatactcaacaaaagtttataccaatgtatatatatatttataatacttaatgccatactgcgcattaaccatttacttgataaaaaatacacgaaaaagcttacggattcacatcatcaccacgccacacattagcatcatcatgccacgcattagccatttcgtaaaattattaccataaattaaaaaaatacaagaaaaaacagaatacctttttccatacaaacaatatactatgtgaatttacaagctgtcagattaatcaagatcttctttatcaggaaacgtgggtccggataaggtaaggggtcaatttcagtctcggactagtcggctacaaaatcttgcgagttgctaaacaatagaaatttcaaagataatcataacttcaatctcaacctaacagtctcatactattaactatagaacccgaatcgagaaagaggcaataactcatagtattaacaaatatagtcaacaattaattgctatcacacccatatcttagagacatccgttaatacctttagaagcgtcatttttgaccgcaattttgttataaagtaacgaggaaataaaaaagaatatcatattggatgggattgtgacaacatcaaataccaaacccatcatcaaacaaaaaatcccttcacatgagtaacgtacggatcaagaaacggttacaccaaccctaaacctctccaactaaacggaggtccccgctcctgatcactttcttatccttaattatatattcccgaattttatgcacttaaaaatttaatgtaatactccaacatttaattaattgaaagttagtgaaaagaatttataaggtaaggaagttcaaaagagtcgataaattaccttaatgccattgggcgaattcataggtgtgaggactcgaaccatcggctcagtctcattgattggcttaggctcaaagatacgaacccaagcaagtcttggtgcgtccttaagtaaccgaagtttgaaagaatttttgtcgagaggactattaagaaacaaatcagcattaggataaaccctcaagatcttctccataatcgacggtccggttaactcaaaccgcctcgctcctcctaccaaacacaccgcaatcttcgacttaaccaactcctccctcttcctccgccgtcgattttccatctcctccgcttggataacgtcgttagggttcgaatctgacaattcgacggtgaaatcggtgacggttagggtatgagtgtagattaggttacgaagaggggctagagttggaaaaggatcaagtgagagagatgagaaagagattaagacgaggagggtgagagatgggattatgagaaggaggagaagacgacgatcgacgtcggagattctcctggaaacgtacataacggcggcgtaagtgatcgtaaccctaatctgtgagaataaccaccaccgtggattgttcacacacgtttcatttgccgagagagagatttttgtatttatagagttttgattttcttcaaaacttttgaagtgattcggagaggcgctggtttgttggagtggaaggtgaaatcaacattacgcgtgggtttggttttcgttttctcttttcttctagagagagatatgaaatatctatgtagctctgtataaaaccgatgcataattaattaaaatatacgtatttgattacgttttcaaaaaggaaatgatcaatgttacttttgtttttttcacgtttctttgtttgcttagtaaataatttatgaatgtttgaaatactttggtgaatagttttagtgctcgatcgttacagtaatcaattcgaataaactcttcactaaatatgctcgttacagtcttcacgtttattgtaactgttagacccccactcattgtgtattaggggatgttgacaagtatattgaagagattgatatcttgaaaggcgtacgtggactagtaaagaaatggatagtttgggttgcaagaaaagttttactttttgtattcaacaaaaggaaaagaaaagtattttttgttatccaagatatgactttatgtagtatattcatttgagagcattgtattaattagaatgttcacatatatcaatatataattatatatagaatttgctcttcaattgtaaagaagaaatgaggttccaaatttgttattagtgctctaaacatatatttttattaccttagaaattaatatataatatttctttctttgctttcccatgactttttactgtttttggtaacaagataatactttccctagtatataagatttttaaagcttttttgttgttgttcccaattagtttttctctagtttctagtcataatttatattaattccatagtttatgattatttaaattatgcagtattttttattggttaaatttttattaatgataaaacatgtgattttagccaaaacatctaataaaatgggacatatggagtactacaatagtgatagatcttttatttacctgtttattatatatgaatctattcaattttcatttatttacatgtttatttaaattatttatttaatttgcatctaaaatttgcaaaactattgttgggccatgagtgtcaactgtcaaatgtcaaccatagaagcaaaaataaaacagtttatgattcagtttgtaaaagtgggcttatttaaatgaatattggcccattagtatcatcttcacgaaacccagcaaaatcagagagcggcaaatcgttgaagagagatcttcttcttcctgaatccgtaacgttagctcaggcgtaagagcataatgcaaggaggatcatcgggtattggttatggtttgaagtatcaggtagttcacgatcttcttcatgcccgatcctttgtcaatttacgagctttcttaatggtggaaaatttgctgttttcaggccagatgtatatcggatgttaaagcagatagagatcacactagcttcctcactggaaccctaagcttgaaagaagaaaatgaggtgattgattcttaagatctgtttcgttctatttctggatcggaagattctgactttgttaaattttaaggttcatttgcttcgtttgtcttctggtggatctgagctgttatgtgagggattgttctcgcatcctaatgaaatttgggaccttgcttcttccccttttgatcaacgcattttctctactgtcttctccactggtaattctcatcatctcgaaacttctaattttgagttgatttgaagtaaaaaaaatcggacttttccgattgaatgcataaagtttcagaaattgaaactacagtgttgtcagaggagaattacagtgttgttgttttcaatttcaaggcgactcatatggagcagcaatatggcagattcctgagccatatggtcaatcgaattcttcaacattggaatgtgttgcttcccttgatgcacatgttggtaagattaattggtgagttcattgtttacagtttcagcagtctatctactgggtgtgcttataagtgcggtggtttaaaaagtcttagaacttgtaactttcttatcttcactttcatgaagactctctatacctcttgtggaaacagcgttctttggtgtccctctggaaattctgacaagttaatcagcatggatgaacaaaatcttgtcttctggagtttagactcttcaaagaaaagtgcggaggtgattgttgctacaacaagagaaaggataaacccattaaatcatttttgcctcctgtgtttttagaccacctttgaggtactttccgcttaatcatcttttttgctaattataggttttatctaaggagtcagctggtatgcgtcattctttatctggtggagcatggaatccacatgatgtgaattctgttgcagcaacttctgaatcatctatccagttttgggacttacgtactatgaagtatgtcatatttgttcctctcttatgttcgcatgaaagttaatatactgtattcctgcatgcacagctagcgtgtttcctctagtcaatagtttgtcattattaatttttgggttccaaaatcagatacctttatgttgagcttgatatgtttgcatatttacaggaagaataattcaattgaacgtgcccatgtacgtaatgttgactacaatctcaagagagaacatatactcgtaagatttctctctctgtatgcaaatattttaaatgcttgtcaagcaattccaacaaagaattacacagtgctccaaagttagaaaacaatctgttatatagattgcaaatgggtaggaacaaggaagtaattgtgtcatttctgatttaattttttcttcatagcaagaactttttatctgaaaggtagtaggtcccctatttacagaaatggtatcagatggttctatttatgcattggactgtcgattgtgtaggtttctgcggatgatgaatctggtatacatctctgggatcttcggaagacaaagtttcctgtgcaagagctccctggtcatacacactggtaatttacctctaaactcatttttgtggattattattttttctcttccatgattctgcttcatatgcacacaaatctaatgctttcgacctgaaattttgtttctagcgtgactgttctttctgaattttctttacaggacatgggctgtcaggtgtaaccctgagtatgaagagctaattctggtacccattttctcttaccttttttctcttagcacagtcgaacgaatctaaattgttattgtgcttgtcactactgacagctttaagctgctagtcgatgattctagaacaatttctgtcactcacaatgtatatttaaagtgtcagtttctgataaattaaccaaacacagagcgttggaacagactcagctgtcaacttgtggtttgcttcagcatctagtgagcataaaacatcagaaaggttaattctctttattatcgcacacaacaatttttccaactttgttttgaacttttattctaatgccgatgctgtgcagcccggtggaagcatcacgtcagcgtgtgaacccgttactaaactcttatactgactacgaagacagtgtctacggtaactcttggaacaaactgagtttagttaccacaatttcccactaaaactgcatgaagtcactatataattgctgtcacaggccttgcttggagctcgcgtgagccttggatttttgcatcattgtcatatgacggtagggtaagtgactttgcttttgacaacaacctaaagaactatggagaactaagaaatagacgatttattaccccaaacaattctaaattctgaaagcagtttggagagttcatctcataattttggtgtttgcttatgttaggttgtgatcgaatccgtcaagcctttcctgccaagaagataggtcccgatggaagaaggcttcaaagaaaaagctgcattcatatgctatcatttaagacaaattttgaatgtttttataataatcacaacatcaaaactattcttctacagttcttcaacttttactcgtgtctttgttcatctctatctctcagcacaaggcacaaagatgtaaaaccaaacctcgtgaaaatactttggtacaaagtcaatgaacctgctgctataattcagtttattgtaaagaaaatattcggatcaagtaatcaccggtgtcataatgctacacatgcctacttgttttccctttttctatagctactttctctggtaaagccacaattccgagtactaaaatatgactgaaaaaaattgatctgtcctcagatcctgataaacaaaacaatgctctatcgcgtggttctatgtacaggagacattacatgcaaaatggtgacaacaaggcttagcaccaaggttggaaaactcactgtgaagtgcccaagcagaggacagattcagtgtagtgatgtgaaggtcactgatgcgtatctaactaatctgatagcattgcttcaagctcaggctcatcagaggtagatggatcatcgtaatctaaacttgtcccgttgtataatcctctgtcctgaagatcactctgttcttcctcatagtctggctccgaccaatctgggtcatcctcttcggtttgatcatcattggttacagttactgctgcgtctttattagtggatttgtttttctttccaagttttctagattctaattgcgcctttgccttagcctctgtatcttcgcatatgcacgtggatgggttttcgtgaaattcacctctaccagctcttacttcctttggctctcccatgaaccctctctgaaacgaacggactttagatgaaaactcctcccatgtcgtgttctctttgttcatgaataatctgtaaagcttttttgcattcggcctaacagtgggtttatgtcctaagtatctcctgcaaatttcatataaccaaaagcttaaacctttgcaattccatcaaagaaacaaactgaaaaatgcttaaacaaagagatgagccaaaaaaacatagaagaagaagaagaagatgtttcagtacctcctcccagccaatatttttgccatattgccattgttgttggttacaaatacgtcgctttcatcacaaacaaggaagtcgagtgcagccattctagaagagtacgaagaaaaaggttctaactcttcctttgtagctatagtgtcttttgaatagaagtgtggaaagagtgctttcaaaggagccaatgattcttctcctccatatacttcaccagacgcgacatatatatgaacatcactgccatatcccaaagctctaagcatcagtccgacttcttctggagtgagtggacatcttccttgtcgcctctgtttctctgggttgttaatctgcaataaaattgcaaaattagtcatcggtaccttgttaatatagagtacaatgaatcgcatgtaatttctgaaacattatacagaataggcattacatgtaatgttttccatctccttctaattgctgcaagttctctcctttccttatcaccaccaccataatagcatcccgagaatgcaagcatatcaggttcatacctgcaacacaatcaatatcacttgcgtcaaacactagtatttatagagattcaagaggtaaatgtaaaatatcataattgttgactagaatatcaaaaatgtgatggagtcactagaggaactccaggataaacatatttatgtatttgattccactcgtttcacgatgcaatctcctctattagatatgagtactgaggtttaccaaaaagaaaaagctaagagcattcactacaggatggttcagctgtgctacatgttaattctccccagaataatgcccttgttcagtgacgaagtgaaaaaaataaaagaaatactaggatttagagatgagcggtggtgctaccttaaatgtaaagcaatgaagtgtttgctcctcaatctcatgcgccggaccaattcattacccattgtaagtataggatcagtgaactttagagcatggtaatttactctacatcttagcttttgcaagtcatcactcaacttgtttgaaagtctatagtcaaatttgttcagttgaactgcctgaagcataatacagacaaaagtgatataagaataaatcgagatgcttaatccaaaagacaaccactgcttcaagttcatgtttcgaagcaaacatcaatattgtagcaatcaacgaaatgggcatgccaaaaaaaagaatagtaccaaagacttgtgaaaacaattaaatggttagacttgtgaagacaattatttggaccaccctaagcaaatagtcaatacagacaacaaacaatttgcttagacatattttaaatgcaataagtaaaaagtttcagcgaaagaaggaaacttacatgccttttgagaagaacaggtaaaacacggttaatatagcatctctcgttacatttccgtggtacacgcattctacttgtactccatgtacgccctcctttcagtggaagttgctttataattctgacgtctccagacagaaatgagataaaccaatcaacatcgaaaatatgcgagaagtcactgcacaaaaattcacaaagttacaaagatgcataacgtttctcataagaaaaagctaagtatgcttaatctgtctcagacctggcatccttccagtaagacttctggtctaacttgggaacaacaagagtagcatttagaatccttgccgcaacaactgcatctacaatctgtagaaggattagacccatcagctgattaatagtaaacaaatgcttgtattttgataatccatgaagataggtattaacaagagaagtcaaacaaaactcactccagttcgttgttggttcaaaccaccactagtggctattaccaagtatcgatcatttctcgtcactgctttcgaatctgcaaacaagtaatcggattttgtatgacttgataatcagtgccttgattccatactaatcgaaagtttcatacttttcgtaagatcagtgttactaactaatggaatatgattaagagtgttacgcacttgcgaatttgctgcttgcattgctgcatccaaaaaagaattcagcatttcgtgaacgccagatatcacgatctgatctgcctccagctctctgttatggatccaactaaatcatcaaataggtcggaaaagtttcaaactttagcgaagaatgataaaacccactaaccggaatatggaaacctgtagctttgatcgcatcattggatgagtagcgaacgcgtggaggaaggcgatcggaatctccaggaggcggagcaaggaaagagagaaaagcgaagagaatgaggagagatagagagacggcgataacgagaggaaggagacgacggagacggttgtagtaagggtagcgccgccgatggaaattcatggcggccgccgtgcaactacctcgctgctcggagatatagagagattgagagagagaatgaaagtttggatttttggaatcaaagcatgttgaaaatgttactgtatttgagaatcacaaagcattgtttcgatcacgagagacaaacaacaatattctcttttcttcaaacaaacaaaatcatcagagagagagagaaattgagttcctttgtttttgagcacttcttatagagaggtttccatcttattacaatctgtttaataaaaatctgttaattttgatgacttttgactaacaattatttgatatatattagcttacattatacatttagggtaaaataaagcaaagattaatatcaaaatctttaatgacggcagtcggcagcattgattttttttactagtcttaaattgagtattagcttatacgtaattcggttaaactcatatttgcctaactttagttgttatcacattgataaaaacattattatcagggcctttatatgaatcaatggaatacacatacatataacactcaaagatatatgtccccaagtcggccaaaaaaaaaacaaatgtccctaatagttgacaaagaagaagagaattggcctcagttattaagtaaaagataatagttagtgagtaatgtaattaagtaacaaacataaatcattttggttaaaagagaaaatatcttcttctttttatttatttaaaatttaggaaagtatcattattttttgttttgcattgttgtacaatatactttagttagaaatttggtattctatggtttgaaatcagctaagtaaaggattggtcctctatctatggacagtgatttgtatttggatgagtaaactacaaaagaaaaacaggagcaagttgtaacattattaagtttgtttctgtcgtttccatctgtcctttatgttttctcagtaaatattctcttctttgtttcaagtgatcaagtttcaatatcatatgcattgcacttgttacctttatttcaaaagtggttaaatccatattcagaaaacatacttataactttgtataaccaggtgcaattggaatatctttggctaattctttgatacacagttgttgaaaggtaaaaataaacaaaagttacagtaagaatctaaagtaaataacaaaactcgcatttgatggttcgcaagtcgccttgtatttaggtggttcgtagccgcttaaaaatgcttctaaccgtattgttgatccgtctcatctaaccgaatcgattggtgacctccaaaactgtgttgtcactaactagtttgtataggatacaaaaccaaaacggagcagcttagtgaaatggcagataatcaacaccagctcttattcaggaaaacacttcccattctacctattaaccgtacttgttggagagtgctctggcccaggggctttggtcttccgaccatattatccggcccccgagcattgcacaccatcttagattcagaagtgctgcagcaagatgctcctcagattttctgaacagttcgattatctttgtttcagcttcagggtcttcgctcatgacgaaattttcctctagctctattttcttgtcctgaagactctccttgtcttcttcgttgagcatccttaagctcagaacattcaaagcttctatagctgttgcatgataccctttctccacataacaactgaaaacataatgacatgtcgttggatctggattcactttctctcggtgcatttgctccactatgtactcaatcacatcaatcattccctgcagacaaaagttatgtgtatactaaagcagtttattcactttcattactttaagcgtttttacaacaaatatctttaccttctcaaacgctttacgcaaaatggtgttgtatgataagacatcaagatgtatctcttctaatgccgcttggtccaagagattgagtgcctcctcgaaattcgcatcattcaacaaaatctaagaggatacacagctttagttaattaaaattaaatgaacagcaataagctgctagattccaaaaaaaaaattggaagttctgagcgtgagcgatggttcaagaaaatttggtatgtgtctgtactgtgtgtagaattctttcatcctgaactgaatacttacttgtagcaagttcttgagaaacaatggcagcaaacttttaaaattgtaatcagatactttgttattaccttcatcagagcagtaaatgtaacagcttttggagaaaacccgtcacggatcatcatggaaactagggcacaagctgatttatacgagtgaataaggctgcaacaatcaatcattatattgtaggtagcaacgtctgcagggcagccacatgatttcatacgtttgaatatattgatcaccatgtcagtctgcatgtaatttaagtagcgatcaatattgctatatatgctggtccagtggaaatttgataaagctattagaccatgaaaacttacttcgtttgcctcgagaagtgaatgaagcactatgttgtatgtaggcgttcctagatacatattgctgtgagcactgaggttctcagccttttgcaggtgtcggatcatctcattcaccataccttcagctccgagagctctaagctgggaaagaaaaaggaaagtgtaaacgataagtccattgttctgatatataacacaaacatacacaatgaagaagtaaagattgatagtatcgccttaaaagggattttccagattaatattacatttgattaatctgcttaaaacaggtcaagacctatctatatggagcagaaactaaccacattcagccttgagataggactgtgctgaaaaccatttctcatcatgtccatttctatagcgttaatccttttacaacagtctacttgggacaacatgttgccctcttcatatggtgcatttacattaccaaataaggaaaagagcagttcataggtcctcatatctggacgcagttttagctctttcattctagccaaaactcggacagcacgctctggttgatcctacaaagcaatagtaagaagctgaatctcacagttacacccgtaaataaacagaataaagttgtttaggttcaaggattatgtactaaaaatggacacatactaacaagacaaccacttagaatgccgattatttttgtacgaatatttcgagtacgaactaatagaacagatcattaaccctttgttccaagactctcctatgattagagtggcaacatagtcacaagtacggtcttttgaaatttctatggcatctaggatcaaactaatgaacttgagggttcgggaaatatacttgtaacagaatacacaaacagcgaaaggtaaacgaggtagctacggtatatagcttccaatatgtagaatcaaactaactcaccaaggagtcatatgcagcaagaaggttattgaaaggatatgagtatgagcattcagatatttgatccagcagatgttcagctaaatcaacttgaagggctttactgcaataggctgcaaccgtagctagagttgaatcatatggtttcagattctgctgctgcattactttcaactgcgtagagatatgatatataaagagaaatcgttataaaaaaaaccgaaactacagaaagaaagaaatgttgaaagagatggcttgtacattatacaaactcctaccagtgtcatgccatattcatatccttctggaaatgcaacagctctaatgaaaccatcatatgtgtgacttgatggtagcaacccaagattttgcatcttttagtgcagataagaagaaagaaagaaatgaggtttcaccaaataccacaaagcaggacccgaaccagttaaaggacaaaagggaagcggactatataacagacttttatagcccaacgaggacgtaaagagcgtatcaatgatcatgaaagcttcgaaatttaaatcaaggtcatagacagaagatcaaaattcccactataagattcgttaatgctgcaactgtcttctacaaatgttcaaagagtttttcttctcataactctacagtatcacgcgcagagcatagcgagtggataaggacatgaaatggatgaatgggaaagaagtgggagatacctgaagcattagctgctccgctagctcagagtttttagattgtccacatgcatgaatcacatcattgaacgaccacctgaggaccctaatagcaaggattttattgtgacctttcggcaaagccacttttgaagacgaattgcagtccacaatgcgatcagttactccaaaagcaaatttctctgatcctgtttcatcttttgatggtacaggaatatacagtctcgtggaatgcaattttcctctgttggatttaacaaagaactctcctcttaaagctagatacaccatgtgttgcaataattcatatgctgatttcaaatcccctagccttgtaaaggaccatatgaatcttctgagagaaagtatatccaggttatagtggttgacatagtgtttccagatatcattgacagttgatagattgcgctgaaaaactgcaagctgaaaataatattaatcagataacaaagaaaaagaagataattatgcagatcaatgaaaatgaaacctccatgtcaaggaacaaacgaaagtccttaagggacagcaaagctaagacagaaatggagacaataacaaaaagataagtcctctccagatcttctacactccaaattttaaagttggcatacgaccagctcttgaaaaaaacaaaaagattaaggcactgaaaaatgatatgttcttaactaaccttgagaagtgctacataagttattccattcttccccactctccgttgatccatcaattccaaacatttactagcgtgatatacgcttctcgttcgtgcacaggctccaagaaaaaagttatagataggcagaagaggagatatacgatcatcttctctgacagcgtgaataaactctgatgcctgaacaagtatgcccaaaactatttactcatctcttttagtcgcattatgtaaggaaatactggctttcgagtggaataattataccttatctaagtgtcccccattacaaagggattttactatgaacaacaaagatctgctgtccagactaatttccttcttgcacattacactgtaagtctccatgacaaactacaggaacaaattactgccttgaggtcagagacaacaagagtactgtattatgagaaacaaattacagatttacatctcagccctaccaaaatttcattgaaatataacttgtgaaagataaacgaagattaaacaaagccaaagggagactttgtcatatatcaaacttaccacaggatccggtgatcgagcacaataatatagaatatcatgaaaatcatcagcactaagtgaataattcccctgtattaacttaaaaagcaatgctgacgctccttgcctctctcctgaacgaagggcatcaacaatctgcaactgtaagatctttgactcatcttggcatcgaatgaattcattacctgcatatggaaacatgcactcttaagtcaaaaaaatctcgtctttcataatccaagtaacatcaaatagatattgagacaaatagaccatacgaagaggctaaaatcagacataccaatcattgtcgtgacactacgagaacaagaacaaccagccccattatcaattccacttagtcctcgtccctataatcaaatacccatttaatcaaattgcaataagtcttcaaatttaattgaagaaacacagggaacagataactaactcgagatacgtaaggcgttaactttgacgacgacgagctcacaataaatcgcaatggagaaagccatcttcattgcacaaacacgaagcaagtcaatgaacatttattgaaatagtaggcaacacaaaaaaaaaaaaaaaaattgccaaaacaacttacagagctctgtacatggctttccaggctcgattctgaggttcttcgagattagaaaaggcgaaaacttacttcacaaactaaaaatctaaactctaaatcagtaagcgaacatttccatttatcgaaactcgtttcaattatgtgtatctggttctagcagatgcgaccatgttagaagaggagagaagcttgccgaaaagaaaacatttcaggtttatcattctgatggaaaaaacaattattgggccgtattcttcacatttggcccatttatgcatttctgattgggcattccaatttctctccggtttaatttgatctgggctggtataagtttgtatgatagctattagcttgccttgatccatggaagaaagattaatctcataatatttatttttctatcaaaatgaattgcttaaaggtgaaaacttgtgaaagatatttccaggtttctaacattatatacataacatagtctccattaatcatcatgaatactaccccaataaaaagtaaatcaagaacaaaaaaaaacataattcaatcaacagcacctgatacaaaaatatcaaactatcagtgtgcttaaacaatgaaacgacataatagtattaaactatcagtgtgcttaaacaatgaaactacataatagtatcaagagaataatacttgccgagtcatacccattatcatctactgatatatatatttttgtcttatgttaagatcagtctactagaaatgagacttcattattttttataaatgtcaaaataacatagaacatcagaacatataaactaaagcttaaagtttacacttttttttttttttataactttattagatgcattgataaattatcatttcatttactccacagctctcaattgaacataacccatatccttggccatctttctcagaacattctttcgaatcttcccagtgggagtcttaggaacatccgagaagactactgtctttggaatcatcttcatgttcttattcccaagctttctcttgcagaactcaatgatctcttcctctctcgcttcagctccttctttgagcttcacgaaagcacacatcgattctcctaaagtttcgtccggtcgacccacgacccctgcgtcataaaccgccgggtgactatagagaatcccttcgatctcctttgatcccacgatttctcctccgcatgttataacatcttgtgacctatctttaaattgtatgtagcttcgcatgtggaaacatcataagcataaataaattcaaagtaatacattcaaagtaatgcatgattcatttacttacccatcaggatctataacacccatgtcgcgactccagtaccatccacctcgaaaagccgcttcagtggcttccttgtccttgaagtaaccgctcatgactgtatttccccggagagcaattaccctgatagtctttccgtcgtgtggaaccgatttcatggtggttgggtccaatacatcgacagcttccttggcgaaatggttgagaccatctcttgccttgagccttaaactctcctcttcaggtagagtctcccactcgggcatccacaaacaagctgttcctagtccatacacctccgagcatccataagccatcatcactttgaatcctagcttcttgagtttcaacatgacctgtccaaataaattaatatctttactatgattctatgttaaatattaatgtactgtgacggagctaacgtataaagcaagggattgattatatataacctcaaaatatggaagttcaaccaaataagcctgattgaacaaacatgtaattcaaaactctgtgatagttagttttacctcaggaggagaggatcctccgctcataacctgtacggtccatggaaacgacttcttgaccgagtctcttgcattagcaatcatgttgagaaccggaggcgagccaccaaagttagttaccttgtgcttcacgatactatcaaatataacttcgtcgttgacttccctgagacagacgatgactcctccaaaagccgtaactgtccaaatatagcaccacccgctacaatgatacataggaactgtacatagataaaccggcattggtttcatctcattcataacaccaacagcagttgcgttcagataggcaccgcgatgactatagacgacacatttgggagtcgatgtggttccagatgtgaagttgagggcgattggatcacattcgtcaactggtcgtattggtttgaaattagggtttccagtggagagaaaatcctcgtattgttcatattttgattgctctgttggattttctgtgattgtgatgatgagaggtttttcttcaatgtttgagaggagactgagagattcttcagcgacagagaggaactcagagtcaacgaagaatacttttggcttcgttttctccagcgccatcgcaagcatctgagaatcgaatgtcgtgttcaacacgcaaagtactgctccagccatcggagctccaaaataaagctcgcataacgcaggaacatttggcgctaaagcagccacctgataaaagaaatagtttaaacaaaagaaaaaagtatgaccaatatataaaagtcgtttaaccacttacaacgtcatggcgagagagaccaaggtcagagagagcagatgcaaggcggacgcaacggtcacgtgtttggtgccacgtgtactgaatatcaccatacacgacagaggttctggagccgaagacgacagcagctctctcgagaaagctgatcggagaaagcgggacgtaattcgctgagcacctcattgttccttccatttcttttctattgttattctctattgagctactaaaatcatataaaaattgtggagtatttataggcaaactattttgtgtaacgctccaaacaattaatatggaatctttgattaatatggactacaagaagccaaattggcaattaaatcagaatctgtgaagaagatttgtacattgcaacatctgtttagagaatctgagttgtcacaacttttttttttgaatctaatcaccactcggctagttgtcacaagtgtagaggagctttaatttacaaacagttcttatctttttatttttttgggtcaactaaacaaatcttatcttatcttatactaataaaacttaagagtaaaaacaaagtaacaaaaaaggcacacaacattcaactaatgggcccaataaactaatgggccgatccaaaatctaaataagaagtccataagagtgtggagctttaacgagagaagctaaattgttcaaagctttttggctgctaaaaaggaaaagggaaggttcaattagggtttagtgaatcgacgaagatgagtcggagtttggggattccggtgaagcttcttcacgaatcgtccggtcatatcgtgagtgtagagatgaagagcggtgagctttacagaggaagcatgatcgagtgtgaggataattggaactgtcagctcgagaacatcacctatacggccaaggtaatgtcttactaagttactagggtttcgtttcttggccattgcctatgtaggagctgtgaacagtttagcttcttaggttgtctctttcttgtgatgttgagagtagttcaattttggaggagaattgagaatccttgtgaaattcttgacccttaaattgtgttcctagtagtgattgggtttagttcctgtatatgctagtagtagagaagaaatgttattacaggtcttgcttatgttgttactatgtagaatcatgacatgtttgcgattaaacaaattacaagactatataattgatcttgaattgttactacagatatatgctcttacacatttgtagattgtgattagaaatttagtatcttctattcatgattgttactaaactttcgtttgggctctttatggaacaggatggtaaggtatcacagcttgagcatgtcttcattcgaggcagcttagtcaggtgctgctagatataaactccttttgacatctctgcttgtttcctacttatttacttttgttggagtattctttttcaacttagctgactgttatgtgacattttgtaaaatcttgacaggtttttagtcataccagacatgttaaagaatgctccaatgttcaaggatgttaggggcaaggtaaacttcttgaacgtgatggagaatatcaatcccatctatgctttataaacatggaagctaataaacatcttgtttacttgatcaatacagggaaagagcgcttcactaggtgtaggcagaggtagaggtgctgcaatgcgagccaaagtaagttcacctttgcctaagtccttaatgtttctgatttacatctcaagaagacaatgttgacaattcaaagcaactaattgaattttgtgatgtcatactcagggtactgggcgtggaacaggaggaggaagaggggctgtgccacctgtgaggagatagtttagttaaccctcgtaatgtagcttcggctcgtgagacattctctgcagtatccatgagaatccgccatcttcagctcgtcacttatgcatttaaggtacacagcaagtaaaatctctaagacatggagggaagagagaaagaggaactagttctgtgttttgggttactaagatgtttgaaaaattgacatgttttgttaatgtggtcattgagagacttcccacatcttatgtataatatagcacgattcaaatttctataatgaatgattcgtctttttaatcttggtagaaatcagaaatcataaaatgatggttttctaaaagcggtcgtttttatccatttattatattcattcgtttattaatctgataaagatggtcggataaaaacggagaagacacttgagttgtagtaggaaataaaacattcgacataggtaatggtaaaaagcggcaaccgcgatttcatggtttagtttcggccaccatgactggaccgcggcccgagcggcttcagcataggtagttgtaaaatcgactggttcttgtttttttcaagaaatttagcgacttgaacgaccaagtcaagagatcaaagtgattatgtccacaaaaccagaagcctaatttattttcgcgacaaatgttgtgaacttgtgattgtgagtgataagatatgacttggacatttggaaagaagagcggaaaaatatgttgaaatgaagaaccctaaaaagttaagagttttaaaaaacgctttctgttattctcttatcaacgaaaatgagaagactaaaccatccacagatatttcgaaaacaaacaagtgaacccacacagagatacgtacgtgttcagaaacttcccccccatatgatgcaacttatgttgctctctcttcagtgataaaattaggtcaagtcattatagattccgtgtgacctaattttaacagttgaatcacagcagaagaaacccagctggttcaattcttgcagcataaccaaatttggatgtgttgtatttcctgtgaacacctgttagcttccctgtccctgccttgtgatgcaaaccaaccatctttctcgaacattccctgtgagagattgatcatcaaaactcaacaacacttttagaaattccaaattatatcagtagaaaaagctacttagttttgatgttcttacagaagcgcttcttcggtgtagcctgagtggaactcactggttttgctccaatcctcgtatcctttaagtgtgctctgagcagtgtagatcgccgatgcagccaactgagaaggagtgtactgaagcatctcgtactccactaaacaaagctcgatcatgaagaatgataaaagctcaagctgaaaaaccaaaccttatgatcatgttttgattctttatatatcacataagacagaagattatcatcaaagttacacaaacctttttgtcagattgtgcagctttgagaaaccgtctcatgaacacatatggagttggcagacagaaattgaattgcaaggtattcgccattaacttctcctgcaagacacaataatgatcatccacatataaagcagagcatccatggttataatcaggacaagatttagtgaaggattttaccatatcaagaatctctgtcctagtataagccttgtcagagatcaggattagatcatcaacaactggaactgaaacttcttcatatttgcaagcaagtaacatagctgttacacccacaagctgaagctttttcctcgcgatatgttgatgaaccgcaagaaatctgtcaatgagattgattgtcaggtaaagcgtctcctccatcagctcaaacttgtaatgtacctgcaacaaagattcacagtaagctttacagtgagacaactaccaacaacagagcaattttatgttcatgtttttgtgtgtgtatatatatatacctcaatcaaccaatcaaaaaggattcctctcatcctctcgttaatgtcatgttgattctccatgtagttaggcgggacacagctacgacactgcaaaataattgaaaaagtttcaatcttgaagctagaatgatcataatgatacagaaacagaacactaaaagttacctcatttttcttgtagaagcaatatatgtcattaatgtattcaactacagataaaggattgttcttgtcacagctgtctatatccatcacagactcttctacttcagcatcaatatcatttgaatcttgcatttcaatcccttcctgcagaataaagacaacaggtttcttcatccgagtaaccaacaaaaaatagtggcttaaataaaacatgttattattattaccattttgtcaatctcttcaagcattgcttcagtatgttgaacaaacattggttcattaaagtctccttcttccacatctgttatgattctatctaatgcttcgtttgaaatcaagtctggtttcttggtttcctaaccacaaaaaaaccacttggaattagacaacctaaaccatgtcatgttttcaaatactaaattcagatagaatcaatataaaggtacctccttgtggatttggagattgttctcagctaattgagcagcaaatttcctgaaattaaataaagaattaaacaaactcatactacaattttgaaatcgaagcagaaatcaaatgaaatcactcacctagtaactggtcgatgcactggaacaggtggaatcttcttgttacaaatcccatttttcctgagaaaacaattggttactaagataagtctatgcaacgtttttattaaaggatcattgaaagaagaaagtaataaaaatataattactcagtgaatggtctcttgacagcacaaggatagaccggagctccgatgatgttcttgtttatattactcagtgcccttcttgtctgtccattcgtcggaattacctttcctccacgtaaaccccctaacattggcaaaatcatctttttagttaatcaaacaaaagattgatttttgattaaatgggtcttcttgtttttaattctgatctaccttgttgtcgattcatcggtccaatgactccgtgtctgttctcatccgatccacccattattatcttccgtatctgagaatcgcagaaacactcgcatattaacaatccgaattaaaaattgggtcttgaatccgatttgagaatctaaaagactcgacgatcaagaacaagatgtactctcttaaacccatatgaaatcaacactaaagtatttaccttgaagctttcaacgaaactattaacctctctctatctctatctctctgtcagaactcagaagcaaaatcccataacagcaaacacaaatcaacctctggctctcttcaatgatcttcaagagtctctctctttatcttctttctctcacaacgaaaacaaaattgaagaaaaagtggtaaaagagactgtagagagagtaatcaaagatttcgaagacgtgaagagcggatatatgtctgcaacacaccaaaaaaaaaatgttgttttacgaatcgttatctttttttcccctttttagaatcaacggctagttaatcttaaccgttggatacaacctcagaaaaaaaacctaatggaaaaagagaataggagcccaacggctatatttgtaaccatgtgcgtttttcaaatttggcttattttcttcgttattacttattactaccacgctcaagtctcaaaggtccaatggtcaatgttttatttcaatgtcaccgaccaccaaccgcttcctcattattaagccaatctaaatattaataccagtcgatttgaccccaaaacaaaaaacaaaacttagaccacattattattaacccaatctgataaattttaattttacccgattctgatttttaatactcaagctagtagatgatttaaatctttaaaccttagactaacggctcttcgcctttttgctttttcctctttacatctttttctccagtagctttgttagtcaacacattttccaaaaaggttgaaaataagtcaaagtacaaactgaattacccaatacggcccaatatcctgattagagagttaggcccaatatatcatcagatttgcaatcgcaagtctctttcaacttctcgtcgaatgttatactctcctcagagtttctccggatctttcaaaaacaattccggtgaagatgaatcagttctgtgattcgtgatttatgttactcaatcgatttctcatgttatagtcaccgatctgtatcgaaattttggtgtggattcatcaagcttctcaaatggagttcgagactcacgaagatgcgtatttgttctacaaagactacgccaagtccgttggtttcggaactgcgaaattaagcagccgaagatcaagagcttcaaaggaattcatcgatgccaaattctcctgcatacgctacggaagcaaacaacaatccgatgacgcgataaaccctagagcttctcctaagatcggatgcaaagcaagtatgcatgtaaaacgaagaccagatgggaaatggtacgtttacagtttcgtcaaggagcataatcacgatcttttaccagagcaagctcattatttccggagccatagaaacacagagcttgtgaaatccaacgattctcgtctcaggaggaagaagaacactccgttgactgattgtaaacatctcagtgcttatcatgatcttgattttatagatggttatatgaggaatcaacatgataaaggacggagacttgttcttgatactggtgatgcagagattttgcttgagtttcttatgcgtatgcaagaagagaatcccaagttttttttcgctgttgatttcagtgaagatcatcttctgaggaatgtgttctgggttgatgctaaagggattgaagattacaaaagtttcagtgatgtggtttcttttgagacgtcttatttcgtgagtaagtataaagtaccactagttctttttgttggagttaatcatcatgtacaacctgtgttgcttgggtgtggattgcttgcagatgatactgtttacacttatgtttggttgatgcaatcttggttagtggctatgggtggtcaaaaacctaaagttatgcttactgaccaaaacaatgctattaaagctgcaatcgctgcggttttaccggaaactcgccattgttattgcttgtggcatgtgttggaccagcttcctaggaatctggactattggagtatgtggcaagacacttttatgaagaagttgttcaaatgtatatacaggtcatggtctgaggaggaattcgataggaggtggttgaagctgatagacaagtttcatcttagagatgttccgtggatgcggtctttgtatgaggaacgtaagttctgggcacctacttttatgaggggaataacatttgcggggttatctatgcgttgtcgttcagaaagtgtgaattctttgtttgataggtatgttcaccctgaaacctcacttaaggagttcttagaaggatatgggctaatgctagaagataggtatgaagaggaagctaaagcagattttgatgcttggcatgaagcacctgagttgaaatctccatcaccttttgagaagcagatgttacttgtatactcccatgaaatattcaggagattccaacttgaggttctgggtgctgctgcttgtcaccttacgaaggagagtgaggaaggaacaacttacagtgttaaggactttgacgacgaacagaagtatttggtggattgggatgaatttaagtcagatatttactgctcttgccgttcctttgagtacaagggatatctctgtagacacgcaattgttgtcctccaaatgtcgggtgttttcaccattccgataaactatgtgttgcaaagatggacaaatgcagctagaaacagacatcagatcagcagaaaccttgaacttgtgcagtctaatatccgccgtttcaatgatctatgccgccgagccattatattgggagaagaaggatctctatcccaagaaagttatgacatcgccatgtttgcaatgaaagaagcttttaagcaatgtgctgttacgattaataccatcaaacatcccgccaggtgtgaagaagctgcaattcaagcaggagatcctgtccaggaagaaaatcaatatggatccacatcgacacagattggacccgaacctaacatacatgcaggcaatgttccatggcaagctgaaaccagaagggagaagagaagtagcctaaacaatacatctaaaaaggcaaaggttcactagcattttctactatgctgtcaaaatcatcgattaatcttttatgggtactcaataggctataatatcatacatatggccaaaagacaaacaaccatctctgctaagctgtcatagcctgatgatgtgatgcgtaactttgtttatgattgatctttcttcacttgtgcagcatgtggctcaatctgaaactgttggtgagggaagccaagaaggatttcaacatgtggtatgtttgatttttctatctgcatcccgaatgcaaaccactcagtgacatttggtgaacttgtacgtttcatatggttaagtgttctgatcgttgtcaattacaggctgatccaagacagtcacaggcggtattggcagggcaatttcacaacacaatgccaggagtattccaaaacttaattaacacgaacttccaaaacattccggctacaaatatgcaccagaacaatccccctgggtgaactcggtaaaaaaaccactgccaacaagcttgataacttctttgtgtgtaatatattagggatctcctactcaactaatttatcgcttcttctttggttccacttgttgttaggataagttaatagagtaaatggtgtatcttttgattgactattccgtgtaaaggtatggttggcatctgtttgaaagctaactaattggtcatgcttggaaaatgcaagcagtgtgagaaagctcatgaacaatttcaagggccatgatcagtgtgggtgtagaaacaagactggccggttcaaagaggcattttaattcttaacattattgaaacaacaactcattactctatctatcttcatcaagtcatgtcttcaggttcttacctactactgctatgtgttgtcaggctctgttttctcctgatcttttgaacctttaaggaagagaaatggtggcatgagattgagagattccatgtaaacatgtaaagggtttcctttttagcttaaggcataaaaaacaggcttctggttttgcagagagagaattttttggtgatctcgaccgaactatccctatgacttttatatccaatgaatttgaattagcctgttattgatacttgtgacaatcttcaacgcattagatttgctaatatcattattcgtgattcttctactatgtgattggcctcaacgaaatattacaatcttcttaagctacgaacgattaagattagtttttgactttttccaaatttacgtttggtgctaatattatgagtatgtttcaaagatttaacaagttgtcaatatgtccgagtggttaaggagatagacttgaaatctattgggcttcgcccgcgcaggttcgaaccctgctgttgacgatatttttttaaattttcattttttaggctcaaaatcgaatactctcatcttacttttggttctctcatagtttagcgtaccagcacttaccaagattagatggactctcaaacaaatatttttttgaacttccttaacttttacctggtaacagatctcaacacaaagaggaaacacataagaattcttcattcgcatataaatctgaatcgggtacaagaaaaatatccaaacacatcaaaatgtaaagaagaaatcgatattgttcaactactggatcaggaacgaagtactcttacctctaaatacaaaagaatttcataaccactaagtacaatgtagttctatacttggaaactaaatcgtatcagtaccgaagaaactccagccactgtaagctccaaccactatgatcatagtttctcttctgatttcagagtttcctttatatcgacgctgttactctccttgttctcctgcatttcaagaagtttctcttgttcctcgtcttgctcttgcggtttagcttcttgtgtagcattcggtttcttgatggtagactgttgatacatgactccaccaaacatacaaaccaagagccccaaggttccaacaaacgttgaatgtttatcccacaccatcaaattgatcaccactgtcaacagcttgttcacaattccaagaacggtgaaccccgttgcagaaatggcccgacgacatgagaacccgaagaaagagatagccaagccaaaaagacacgataaacccacgggtaaaaccacttgcaacgagtaccaatcagtctcgtcagtgatttcatgctttatcttctttaactctcccattataagcagctcaaggggaaacaaaagcagagcctcaaggttattgtagagaacaagtccccaagtgttcaagccaatcgtcataaccacatgcttgatgtaaacaaagtctatagtcatactcaccagatacgcaagagcccagctataagctgcgattgtaaactgataatccgtgaaaacgtaaagcaaacttccaccaaatatagtagccaaagatccccacgttttaacagatggccatggctgatgcaagaaaagcgtttccccaatggcaacgaaaatcggaacagcagagcgaaacacgatgaaagtatcgacattggcgtggaggagaagctcactgttggtaaacagagacaagtagaatatcatagctgcgggaagaaaccgccacatggtcaatagattaagcgaatcatgctcaattagcttcatctgagcacaaagcaagacaccagctgcacttgtaaagtactgcatcgcggtcaatgcgccggggtaaggaaacttcatgattgcccatttgttgatgattgagagaagagaagctgagagacagtaaccagcagctacaccatagacagaagcttgacgaagaaaaacactataccaagtctctgggcttggttctggaacattcttaacctcgattacagttccattttcctcatcattcgtcgacatttcaaatgaaagcacagacgaaagatcggatttttacactcagtgactcattagctttcgacttgaaactcaaaattgcttcaaattagagccgattctggaagtattcaagctctgcgagcacacatgaatgtaaaaattaggggttctacatgaaaacgatgaaatcgatcgcaacaattagatcctgggtgattacgattagatctcataaatctagctaaagttcctacaagactacaagagggtggttcatcaatcgctgaaacaattatctaagaggagaatgaaagaagcttacctcttaggagattgcgagagatagaagaaacgcgtcgcggaagaagaacagagagcgaagcttcttctttagaagttaaatccaccgtgaagctgtattatttagggttaaactgtttaagagtgttcacttacttgtatatataagagaatattataaacgtaggaaacaaaaaacaatggatttgctaataaatttattgatgttattattatgcaagtatagtgagattagtgacaacaaaagagtgatatgtatcacaaatttgtgcaaatccagttttccactcttctatgaagcacatcaaatacattaggctgtgtgtatcactcactatatgtatgcatatactttacctaatgaatatcattcaaattgtactaatctctatattaaatgcaattatgcaaacaagtagttactcacaagttgagcaaggtacaagtttaagttgaagagacaattaaataacaataattataaataattacattggaccttttaaatgttgaccaagtggtttcttggcttctgctagtcggattttgcacatgaatgaggaggtggtaactaaaccagagccatgtgtctgtcacgcacgagatccaaagcatcttgtgatctctttcactcttactggtcaagtggtcataggtaactaggtaagagagacttagaaaaagcgttgttgtttcctcaaatattgctctatgagtatgagtgttccatttcaacagattaattatataaacgtaataaaaaaagtcctttttctcttattacgggcttgaatcgcttgattgattggcattgcttctatgcgttgttactgtctgtgtttgcgatacgctcttacgtcttgtgtttgtaaactatgcacaattagccaatttttaataattaatcgactagtggtgaatataaaatctgcttataggtacagttgatgagctttgggtgtagtttacaaaatcttagatccgtctttgggaaaattcatattaatgatggctatatcaagttggcttcgctttgattacatatcaaggaaaacctttaggatgtgtattgattaaagttaataaccattcactatactttcatgttggtcattgctaaacgcttaagtggcaaaggatcactagttttctacgatattaaaacctaatatagattttcgtctgtaatttatccgattacaaaaaaaaagaagaagatgaaagtgaatcactccataggtttaccaaccaagataatgtcagctatatcaatttgcgtgtgacaagacaacaaaactagaaactctttacctaaggtatgacgtgtggaattatcacaacttgctgaaagattattcattattcgaccaatcttctaacttttttctttttaaacaaaactttattggttaataccaaatcagagaagagattcccatggcaaggaagaataacttttttttttttttaatagtcggagtcttcttccatacatgttatgtcaaagtttattgttcctttcaatattcaatcataaacttacttacgtctgctatttattgctaaaaaaaaaggtttttctaaattcagttcatctaaataaacaaatagtaagatggtaacaattgaaaaaaaaagattgtctagggggaagaacaaaaactaagacgagttgcattttgcttcttcgcaaatgcaagttgcaacaataaaaaatcatcttaacctctcgcaaaccacatttttagaggctaaagatttgacaggtaagattcatatgtcatttggcttgttataaaatggtgaacactaagcccttttttcttcaactctttatgtttttctagacagtgaccaaaacctcaaaacattgtagaccactacgaaacggattaatcagttttgacacttcttctactacatatacgtgaatgattttacaagtttcttgaagatgactaaaagagtcacacatctccacggggctgagtgggacacacattgcccaccatttctattacaaagtatcttttaatccaataggacaaacgctgaccaaaaaaaaaaaaaaccaatagggacaaacaaaaaaattgaactcctattgatttttattttaccaatgggggaaaagcaaaacctactccccaacttgctccatcaattattaattttctcttaaaacttttttctttagcaacttttaagttaagtaattattacttgacatcttctctttaactatgcgtttagaatctttctttgtatttaacaactatcaaatagttctcctttcgagggtgtacacatggaggactaatcagatcattttatgtaaacaatgggagaaaatacaccctctctttccaatatcgttgggtttacaatgtaacgtatcaaattaaaagcaagtaattaacaaagtcagcggcgaaaattcaacttttatattcattttttttataacccttattaatttgtcaactctacttggtccctttattattggctccaaaactctgcctaataaattatattgattccaaatcaaaggcattttttaataatgattagtgctaattgctgatattttctgacttcttacatagaaatatcttttttttaaagactacatgttgagaaattcgctgcccaaaattctcaaaaaaaaaagaaatggaaaaaataataaaatctctttttctcttactctagaatatgggaatctccgtcctccaacacccacgcagcctggaacagagacagtctttgttctgttgtgaagaaatactctaaagaaaccaaacaatttattagttttacaaataaaaaaaagtaataattgaagggttctttttttcccgatgcatatatgagataacgatgcctcaaaatatgatttttttttcttcctcttggtgtatggtaatttatgaggaagagaggtacacattaccttacttgttcaccaggaacatacccatcaaagagacatatctttacagctttattttccctcagatttggggttcttctttcaactgtttctcctgtctctcacaagacaagtggtcttttgggaatcttcaattaaaaaggataaaaccatttaaaacctacttcaagaatcttccgagaatctgacgtctttttttgtgagttttcgtttctattttttttttttcccatttctgaacttcaaaagtctcatcttttttgttaatcaggaatcagattagtgttaaaaaatattccttctttgattggtgttaaatcagtatctcttaacccacaagagattagggtatatttaaccaacttgtaagaatcaaccttaaaaagaaaagttagggcttttcactaatcttgattctcagtttcttttctattacaagatttttgctttgatttgattctcttcctgaaatgtgtggttctttttctgttctgttctgtttcatcttaatttgtttggggtttggtgaaaaatggatactttgttttttcagatgtggcttcattgatttgagtgagctatggaaaacaattctcttcctatggatccagctatggattcttcattcatggacggattacttctagaaggttgctggttagagacaacagatgcatccgagttccttaattttagtccttcaacttctgtagccccttttgatccttcttccttcatgtggtctccaacgcaagacacatctaatagcttatctcagatgtatggtcaagattgtccagaaagatcaagtcttgaggatcaaaaccaagggagagatctctctacctttaacagacgttggtggattggaccaagtggtcatcatggcttttctgttatggaaagattggttcaagcagtgacacacattaaagatttcactagtgagagaggctctcttatacagttgtgggtgcctgtggatagaggtggtaagcgagttttgaccacaaaggaacaaccttttagtcatgatccaatgtgtcaaaggcttgctcattacagagagatctctgagaattatcagttctctactgaacaggaggattcagattctagttccagggacttggttggtttgcctggaagagttttcttggggaaggttcctgaatggactcctgatgtgaggtttttcaagaatgaggagtatccgagagttcaacatgctcaagactgtgatgttcgaggcacgttagctattcctgtgtttgaacaaggtagtcagatttgcttaggtgttattgaggttgtgatgactacacaaatggttaaactaagtcctgaccttgaaagcatctgcagagcacttcaggtttttgtttcttttgcttttgtcgcctttgtctttgaaataagctttcttggaaccttttaggcattgtttaatcatcttcacaggcagttgatcttagaagcacagagattccaataccgccttctctaaaggtaatgaagttttaaaaaatttcgctttttgtttatcttcgtttagcttacttaacattaagccaaatgcttctgaaatcagggaccagatttctcttaccaagctgcattacctgaaatcagaaacctcttgagatgtgcttgcgagacgcataaactaccattagctcaaacatgggtctcatgtctcaaacaaagcaaaactggttgccgtcacaatgatgagaactatatccattgtgtatccacaatcgatgatgcttgctatgttggtgatcctacagtccgtgaattccacgaagctt

SEQ ID NO: 38 - DNA, 103353 bp, Arabidopsis thaliana
aagcttctccttttcccattgatcctaagttcaaggccaccggatcttccccctctggtgtgtcaaatgaggcctgtagatataaaatacctcagagattgaaagttttgagtaatattttgagctagtactattttaccattttgttgttctaccttgtaccaagttagaggctgacttttggagtctctgtactgcttccactgaacttttgcggacccatcttcagtgtaaacatggaatttctcccctttcaggccaaccttcacaacgattttgagctagtatcagttaacatgaaggagataaggtctcttgaagaataaaactcataagttttacctgatatccccaactatagttgttgaagtacagttgatatcttccattccaaatctttacgctccgtgatccaacgactctcctttctagatgtgctcctgaattctgtgttacaaagagagacgccgtcagaaaaaatgtactccagatggttttttgatatttgctacagatactgatgtagaagtactctatctggagcaaatattgaagttcagttggtaagactggggctcaccggtaatcctaccattacgctgagtaatgccaagttatttgtgccattattcaatgacatatttttctccagcaaaaatctgtgcgctttgaaagttccatgcatagaacctaaataaaactcaaagttagaagcatttaactttgatgatgccaaaaacctttaaccttgagtaggatattcaacggtaaaaaggcatacctatgaatctcccattaacaaaggcgtgtagagcatgtccgagatggttgactttaagaactgatggagctccttcagattgctgaaacctttattgcaaaagaaaaattataacttacagaatatccaacaaagaatatactacttatcttgactaatgctatatatcttacgggatataattggctttacctagttgtttgccacagatagtcggaagtatcctgtgtggtattcatgtgctcaagcaaggattctgatcttattgacgtttcactgaaacttgggactgtttctgtaaattcctcccacatttgaggagacgacaaattttgtcttgctttccttgttctcgtgttgtattgtgcattgacctatccacaccgcgaaatacaaatgaatacatcacaagaaatctgcgtgtatgatagtcttgatgtatgagcttaccttggcagtgttgaaggctacattcttgcagtctggcaggacacttacagattttggagacaaacgatatgaagaattacgaaactgtacagtagactcgcatttgtcttgattcaccagaatggcagcgcataggttcgccttcttcccaaacacaaaagcctgttaaataagacgtaaagatcactattacaacattcttcatgatatcacgatactgttagaattttcttacagtttgtagcttccccaatgatattgtagtttgcagtcctgaaagtagaggctcttcacacaacttaactgcagcatgtaattccttaaggtgtccccattttggttgcctaagtaaccctgcagcaccaaccatttatgttgtactttcagatgaacatctgattttgactgtgaatggtttgaaatattaccatattcatcaagtggagcctgatcataataactggtgattacgaactgtgaagcatttctcccgaagttggttcctccatgatactaaaataagatacaatgtcaaatcatcattattcttgcttctcttatacattagagatttttttagtgagactggaaaaggtaccatgtagtagtttacaaagcttccattcttagcgatgaaaagagcaacatgaaacgctatatcctcagctgaccttatcaatggttcctcaccatatgtttgataactatacaaaggggtcagctgaaagttagtagtttatatctggggattgggaagtacacaataatgtagtgaatttgagtgaagaccatacaaactcgtccagttctcagtccatattgcaggtttgttgggtgaattgggtcctttgaatgtttctccacattgcctcccattgcaagcattaacctgaggcaccatagaaacaataagaaaactaaaaaaaacggattcagaagtggaaaattggcagatgagccacattgcaggacaaacataaaaaccaaccaaaggatcaggggcatcatcttgcttgcacataacccatggcactcctgtgtcaagctcaacagccaattttgctgtccatttgacatatgatttcccttcttgtcgaaaagctctaccaaccatcccatactcgttctcaatctgttttgcacataactttaagatcattaaaaaaaaaaaaaaacttcgaaggaaacatacatgaaaaaccataatgtaaacctgtgagagtatgataggtcctccttgggaagcatacaagttttccgatttcatcagcttaacaatcattttcgcatatctcttcatgtgatactgcaaataaaacgtaatcttctttagaccatagaagtaaggaagccatctgagttcagtaaattaattaccttgaatggctcattatctgtcctgaagacaatcccttggacattatgcaaccagaaaggcaaacccctgcaatgtgttattgaaaaccctaaaattccacgaacattgtgttttaccatatcggaaaatctcaacgatctaaagacggaaagagtttacccataagaccattccccttggataaaaggtccaatccgaagacagacatataagccatgattttttacttccttgataaacttcacgatatcacggcttccactgaaatcgaactgtagattcacaaaaaccatcaatcgcataaatacctaaattcgtctgtatagggtatagagacggagagactgacctggccttgttgcggctcgtgaacgttccagaacacatatgtgtctactacatctattcctccagattttgcctttgctatcaaggacggccacatctgcaagttcgatttcccattaatatttgcagaagaagaagaagacaaagagatcccgccaaattttattggaagtttcatacgtttcagaatgtttggggtcgaataataataaatcagaaaataagagcacttaatttcacgaaatccataaaactaaaaccaaatcagaacgtttggggtcgcataagaataaataagaaactaagagtacttaaactcgcaaattcgataagttcaaaacggcctagtcggaaaagacgattttatcctctctctctctctactcttaacggctcatgtgtttcgtattagcaacctgccgccgacttagtgtgctaattcacgtgactgatcggcgcgatttcgccgggaaattgcagaaattaaattccggcgacgttacgaaacttctagatatagacggatcggtgagaacggagagagaattacctgaggagtgctgcgagtataatggattgagccggagaaaaggatcttatgttcgccgtcgatgatcagcgagcgaccgtcgtatgttacgtttgcgacgtctccggcaactataaccgccatgagaacgagaaaaactagcgagtactgaaaagtcgtcatttcttatgtaaacactgacgtttgaagattctagagagtttttatagtttgggactatgcacaactaactgtgcagtgtatctcaccatcgtctcgaatttatgcgacccaatcataaatttcttctttattttttcttaaatccggtttatatatgattcaatggaaattgcaattataaagtaaaagcccaatagcgtcaaaaaaaagtaaaagcccaataatagtgaggcccatcaataatctggagtcaaacaatggtggataatggaaatctctcaaaatccaaatccggttttagccggttataaatgggtttgactggtttcgggtcacaatcgaacggttgacgtcgatcatcattctggtagttgaaaactttgtcgtcgtcgtcgtcgtcgtcgtagcacgtgttgcacgtgagaaatttcccgcacaaaatcttactcttttcgtcttcttccccaatctgggattgaatctccagaatccatggatcgtgctttaactccgcgttttgatactccagctactctctcccctttccgataccgatatgggagctctctggccatcactcgacgattcgcgccggcgattgtttgcgcgaaacgatctccgatcgatggagtgagcgacgagctgaatctgattgcttcacagaacttagatcaagctcccgcacgaagactagcccgttccgcttttgttgacttgcagcttcagctggatcactgcttgttcaaggttgcattgactcatacctttatagcaaaataattaacataatctccgttctaatcatttgtatctggtgacagaaagctccgagtgggatcagaacagaggaggtaagcagtgattttgtttatttggtctcttcgaaggagatacaaagtcgttgaatcttcttctctgaataatgatagtggtatgagagaaattcgaaaggggaagatattttctgcaagagttggttgccgaaatccggcgacgaaatcaaagctgctgtatgtttctgtcatggctatggaagcacttgcactttcttcttcgatggttcgttagatttatctctacttgcatcatttagttgaaaggctcttcttttaatatatgtgggaaaaaaattgggttgttttacaggtatagcaaagcaaatagcaggttttggttatggggtttatgctatagaccatcctggttttggtttatcagatggtttacatggtcacattccaagttttgatgacttagcagacaatgctattgaacagttcaccaaaatgaaaggtatatctaaattgtacctgttattgctttttggtgttgaatcttgcttttgggttttatttaagtggtttgattcctagggagatcggaattgagaaatttgccccggtttttgctgggacagtcaatgggaggagcagttgccttaaaaattcatcttaaagaacctcaagcttgggatggtcttatccttgtcgctccaatgtgtaaggtaagtctctaactatatcattttctatgcatgtaattgaggtctggagatttgtttctcaaatctgcaaataagattttcagtgcttggaagtatctgtattcacattttacatctagttagttcatgtttgaaatacctgaccttgggttgtctcaagatttcagaagatgtaaaacctcctccactagtcttgaagacgttaatcttgatgtcgacactatttcccaaagcaaagctctttccaaagagagacttgagcgacttcttcttcagggacctgagtaaaagaaaattggtactttctcttagtttttcaatggtacattttctgaagcatttttgctaactttgtctttgatgtttttgttctctgtggataaagtgtgagtacgatgtgatatgctacgatgatcaaacacgtctcaaaactgctgttgaacttctaaatgcaacaagagacattgagatgcaagttgacaaggttagttgtagaaccaaagaaataaaggaaagctcttctcatcatagacaggggcaaaaaacgagatctttcttttctatgttgcaggtctcgttgccactgttgatacttcatggagacactgataaagtcacagatcccactgtgagtaaattccttcacaaacatgcagtcagccaagacaagactctaaaactctatccaggtggctaccattgcattctagaaggtgatacagacgaaaatattttcactgtaatcaatgacatcgttgcttggctcgatgcccgcgttgatcccaagtaaagtgagatcatctctccacaaacctatacttattattgtcttctgaatactgtcgagtctctgtgattaaacatccggataagaagaaaaaatagatatgtggcttacaatgaatacacaaccttagccgttgtttgcttagctagtgcttctagtgctacatcagccgcatctttcgaagtgtagttagtattgtttgggtgcacataagtcaggctcagaatcaaattgatgactgatctcatttgaaccatattgctctgacagatccttgaaatcttgtgttctatttgagtgttattttgtcaatggacaggcccggtctaaagcacagacagaggaaaccgtacatatgaaaagttgcatagcaggagctccgaaaaactctgtgaacaccaagtaattacttccgaagataccaaatgtaccatggttttgggtgaaaacaagaccggtatgcattgcacgacaatgcactcagctaacattgcagcgaataggggcgtgtgaacgagtcccttggtgaaccatgtaccgaaccatcacttctaataccatgagcaggtcgcagtgcataatgtcggcgacagtgaccaaataagtagagtttgaggacatgcctgcacaaaaacgtttccccaacttttatgaccaaagcaaaatttatctcgtagtaaaaaagtaaaagcagagcaagaaaaaataaagacataaaagtcatctgaaagcccaataatatcgaggcccatcaataagaaccaaaaaaaataaaaaattgtctagagtttcgtccaagccatcgtcgactttaataattgttcttctcttgctcagatttcttctccgataggaaaactcccgaagcttcactcagtaaaccctaattttccgatgtcggtaagtgttccttgccgaattctttttttcaatttctaacttttgtttgttctgcgcaaagattgatagtatgaattgaacgataaaatcggtggacattgtggtgattcagatcttcgagtacaatggaagtgccgtcgtagctatggtagggaagaattgcttcgctatagctagtgatcggaggcttggtgtgcaattacaaaccattgctaccgattttcagagaatatctaagatccacgatcatctcttcatcggactttccggtctcgccaccgatgtccagacattgtaagctctcgtatatgtttactcctttcctcagagaattttaggtgaattacaaaatttagggctccgtttttttttgttttgtctttggtactgaaggtaccagcgactcgtatttcgtcataagttatatcagcttagggaagaaagagacatgaagcctgaaactttcgctagtcttgtatcggctattctttatgagaaaaggttggtgaaatgtcttcttctctcaatttgttattagtttctagtttcctcttaacaatctgatttcttatgattaatgtggcattgccactactaagtaccaaattctttatttcagatttggcccattcttgtgccaacctgtgattgctggattgggagatgataacaaacccttcatttgcactatggattctattggagccaagtatgctcgctttcttcattacttaagacgttatatctcatttttcgtctgtaatgccatttaatttacttagtcagtgactgtaatcgtgaaacttgctaggtcagctagaaaatgatcgtggattgatattttggttttagttggaatctaattttggtcttttgtcatccaatgcagtgtatgcatgtcatatgagtgaacttattttacatgtgttgagctgatttaaatatgattcttaatatagttgagattttaccgaacatgatagttgcaatggtgagcatgccttgacgcttgttctctctaaatgcagggagttagctaaagattttgttgtctcgggaactgcttcagaatctctatatggtgcctgtgaagccatgttcaaaccagatatggtatgtgccttctgaaaacttgtttttgtaccgattcactggatactcaaatgtgtgtttatcacctgaaaatttggtaggatcattcatatgtaagtattctattgtagaatcttgatctggtaggaatatttgtgtgcatagtgctggtgatatatgacgtaactccaataattttctctgtatattttaatttggcttaggattaagatgtttcaatattgcgattacttccctgccatagtactgcttcgataaagtttgaatttcaaggtcatcattctaagaagtgcattgtaaacagactcgtgatgaaatgaaaagcatataactagacttaacaaatttgagtttcaggaagctgaggaactattcgagacaatttcacaagcacttctctcttcagttgaccgcgattgtcttagtgggtggggaggacatgtctacgttgtgtaagttttgttctcctcatcttcttcttcttcttcttcttctttttttctgtcacatctggcttcttacagaatatacctcatgtgcacttatcttctaaggatatgtattatataagatagtaacattctttcatggtcatgttgtccagaacaccaaaggaggtgaaggagagaatcctgaagggaaggatggattgatctgatatcacatatctgcttttgtccaagttcggtatactccttaacccggttatgtagaagctctcgtcccatagtaactatgttccttctctgaaactggatattgtggttcgttctctcggatgttttatttgctattgatagagttcaatgaaaatgaagaaatagcagttgttatcttgttccagtactcgatcattctatgtaccttgttgtttctgttttaatttcgtaccaagtgttccagatttctggtttgtcgcagtctttagttttcaaggttggtactgatcagtgacacgttttgttgtttgtcttcttagtgttcatgttcgattcactatgggtgactttagaaagacgttaacatgtcaacgaaatattttggtcaactatcaataaacatggtttggctaacgaaatcatacaataactatgaaatcaatgtaatttggaaggtgatcactagtaactgcaaatagaaacgaatcaaactattatgatgatgatcctgatgctgccatctgacattgtgaatgattttgcatgtcctgttctgtttgtggcgttagatcgagccagagaggcaaaatccatacgcataagcgttttgatgatttcatataaaacgtggcatgtgcaatagatgtggtcgttacacgaatataaacccaatcctgccgacctaactaatctcggtgggtattcatatactacctgtgtgggcaaagcatataaaggttctacttgggcaatcattatcgatgctcgtaaattcatgcgtctaatcattttgattatgaaccatccacatcatgtcacgtgtctaaactcttcggtcacttttgagctttttatcaaattcaacccgccacaataaaaagcggcagaactaacattccggctccacgtggcatagatcgaagcgtttatctattaggtggcacaggcggctcgagatgacgttcttgtggactccattagagaaaatgacagaattaagtgggcattagcataagttgataactatgaggtgctttttaaaaagaaaactaacagctgcgattctgtttttttttgccgttagtgtacgctaaatcatagacctcttcgtggttataaagaaagaaacttaatttgtctcgaatttgagtttggatgcgacgttttacgtactagttttataaaagtaaatgttatagaccttgaatttcaaagtggaatgtattttacacacacaattgatacaccaacaattgtggaagcaaggatatagagtatcgatctttaatggagaagaatatatccttaaagtaatcattactttttaattacggcggaaagagaatagttaaatttacggcgaaaagaatgttcattaatcaattgatgacgttcgtttataatttcaaataagatcgaaaataacaggtgaacaaagaaaaaatagacattaaaaatagtaagatcgaaaatacaacccttaaaaatctcacgaaatcaatgagagaaacaattttgagatacggtcaacgtttggtctcctttaggaaagtacacgcataagatcgaacgtgtcgattcttattgctcgttcccaaaatcgacatgctctcggaccgctacattccaaatagtctgacgtaagcaatgacaaaactcacctacattacagtctgccacgtgtccctctccatctacttcaaatgaatcctccactatacagatttaaccatttttctatttttgtttgagattcctttccaccaacacaaagcccctgtctatccgccatgtgtccacgacctttcttatatatatagtcatctttcttctttgctcgagagaagtttcaactttcaaacatatctttacagttctttcttgctaaacaacaataaaggggaaaataggttaattatgatgaaatctggggctgatttgcaatttccaccaggatttagatttcatcctacggatgaggagctagtcctcatgtatctctgtcgtaaatgcgcgtcgcagccgatccctgctccgattatcaccgaactcgatttgtaccgatatgatccttgggaccttcccggtacgtttctttcttttcccctttaaatcacactatacactaacagtaacaggattctataaaatcggtctaagaattaataaaccggtttacaatttacagacatggctttgtacggtgaaaaggagtggtattttttctcaccaagagatcgaaagtatccaaacggttcaagacccaaccgtgcagctggtactggatattggaaagctaccggagctgataaaccaataggtcgtcctaaaccggttggtattaagaaggctctagtgttttactcgggaaaacctccaaatggagagaaaaccaattggattatgcacgaataccggctcgctgacgttgaccggtcggttcgtaagaaaaacagtctaagagtgagtgaatttatcagttcaaaccgaactttgaatatgattttgaatcggtttagttaaccggacgtgtttttgatattcttgaacagttggacgattgggtattgtgtcgtatatataacaagaaaggtgtcatcgagaagcgacgaagcgatatcgaggacgggttaaagcctgtgactgacacgtgtccaccggaatctgtggcgagattgatctccggctcggagcaagcggtgtcaccggaattcacgtgtagcaacggtcggttgagtaatgcccttgattttccgtttaattacgtagatgccatcgccgataacgagattgtgtcacggctattgggcgggaatcagatgtggtcgacgacgcttgatccacttgtggttaggcagggaactttctgagttgtcacgtgcgattagagttagtggaaagtggaaactatcactgtctgttttcgcacgtgtcgggtagccgtcttgaaacccgctagctgatccagaagtgacctcattgggcttttcaacaacaattgggccttagcctttcttctcccttagtaagacaagctactgtattgtgttgttattttcaggaagcaatataaattcattttaatcacttatatattctttacatttttttttcactcaaaactacaatctagcttcttctttttttttttttttttttgttatggttgtactacaatctagctttgttatatatatatataagttaaaaatagtaactaaattacaaactaaaataaaataaagaaattggaagatatcactagtgtttggggtattagggagggaggggagctcgagatccgattttactgactgcatggtatcgaaaaagtgtcggtaatggtagggtctgacagataacagtcttatcgttgcaacttgcattcaaacaaatctcattgttcgctttaatttctaattaatttgtttttgtcttttgtatatttatttgattttgacacgagtttgtctttcctaataagaccgaggcatgattagtttaaccggtttgaattgtttaggttaaatcggagtccaagtcaaatacatcgctatctaacgaaaacgacgactgaaatttcgtaaagttccttactataaaactgatctaactatcttctacaagaacaatataataaatttgatgcattatgaattcacaagttttaaatctttatgattttgtagctcatgaaattgaatgatgtttcttttattatcacatgtcattaaataaaaatagttatgagtagatgacataaatactatttcaaataaatttatcctccatctaattgttatgagatgattatttcctataacatggtatctactatatggccgtctaaattaagtatcaacgtttaaactgcgcaatgctcaagttttcataagatgtgatttgttagaggttaattaagaaacttgcgagtgtatatgtggtctctaatctatattttaatctataaaaagggaagtgaaaatcaagattaaaagcttggatgtcatagtataaaagaatagtaaagtaaggggaccagacatatttgttgcgaactggaaaaaaatgaagacagtcaatctcactggggaagtgtggggtttgaagtccatgttaggtctgtttgttgttgctcttacaaccttcactttcaatttacaaccaaatcttctttacactttatactaatttattattcatgtttccaatagcattaaaacagttttaaaatctatccaactctttttttcccctactaaatcaggaaattcaaatcatatggacaatatactccatcaaacagtgtaaatctgttatccacaatgcataatgttgtgtttaattaactcgcattcgtcacaaccaaattagtgatttctctctaattaaccaatgtatgtagatgtgaataatacttatgtaatagtccagttttcaacaaacatatcatagtttaacgaaattggacagattcgagatcacaactcggttaagataaaactgtgaatagaatatttttctgcctaggttataacttaaaactataatatttttgggagcatgtattatgtgacttgtgcgagaattctgtgtatatatggttgacaagatggatgctatttttgtaaatagctagatggctacatacatattcactcatgttttataacgtagagaataattagtccaccgctctatgccccatttggaataaggttaattgttacaacatatattttggttaaatggttccgagttaatagaccaaatcatatagtagtagtttggaaacaagacatggtcaaaacgcaagataatacatagacacataatttcagtttaaaagttcttaaaactttaaagaacaaaacttagatgtagttttaaatgttaatttacctggttttggcataacacaacctaggagttaggaatgttccaacttccaatacttttacatttatcaaaacatgcgttaaatagagggaaaaaatgaatcttgaggaacgttttatttcttcctaatttgttggctaaaaaatgaataagataagctcaaccaaatggagacccaaacaaagttgacattgaaaaagtctaaaatttcaatgtttataaaatctaacaataatcctattctttagattggacaactttatgctaagataagagtaattcagaattctaactaaatcacactcactccattattatggccgccgtggaaaattcaacaaccaaatcttcaatcatataaatactttttcaactgacttaaaagtaaaaaaaaaaaaaatcaaatgtggagaaataataaatcgatattaggacactcaaatgtactagttaacaagcttatgatgacagaaaattggataattatgggaaaataagattggatgattaagggctgggaaaaacaaattgatgattaaggaaagtaaaaaagtaaaaaaaaaacgaacgaaaactgaaaaaaagtaaaaaaagggactgatctcttctctttctctcgtacgttcttcttcctcattcgagagagttaatttcaccatttctgatttcgacaacgacaaacgagcaaaaggtgattttcctgtgagcttcctcttcttttaaaatcgcaatgctcctactatttctatactattattgttgttctccaattgatccaacgaaactacgaaatccattctttgttttatttttttagccctaggattctgtgatccaatctctgttttcttcttcgctgattctggaaggttcttttgcttctttgaatttctagaagcggaactttgaaggttaagtgttactttgaccggacagatggattctgactcggaactttatatcccggcgccgtttggagattttacggtgatgcggattttgagttagaagcgacgcggagagatttcataggtttcttctgcaccacattccacgaggtgtgtaattttcttctttattttaaatctgttgggtttttgaattctaacattgcaatgttgatttaatttaccgttgtaatttgagtatgaagaaattcgacatagttgtggtaagaaagaattgaatttaaaagatgaaatctttgagtttttataacaaaaaactgtgaggtttcttttttttttggccattcagagtagtagtttcacttcgtccagtgtaagtgcaaagatagtttgaatgtttggtaagtttgaatattggtttcttctattctaggaaaccagaggctgaagctaaaagcgatgttgaaggcctttcttcctggaacgcaggaggaggaaacattatcttctttgcagtctgggtaggcactttctatttatgaatagtatttcaacattatcctttctgttgtcctgagaaataacaatggaagtcgttgcctcaaatgtgcaggaaagtcgatgcaaaaatggaaatggacgacccagagaaggcaatggctacagttgctcagctcatagagcaacttcatgcgaaaacatcttcaccgcaagataaagaactcacaacagctcgtctactaggtattgcaaaaggcaaaagggaggcaagaaggctcatcggttcgtatggccaagcaatgcctttatttatttccatgcttagaaatgggacgactttggccaaagtaaatgtcgcttcaatcctttgtgtattgtgcaaagacaaagacttgcgactaaaagtgcttctaggaggatgcatcccgccattactctcggttttgaagtccggaaccatggaaactagaaaagcagcagcagaagctatatatgaggtttcttctgctggtatttccaatgaccacattggaatgaaaatatttatcacagaaggtgttgttccaactttgtgggatcaacttagcctgaaaggaaatcaggataaagttgttgaagggtatgttactggcgctttgaggaatctttgtggcgttgatgatggttattggagactgacactagagggtagtggtgtagacatagttgtgtctcttttgtcatctgataaccctaattctcaagcaaatgctgcttctctgctggctcgtctagttctgtccttttgtgatagcatccagaaaatattaaattctggagttgtcaagtctctgatacagcttttggaacagaaaaatgatatcaatgttcgtgctagtgcagcagatgctttggaagctctttcagcaaattccgatgaggctaagaaatgtgtcaaagatgcaggaggtgttcatgctctcattgaagccattgttgctccatcgaaagagtgtatgcagggaaaacatggacaatctctacaagaacatgcaactggagctttagcaaatgtgtttggtgggatgcgccatttgattatatatcttggacaagtctcacaatcccctcgtctaacggaaccaattggtgatgtaattggagcccttgcctatgctctaatgattttcaaacaaccagagagttccgagaatatatttgatccaagcgtgatagagagcattttggtaaagttactaaagcctcgtgacacaaagttaatccaagaacggatcttagaggctatggcgagcttgtacggaaacagtagtctgtcgtgttacctagatgatgcagaagctaagagagttcttatcgctctcataaccatggcttctgctgatgtacgagagcgtctgataatttgcttgtctggcttatgccatgacaaggttggaatttgggaggcgattggaaagagagaaggaatccagttatttatatcatttctaggtttgtctagtgagcaacaccaagagtatgctgttgaaatgttgaaaattttgacggctcaggtggatgatagtaaatgggctgtaacagcagccggggggatacctccacttgtccagttgctcgagactggatctcagaaggccaaggaagatgctgcctgcattctctggaatttgtgttgtcacagtgaggaaatccgtgattgtgttgaaagagctggtggtattccagcattcttgtggcttctgaagactggtggaccaaattcccaggaaacatctgcaaagacacttgtgaagcttgtccatacagctgatcctgccacaataaatcagttgttggctttacttctgggagatgatccgacttcaaagattcaggtaatagaagtgttgggtcatgtgctctcaaaagcttcacaagaggatcttgttcatagaggatgtgccgctaacaaaggactgaggtccctagtcgagtccctaacatcttccagagaagaaacaaaggagcatacagcttcagttttagctgatctgttcagctcaagacaagatatttgtggtcatcttgcgacggatgacattattaatccctggatcaagctgcttacaaacaacactcagaatgtggcaaaacaggtggctagggctttggacgcactgtcccgcccagttaagaacaataataataaaaagaagtcttacattgccgaaggagatattaagtcactcataaaattggctaagaactcttccattgagtctgcagaaaatgcggtatctgccctcgcaaatcttctgtctgatccggatatagctgcagaagcactagctgaagatgttgtttccgctttcacaagaattttggctgatggatctccagagggtaagagaaatgcgtcacgcgcacttcatcagttacttaagaactttccagtttgtgatgtgctaaagggaagtgctcagtgccgttttgctatactttcactcgttgattctctaaaatcaattgatgtggatagcgcagatgctttcaacatattagaagtagttgcgctcttggcaaagactaagagtggggtgaatttctcttaccctccatggattgcccttgccgaagtgccatcaagcctggagactcttgtgcaatgccttgccgaaggccatactcttgtgcaagataaggcaatagaagttttgtccaggctttgctctgatcaacagtttctgctcagtgaacttatagtttcaagacccaagtcaatgttggttctggctgatagaatagtgaatgcatccagcttagaagtgagagttgggagcacagcgctgctcttatgtgctgcaaaggaaaagaagcagctgatcacggagacacttgatcagtctggttttttaaagctcttgttacatgccctcgttgatatgataaagcacaattctacaagcttttctctagagactgaagtccagacacctaaaggttttttggaaaaaaatgttttccaggatacaggtagtttttattttcctgatccagctaaaatcttgggtggtacagtcgcattgtggctgctatgcatactcacttccgttgatgctaagtcaaaggtcattgttatggaagctggcggacttgaggtgctcgtggggaagcttgctaggtatacttccagtgctcaggtaaatgttcctttctcgggtataaaaaaattatatgcttcttcatgtttattggttatgggtatcctacagggcaccttcgttgggaatgaaataaattagcgaacttctgttatgagttatacaactttgcggggcggggtttggtctttaggtccttctgttagataagaggttctgttacagtaaatctcacttctttatatcgttacagacttgtcaagcatgaattgtgcatttcggttttgaatcacactgctctctcagtttctcttaggcttgacttgattctaactttttttgtggcagagatgccttgtatgatgaattttcccccttgaaagtaatcttgagctaaactattttaccaggctgaatttgaggatacagaaggcatttggattagtgctctcctcctggctatcatgttccaggatgacaatgtgtccttttcttcaacgacaatgcggatcattccaacacttgcagttttgctaggatctgatgaactgatagatcggtatttcgctgcccacgcaatggctagtcttgtttgtactaggaacagaggaataaatctgacaattgcaaactctggtgctgtttctgggataataaaccttcttggctatgtggaatcggagatactgaacttggttgctttggcaaatgaattttctctcgtgaaagagcctgatcaagttattcttcaacacctttttgaaattgaagatgtgaggcttggctccactgcacgtaaatctatcccgctgcttgtagatctcttaaggccaattccagataggcctggagcccctcagtttgctgtccaaatcctgattcgcattgctgatggaagtgacacaaataaattacttatggctgaagctggagctgttgaagctttaacaaagtacctttctctaagtcctcaagattcaactgagtacgccatatctgaattgcttagggtattatttagcaaccacgagcttagacaaaacgaaatggcactaagttccttgaatcagcttatcgcagtactgcggctaggttcacgaagtgcaagatacagcgcagctggggctctgaatgaactatttgatgctgaaaacatcagaaattctgaaatcgcctgccaggctgttcaaccacttatggacatactcggttctgtatcagaaagtgagcaagaggtagctctctctgcattgatcaaactaagctcaggaaatacttcgaatacagctcttctgattgatgtggaaggaagtctgctggaaaacgtgatcaaaatcttatcatctgctactgcttcagaggagttaaagataaatgctgccagactttgttctgttgttttctcgaataaaaacatcagaacaagtgcatccgcctccggatgcatgaagccgttaataacacttatgcagtctgaaagaagtgcagcagttgaagcagcagtttttgctattaagatattattggatgacgagcaacatttagaactagcagccgcacataacattcaggagcttcttgttggcttggtttccgggaaaaattacgttattattgaggctagcttatcagctctcattaagttgggaaaagacagagtaccacgcaagttggacatggtggaagctggaataattgagcgatgtcttgagctactacctggagcctcgagttcgttatgttccgctgttgtagagctgtttcgtattttaacaaatagtggagtaatcgcgagaagaccagatgttgcaaaaactgtagagcctctcttcgcggtcttgctgcggtcagacttgaccttatgggggcaacatagtgccctgcaagcactcgtaaacatattggaaaaacagcaaacccttgaagcttttagttttacacccagtgaagccattgtgccgctgatttcttttttagaatcttcatcccaagctatccagcagcttggagcagaactgctgagccattttcttacaatggaagatttccagcaagacatcacaacacagagtgctgttgttcctctggtccggcttgcaggaattggaatactgagcctgcaggaaactgcgataaaggcattggagaagatatctgctagctggcctaaggctgttcttgatgctgaaggtatttttgagctatccaaggttattcttcaggaagatcctcagccccctcttgatctatgggagtcagctgcctttgttctttccaacattctgcagtatgatgcagaatgctttttcagagttgaactgccagtgttggtaaaattgttgttctcgacaattgaaagcacagtgttactggctcttaaagctttgatgcttcatgagaagaacgacgcttcaagtacagtacaaatggctgagcttggtgcaatcgatgcattgctggacctcctgagatctcatcaatgcgaggaagaatctggaagcttacttgaagtaatatttaacaatccaagagtaagagagttgaagttatgcaaatatgcaatagcaccactatctcaatatctgttggaccctcatacaagatcagaacctggtaggcttcttgctgctctggcactgggggatctatctcagcatgaagggctttctagatccagtggttctgtttccgcttgtcgggcactcattagcgtgctagaagaacaaccaacagaagaaatgaaagtggtggccatctgtgcgttgcagaattttgtgatgaatagtagaacgaatagacgagctgttgcagaggctggtggcgtattgttaattcaagagctactgctttcttgcaacccagaagtttctgggcaggctgcactgatggtcaaatttttgttttccaaccacacactccaagaatatgtctcgaatgagcttataagatcactaacaggtacttttcaatttaagttatacgaatcctatgtccctgtcactctagcactacagtttttatattctgataatttgttttgttctatcttcaactgtttgacatcttattcttgtgaacagctgcacttgagagaggcttgtggtctacagcaactataaatattgaagttttgagaaccttaaatgtgattttctccaattttcctaagctccgtgcctcagaagctgctactttctgcatccctcatttggtaggggcgctcaaatctggtgttgaagacgtccagggattagtattggatattctttacttgctaagacactcctggacgaatatgtctatagatgttgcaaagtctcaagccatgattgcagctgaagcaattcccgtcctgcaaatgctgatgaaaacatgccctcctaggtttcacgacaaggcagatagcttattgcactgcttaccaggttgcttaacagtgaacgtcatgcgtgccaataacttaaagcagtctatggcaaccacaaacgccttttgtcaattaacaataggaaactgccctccacggcaaactaaggtaaaacaaatccatcacaggagaatattctacactcccaccattgccaaaaactgtctttgtatcatttggtttttgtctctttttctgtaggtcgtgagcaatagcactactcctgaatggaaagaaggctttacttgggcatttgatgttccccccaaaggacaaaagcttcacatcatatgcaagagcaaaagcacatttggaaaggtaacattgtaacaagagccacactgttcaaattgcagtgttgggatagagatctttgatatgtattgtcttatttggtctttgtctaacacacaacatattccttgtctgcagacgactctagggcgagttactatccaaatcgacaaagtcgtgacagaaggagagtacagtggatctctaagcctgaatcatgaaaatagcaaagatgcttcttccagatcactcgacattgagatagcatggtccaataggacaacggatgagactcattgatcttcacaagcacaatgcacttggtcattggaagactgaaatctgtctaatgctcctaatgactgcattttggtagtagaagaaggaaagcaaagtctgcagcagatgtatagcaatacgtatatatgggtagagaatatggtgtgtgaaaaggaacatagaagcaaagagttcctgcctagcaagagagaagggtcttattgtataggttgaatctcttcttttttttggtctgcgatgttcggtatttgacagtttgtttacgaaccttttcgctcggggatcaactaagcagcacaaagtgctctgatttctgtagcgatgttcaagttattttaccataattttgttgcgttcattcatagttagacacgaccacaagatcattaaaacataatttgatcaagaaattgaaagttacaaattcgaggagatgagaagaggataacaaggtggcattgaaactcttcataagaaataaaaagcaagcctattggtcacaaacgccacaaaatgtacagagactatcaggaaaacatcacggagataaaacattctagcggtttgttaaggtggcgagctactgcgggttccaaaatggtaaaaacatggtttactttgctgcaccaacaatgatagaccgggcatgtgtgaaagtagaaatgatagctccaagctgcagtttgtcgttgcaaccaaaacttaatctgtacctataaacagtaaaacgactcgaaattacaaaaaaaaaaagattgtggataacacaagcttaaatattctactccaggcaatcctaattttaagtttaagatgcaaaagatactaactcaatgtctgccaaatcgtttatcagttgaactctgacagcggaaggcatcttgattttaaaaataaacctgatgtagaaacaaaactcagttcacagacgtacggataaaacagcattagaagcagcaaccaagtatgtcactcacaaggtaatctctttgacgatatcaacaatggcaagtccttttctcgtcttgatttctgaaacgtctgcagggtgaagtaataatcaggactcaggagtcaggaccatggaatcattaagtgagtaaatatcagttatcgttcaatacttttgtaggtctcagaaaatgatatagtacctttgtagcactcatcaaatggtttattcagaagccagtgagatatctgctcaatgtccttgggcaatgggtttccggtgcagaggtaaacgtcttcctctgtaatttgctttgactcttcctctgtaatttcctttgacgccatatgcgttgactgtccacaccaataaatccgttagaaatttttacagatccattcatagtgattgaaatgtattatcttttttagatttacaattgtagattatgtgacagaaccaaaaggaaatattacagaacctgcaaaatgttcaatgcttttctcatgtccccattgctcagccgtacaagagctgccaaaccacagtcacttacaacaagcctagtccaattatgaaaaggaagcacaaaacaaagggttaaaagaaacaaatagtgaagagggaggatgaagaaaacacaataagaaagtttacaagaccgaaatagctataattctcacctttcagcttctattacatgtttaagacgttgactcatatgaactccatcaagaggggcaaatctaaatcgagtacatctcgactgcaaagctgggatgatcttattgacatggtttccaatgagcgcaaacctagtactcttagtgtatttctcaatcacttgcaaaatttaagaaaataaggacgccaaagatgttagaagttagaaccgtgcttaagcaaaataaccagagagagctagataacactaaaaggttttacctctacgcaaggcaaactgagcatcttttgtcatggcatctgcttcatctagcaaaaccaacttcaccgaagattttcctctacaatcatgaattttcttttatttctatatccacagcaaacttgttaaacacaaacttatgatgctacatttaaacatagctcacgcccatcacaatgcattcgatattatgagtaataaaagccagtttttgaggtatctaaatgcacaaatggaaacatgataggatactcacaaagagaaactctgcgtgctagcgaaatcttgaatctgctgccttacaacatcgattcctctatcgtctgatgcgttcagttcaagaatcatattccggtactttggtccatatagtttccgggcaacagctagaatggtggatgttttgccagtaccgggaggaccatacaacagaagatggggcaatttgttctcattggtcagcctatcaactgttttcaaaatcacaacaacaccttcagtgagcatataggtaataagctataacatgcattagcctactcaatcatatatgaaacaacatcaatttcaattttagaaaactgtaaacactaaatccctaaaaccctagggtatggggaaatagagggagagagtgttatgtgtaaagttcaattactcgtatcaataatgtcacgatgtgcagccacgtcatcaagcgactgaggtcgatacttctcaacccaaggcgtcgccttactctgcggcggaggtccaaaaccgacgacgtctttgcccttgtttatcggcttgcgaggctgaatttcgtctacgtcaatgtccatcgccgacgttagctcagtcatcttcaccgccgtaaaagaaattatttcagaatctctctcgctcagccctaatttcactctctccccggtaatggcgccaaaccctcaaggctctttccttccgccattttctctaccttcgttgtcgaattcccattttacccccaagaaatgtagcttatgctggggtcattttcgtaaagcttccggttacataaaaaaaacaccccaacaagtgaaaatttctgaatctttgcttaaactctgttgcattttgctattatatgatgatatatatattcacaaaatattttccttgtttctatgataacaacaaaaccaaaaaccaaaaacctcaaaatctttttactacaccactttaaaaaagactcttctcttgtgtcaaagctctccatctgagaccaagttcttgttctttgaagaatcacttcctgagaaaagctcttttatcaaaccaaatcctattggataagcttcctccgacagatctcctccatagtcgtgattcacactgttaacagaatagttcagaggcaacaaggcaacacaagaagaaaagagaaattttattattgatttgatgaaacagaagaagacgatacaaatcaaatcaaatgatatattaaaaagaggtgaataaaggttcagacttgggaagtttgtcacagtctgaagaaatccatccaatcctctgcttctcattgtcatagatcaccattatcccttggaaagatatgtctatcacacacatagacacgagatattgttgtcaagttatgaacaaaagaaacctgagaaaaacttagtatatatatacgtacctccaatgatattgtagccctcgagaccgatttcagttccattcagaatacccaaacatactcttcctttttcctgagaaaacaaaccagaagaaacagacttctcagctatagatttttatggagatacaagtcatatctaggccagtatatgtgtgacttacggtgattatgagatacgactcaggtggaacctgaaatagctgaccattcttttgattcccaaatcgtaaagtaatcgtcttgaagtatttcttaacctcatcaagtgatttcaaaggttttttgcctttccagcagactggtaagcttttatcatcttttgtgtccgtcaaaggcttcccattcaagtcttttcttatctgtaggagaccaaattagtcataaaaaagtggaaaaacataaacggtgaagctaatcttttttttccagagaagaaattatcccatacaagatcgagaatagcttggtatgcttctgcattgaagtaagtgtacgagcttccactatcgaaaactacgttaatgcctttgacacctgtggtcttgtcgttaaagagaagctctgctggtccagccatgtagtttttactacagaaaaaattcacaccataatttcaacttgtcaattataaaagtgtgagtaaacaagtggcagttataaagaagataatgctcaaagattgctcacctaggtgaattagtagccaatgaagtccatgtaactccagaagaaggaacaagctcatctccaatagagagaaagcctttaccagtatgacttaagcaatgcacaatcacattcttcgttatccccaaggactttagctgagttgagaggcctactttccctcttccaaggccaagtattcccgctgttggaggaggaggatgtggaccaggattctgctgatcatacccacatctaaaagaaaatttgattcaaaaattaggaacttgtacaaccgcaaatttagtgtttttcttttctaatgtgtgaaaaaaggtagaataaaactaacccaaatgtcaaacgaagattcataatggagccatttgcgagttttagaggaacctcatcagttacaagtgcaccaatagatgatgcatgatcggagtatccgatttcatagtcacattgatcctcagggtcagcacaaggtctgtcctggggaaggtcaagaccagaacacaagatgtgtgaacaaggcaaagtgttgtgattgggcttgtactgcttagcacgaggctgcaaagaaagagaaagaaattctaagatagaacctttgcttattatgtcacacactaaaaagcatatcaacgcttacctttgtgcaaccgttgcaaggtgcatcacactgaacccaagtgaggtcactgccagtgtcaatgtccaagtcaaagagcttaggtgggttgccaatgttaagcaacacataatagtacctgcaaagatgaattcgttaattacttcaacaatcaaattgggcgttttcaatacaaggtgaaaatcagaatcaacattgcccaaaatcttcaattcgtgaaagtagcaagctttgaaatcatctcaaagatcaatagaatgaagatttcacatcttgtcaagcaatgaaatagattacaagtgaagaatccacacagatgcaagagaagccaacaaagtatccgcaccaattcaaaatccagacataagtcaacacaatcccgttaaggaaaatcaaagaaacaagatcaaacccacgaatgggtcactgaaaagtagcataaaacagagaaattgaaacaaaaagatgcgaaatttggcacttacccaagaggatacacattcccggagacaggaaacacgacggtggagctaagtcgacgattctgtaacttcacttgagccgacgagtctttagtagcttcagaggtttgaaagcgagcacagaggatgaagacatagaagacgaagacgaagaagaagtaaaggtttcttctttgctgcttattcggattcatcatctcctctttttggcccccaagaaagcgaaaccaaatcccaccaaaaaggtttcttttttgacacagggcaacaaaaaggaggctttttctttgtagaattgctgctcccttataggagtgagtatttgtttatatatctgatctctctcacactcaatttcgtgcaacttgcagcagaggtttctttgagttcccgtaagctaaattgagaaacttggcatttggctaaaagaaactcaacgcccaacgctcactacacttagcgtgtaaagcacgcgccaaccaggattgactcaaaggcctaacgatcttcaaatgtacagggcccaatatactcggcccataaactctaaaactattcaaatgttaggcgcgtgacgttcacctgtgaatcagctgatagaaatcattatccaatatccagttatgagtgggtgactccaaatagatccaactggcaacgcattattgacacgtgtcttttcatttctcttcttccggcgttttctctccgccgtttcgccaccgtacgtgacaatgtctgtttctctctccgccgcctctcacttactctgttcctccaccagagtctctctttcccccgccgtcacctcttcgtcctcgtcccctgtcgttgctctttcttcctctacatcgccacattctcttggaagcgtcgcatcttcttctctgtttcctcactcctccttcgtgcttcaggtattcgtacttcattcatactttttgtaaatttctctccgaacataacattttctgttgattttagaaaaaacatccgatcaatgggacgagcacgaggatgatttcaccaaaatgtgccgcttctgatgcagctcaattgataagcgctaaagaagatatcaaagttcttctccggactaagttttgccatcccatcttggtgaagtatctttctcttcttcatgatgataggacagggaatttttgaattcatggaagtaatagttctttgcttgttactaaagatattggaggaattttgtgagtcatgttgctttgtgttacatgtttcattgcaggttagattggggtggcacgatgctggtacttataacaagaatattgaggagtggccactgagaggtggagctaatggaagtcttaggtttgaggctgagcttaagcatgctgcaaatgctggtactggtttcatcatttcacatgcattgtggcttaagacttttatttggtgtcttgatattctacttttgacatttacaggtctgcttaatgctttaaagctcattcagcctctcaaagacaagtatcctaacatctcttatgcggacttattccagttagctagtgccacagcaatagaggtctttcttcacttttcttgggcttggcctattaggaaactattttggtcttaaggctttactgataactctagaaataaataaaacttcaggaggctggtggtcctgatatcccgatgaaatatgggagagttgatgttgtagcacctgaacagtgtccagaagaaggaagactccctggttaactaatctttccattgtctgtttcatgtcttctatgagtttgtttcagattttgtttatggactaattgaaataacgaggtgaaatatgctatgtttagatgctggacctccttcaccagctgatcatttgagagatgttttctacagaatgggacttgatgacaaggttattttgattttgttctcttttgtgttattcatgtcaaacgtgaatatttttgttattctgaatattctttttgacaaacaggaaatagttgccttgtctggtgcacataccttagggagagccagaccagaccgtagtggttggggaaaacctgagacaaagtacacggtattaataaacgacaaactgaagctaccttatatatagttctagggatgatagtgtagagagatgttatggaaacgttcaaaatggcagaaaactggacctggagaagcaggaggacagtcatggacagtgaaatggctcaagttcgacaactcttatttcaaggtctatctctctatctttcttagtaacttggtttgggactgaaaaagagttttctatgaagttttctaaaaatagttttatcaaccattgacttctatgactttgcaggatatcaaagaaaagagggacgacgatcttctggtgttacccactgatgcggcgctatttgaagatccttcattcaaggtttaaacaacagtgattgctaataagatgcctcagaattagtagttcactgttacttaagaggaaatgtttttaaaaacaatagtttcttacagaactatgcagagaagtatgctgaagatgtggctgcatttttcaaggactacgctgaagcccatgccaagcttagcaatctcggtgcaaaatttgatcctcccgaggtacaaggaaaggggagaaaatctaatatctatgcacttgtgtataccattataaaccatacgtttaaaatccagttcagtgacttaaaatctaaaactgctaatgtgtcactatgaaactaatcagggcatagtcattgaaaacgttccagagaagttcgtagctgcaaagtattctacgggaaaggtttgtccttacaaaacaaaaatgcgcttgtgtagcttattctaatataggattcggttcttgtttttaatctctccggcaatattttgcagaaggagctttcggattcgatgaaaaagaagataagagcagagtatgaagcaattggaggaagcccagataagccattacccacaaattacttcctcaacatcataattgccattggcgttttggtcctcttgtccactctctttggtggtaataacaactccgatttctctggtttctaattgacaaattatatattttgatttctcttacctacatacataattacgtggtgatcatatattccttgcaaacaaaaacatcattgttaaagtttgcttgaataaaatcaccttataaataacattgtttatttggtttttagaattttgagattagtgtgagtttcttaagtataggatactaaaataatgtgtgtgaatcactgctacgcctttgcacgaatagattcaaaaattaaaataagtttttttgagattcattaaagattcttctctttttgtaaagaaagaaaagtcttgtcgcttggattaggttaaccatcgaccatcgtacttgtttccaaatctatacaaacaaaggtgattatttttttcatgaacaggtttagagaacttttacaacaccacgtgtgacataataaacgtgcatagttatgcttgatcggtccttctcttctcaatttttttaatacccaggaagactattggctaactaatatttagtttgttgggataatcaatgtgtacttaacaacaaccaactttaaatattaaattctgaatctagaaagatgtatgaatttaggttggtatggaaaatgatgttccttcttctagtgacgcaagaatgcttacggtgaaccgatgggattggtcagactcaatcaatcccattgttctaatcgatatttgaaacttttccctcttttacttttgtatatatgattgagcttatgtttcctctgtattttatgacgaaactaatttcatatagtatattgcaatcatgttagtattatattgattttgaggaaacattatgctatggatttggctgtttggtgattgggataatgaagtgcatgtgagcttgattttggtagcacatgtcctactttttcatccaatagtcttaatgtctcatgttatagatgcattattttgttatcaacgacattatgatatgggaaaaatgtgaaatttattaagagaactttttttacatcatggtgcgttgtactgctgttgtgtcatgtgtgcacaaaaatagaaataatgggcaaaattagtagggaccaaaactaaacaaatcttaatctttagggaaaatatcgtaaaaaactaaattcccgcgtcaattgtgaaaatgacaaatacacgtagacgacaaaacaaaaaaagaatacacgtctccttcgttgacagtctctcccggtgaattgcgaagaatttcagatattaaaatcttttttcgttcctcatcgcggccactttcttcttccccaattcaatatgcaattaatatattgcccagatcccctagctttcttcttcgcacatctttatccattaaatttactaaaaagttgaaaatttaattgcaagacgacgactttgaaatttccttttttgttttctttcatttgtctttctcctctgattcatgttttcacgttttcatataaatcagcaaccatggattcttctgctttttcctcctccatcactcgtataaaactcgttttcacgaaaattcttacttaggttcttcaaatcacaattttgctctgttccttagaaaaagctaaactttgctctgtttcttcaacaaaaaaagtgaactttgctctgttccgtccatgtccgatgatgatcggagtggaagcagaatgagatttgaagcaaacgtctagagttccgacgttatgggttgcggaggatcaaaagtagataatcaaccaatagtgattctctgtagagaacgaaaggagctgcttaaagcggcgtcgtatcatcgttctgctctcgctgtcgctcacctaacttacttccagtctctctccgacgtcggtgaagctattcaacgtttcgttgacgacgaagtcgtagctggtttttcttcttcttcttcgccggattctccagttcttacacttccgtccgacgaagggaaaccgacgaaacacaagaggatttctccttcttcaaccacctcaatttctcattccgtcatcgaagaagaagacactgatgatgattcgcatttgcatctaagctccggatccgaatccgaatcagaagttggatctaaggatcatatccaaattactagcactccagaacaagagcggtcaacggaatcatttccttccggttatcatccaacaaactatgctccaccggtttacccacctggttatccacccggttacccattcagttacccgaccggttattcatcgggtaattatcaaccgggttacccgaattacacaggtgagaatccatacggaaatcgaggaatgtattacatgaagaaatctgcgccacaatcacgaccgttcattttccaaccggagaatcatcgagtggaggagaacgcgcaatggccgtcggattctggatttagaaacacaggagtgcaacggagatcgccgtctccgttacctcctccgtcaccacctacggtttcaacttgggattttttgaatgtgtttgatacttatgattacagcaacgcccgttctcgtgcttcgggatattatccgatgggaatggcgtcaatctcaagcagtcctgattcgaaggaagttagagaaagagaagggattcctgagctagaagaagtaacagagcaagaagttatcaagcaagtgtatagacgtcccaagagaccaggattggagaaggttaaagaacacagagacgagcacaagcacaacgtttttcctgagaggaacattaacaaaagggaagttccaatgccagaacaagtcactgagagctcattggattcagagacaatttcgtctttttcaggaagtgatgtagaatcggagtttcactatgttaatggtggtgaaggaaagagtagcagcatcagttcaatcagtcatggggctgggacaaagagctcgagagaagtagaagaacagtatgggaggaaaaaaggagtgagctttgagttggaggaaacaacgagcacttcgtcttttgatgttgaatcttccaagataagtagcttatccagtttgtcgattcatgccactagggatctcagagaagttgttaaggagatcaagagtgagttcgagattgcttcttcttgtgggaaggaggttgctttgttacttgaagtcggcaagttgccttatcagcataaaaacaatggcgttaaaggtactgtgtcttaactcgtatgttttgctagccatgatcatgcattagtttacagctagaataaaactatctgcttttgtaacccatgcgtttaaattttgcaatgttatgtcatggttacaaagtaatgctgataaacttaagtttaatggttatttgatgaattgtaatatgaacagaaatgttgaaaactctaaattccaatataatgggaaagtatcttaaattattgtggtttagactgatttgcttggtgttgaactatgaaccatgtattctgtccgcactgctttttagatgaaggtcttttttactgttttgtttggtggggttttaaatgaaaagttttgcttttcagttatcttatccaggatcatgtatctggtagcaccatccacacggtcatcgcactctcagcccagactatcaatacgtttaacatctagaactcgaaaaatggcgaaatcatacaatggacaagatgttaatggaggcttcaatggaaacctctcatcaaccttagagaaactgtatgcgtgggaaaagaaactgtacaaggaagtcaaggtattaatatttttaatatttgatgcagctttgtgtttctgaatcactaatgggaatctatatcacatatagattcttgcgtgatgttaaattgtgatttgcgtgtgatggcaggacgaagaaaagcttcgtgctatctatgaagagaagtgcaggagactaaaaaaaatggatagtcatggagcagaatctatcaagatcgatgctactcgggcagccattaggaagcttctgaccaaaatcgatgtttgtataagatcagttgattcgatttccagcagaatccataaacttagagatgaagagttgcagccacagttgatacagttaattcacgggtaaatcatctctctatattttgacatctttttacagattaagctgaaaaaactgatattttgtgttttgaaggttgataagaatgtggaggtcaatgctgaggtgccaccagaaacagtttcaggcgatcagggagagcaaggttcgatctctaaaggcgaacacaaccttacaaaatgactctggctctacagcaattcttgatcttgagatagagcttagagaatggtgcatcagcttcaacaactgggtcaacacccagaaatcatacgtccagttcctaagcggatggctcacgaaatgccttcactatgaacccgaggcaaccgatgacggaatcgctcctttctctcctagccagatcggtgcaccgcccatctttatcatttgcaaagattggcaagaagcaatgtgtagaatatctggagagaatgtgaccaatgcaatgcaaggttttgcttcaagcctacacgagctatgggagaagcaagaagaagagcaaagggtaaaagcgcaatctgagcagcgagatgcagagtcagagagaagtgtggtttcgaaaggtcggtcagagagcgggatatcagctttggatgatttgaaagtggatttagattcaatgaggaagaggctagtcgaggagagaggtaagggtaaagaaaccattaagcttgtgaacaacgcgtcttcgagcagcttaaaagctggtttagttcccattttcggggcactgagaaaattcacatcagaagttgtgaaagctcatgaaattgttaggcttcaacatcctcagacctcttcttgagtagagagtgtggacttaccacatttttgcaccgttttgaagttttgttacttgcaaattagacataggtctatatagaaggaaattgttgtatagatgagttcatattcaattattggttggttagtttcccttgtaaaccgtttttaaatggtgaagaagaagatatctagtttgccttgtaagccgttacttgctgaattaaaaagaatgtaatatgactgttcctggttgagattaaaaggaaaataggataaagctatgtggaatagattagagagtatggttaggcatgatctatgtctataagactataatagagtatctataatggctagaacttaaactaagaacgattatgatgaattgtcaactattggatcagttttggaagaagaaaagaaaaattacatatacagtaaaacctttataaattaataatgtttggactgcaaaattttattaatttatagaggtattaatttatcgataaattaataaatattaatttatagagagattttcttaatttagtaactttttaaaaaactttatgagattttttcattatagaaaatatatttctagaaccagttacaagtataacataataataatgactagaaaacaataccaaaaattttgatacactaaaatatgaaaactatagtcaaacaaagaacaaatatgaatttaagcaaaaaattattataaatatattttacagaatttttttacatataatatatatatatatttgatatatttatacaattattaatttataatataaatgggaccatatatttacatagaattttcaaaaaaattattatcttattaatttatcgatttgtgtaactttttacactggtcccaacttgggaccggaagaatttattaatttacagaggttattaatttatagagtattaatttatgaggttctactgtaaactactgtgacatttttcataacttaacttggaaaaaaatatgaaatttagatatgaaaaatcacaaattcacaacaaggtaaatagtttcaaactatgcacaatgttgcaggcgatagtttcaaactcttgacaagttgacatgcataaactacaaaactatcaaagatttctcatgttttggattcgtatttagtagttttatgcattttgttcattatcacacaacttaataaatcatcagtgtaggtacaattacaaagacaatagtctagaacttaaaaatcatttttacaagtgcagaaatgggctatgttgccatatggcttcacaatgtcaaaacgggagagatactatggttaggcatgatctatggtttagggttatcaatactggctaattatgtatcaaagtcaaaccaccatggctttcatttttttttggtcagttattttttttaaaatgcacattacattattatgttgactcagcaggatataataatgagaaaatctaatgctatttaaaatagagaaaaattaagaaataactttctcctaattgtgattttcttttcaatggttgattatggaagtaaatattgaaatatcaataaccgctgtgggtcaaagagtcaatgacaattattacttgcccaaaagttaatgaaaaaccaatgacgaggtttatccaatgaaaactctccacgtgtatgtatgaccagtaatcatccagcgatttcgtaatttccagtgtaagaaatgcgctcataaatatcatcttctctattgagaagaagaagaagaattcacaagaagaatattcacagagaagagagagcgataataatggcgtttaagggtttcgcgtgtttttcgattcttttgttgttgtctctattcgtttcctctatacgaagcgaggagacgaaggaatttgtcttgactctcgatcactctaacttcaccgaaaccatctccaagcacgatttcatcgtcgtcgagttctacgccccttggtaagttctctattactctactcttcaatttcttcttattcgtgagagatctctgttgccatggacttatgtcgtgaaattcgtggttagtgttaatttaaatggcgcaaagcttttgattttgattgattgcgtctagtcgaattctgtagataaagtgtttaggactatactttggtacaacgatgcttgatttgtaattgattcgtgatatctatgtgtttttgctttgtttcaggtgtggtcactgccagaagcttgctcctgaggtgagaaattggctttgaaatcactttcttaggatttgtgtgtgaaaccaatctattttagctaaaatggtttatatttgattgtttacagtacgagaaggctgcatcagagttgagtagtcataaccctcctcttgctctcgccaagatcgatgctagtgaagaagcaaacaaagaatttgctaatgagtacaagattcagggtttccccactcttaagattttgagaaatggagggaagtcggttcaagattacaacggacctcgtgaagctgagggtattgtcacttatttgaagaagcaaagtggtcctgcttctgttgaaattaagtcagctgattctgccactgaggttgttggtgaaaagaatgttgttgctgtaagtgtctctaatggatcattttttcttggtttcttttccattagtattgcaggcactaatgtctagctctgttgtcttaggttggagtgttccctaaattatccggggatgagtttgattctttcatggcccttgctgagaaattgcgtgctgactatgatttcgcacacactttggatgctaagtttcttcctcgtggagagtctgtggaaggacctgcagtgaggctgttcaagccttttgatgaattgtttgttgactccaaggtaaaggggaaccttttcattttgtacattacatcaatgagaagtcaagttttatgcaataatgtttcaaattatttatttgatttgcgaatcatggattcaggacttcaatggggaagctctagagaaatttgtcaaagaatcaagtatcccacttgtcaccgtctttgacagtgatccaaacaaccacccttatgttgccaaattctttgaaagccctgccactaaggtaattctcagtaaagttattttggatctcactgcagtgcaatacattaatggacgttttcagttatgccttgcatttttactggacaagtattttagatttctgaagatggtagtttagtaatttagtatgtgcttgaaggttaaaagcttttctttgccggtggtagtgttaactatgacaaaagctgtgatatcataaagtagtgattgaatttgggtaatagcatcatagttctctagataattgtaaaagcatttgttctgtttctgaaatttcaggcgatgatgttcgttaacttcactggagcaacagctgaagctctaaaatcaaagtaccgtgaagtagctacatccaacaaagatcaaagtcttgccttccttgttggtgatgcagagagcagccaaggcgctttccaggttactacacatttaagttttgtctcttattatcattttctcatgccaatgttaacacatctctaagaaatttttttcttttcatgtattggtttaacagtactttggactcgaagagagccaagttcccctcatcatcatccagaccccagataacaagaagtatttgaaagtcaacgttgaggttgaccagattgaatcatggttcaaggacttccaggtttcattctcttttgcacacattcacacaaggttttatgaaaaaagaagtacgtataaaatcaatataacctaaacaaacaacatgttttcttcaggacggaaaagttgctgtccacaaaaaatcccaacctattccagctgagaacaacgaacctgtgaaggttgttgttgccgagagccttgacgacatagttttcaagtctggaaagaatggtgagtacattatttgaaaactctaataatggtttcaatttttttgcgaacgcaagactgataaacatcaatttatctatcagtcttgattgagttctatgcaccatggtgtggacattgtcaaaaacttgctccaatcttggacgaagtggctttgtcattccagaacgacccaagtgtgatcatagcaaaattggtaagcctctcttttatgttctttacatgtcaaactataacttgatatactcctcctggattgacttaaccgtgtctgtgtctgtgcaggacgcaaccgcaaatgatatcccaagtgataccttcgatgtgaaaggattcccgaccatttacttcaggtcagcgagcggaaatgttgtagtgtacgaaggagacaggacaaaggaagacttcataaacttcgttgagaagaacagtgagaagaagccaacttctcatggagaagagtctaccaagagtgaggaacctaagaagaccgaggaaacggccgcaaaggacgagctgtagaaatctcatgagttttgtttcggaatttgagtaggagcgtttctcttcttcaccatatccaacagaatcttcttttttctttagcagttttacagttttatcttttttgctctcttgttcgaacccaaaattatccccattaataaaaagttaaacctaataatcatttaatctgttttatgatttgaccatagggttggttagtttggtacgtctatcatttttggtggactgttcggtaaatcgtcctgttgattttgttcgttcaccgatagagccaaactctcaaatctcaatctctgagatagaatcaacaatgtggtcaaatatataacaagtatataaatatgaaaagttcagtttatatacaatgtgattaataggaaaagttgcagtaagaatatgaaaattttagttgaatatctttaaaacgttacttttgaatttaatactgtgtgtgagtgtttctcccttaccaaaagatattcaactaaccttcgaggttaattaaatttgtataggtaaagggcaactttaatccgaatcatatgacaatgacatgacaaatgatgatcgcaatatacataccaacaaatgataaataatttgatatatatattcgaagatagaaagacgacaaatatctactacatattacaccaatgaactagctctgatggctccttaaagtgatagcctgattcatgtggtttcgtggacccaatggtcctgttaatatactacatgatttatttgtgtgtccaagcattgtgtatatcgtatttgacagaattaatagctttcgctgatgacatgtataattttttctaatcatcggaaaattttggattgaagtgtagacatatactgatcagtgcatgttaaaaatcatatattttgaatatgtaaagtgttcaccataatcaggcatatatagttgcaatcgtaaagaagtacttgaacccatcccaacaattcatgatatgtatctttcatttatttcacgaattcccaaggaaactaaaatagtatacgatacacttggcttcagattgtttccctatataatggcactaactctccatgttgaaaccacattaatttcttataaccaacaacaataatgacaaaccatcttcaagatcccttacctacttacccaaaaccggttttaaccaaagaagaacaagaagtggacgagaaaatggtaagcttgcaagcagagagtatcgtgaacaccgtggctttccctatggttctcaaagccgccttcgagcttggcgtcatcgacaccatcgctgctgcaggaaacgacacgtggctctcaccgtgtgagatagcgtgtagtctcccaaccaaacccaccaacccggaggcgccggtgttgcttgaccggatgctgagcttacttgtcagccactcgatcttgaagtgccgtatgattgaaaccggagagaacggtcgaaccggaaagatcgagagggtatatgcagccgaaccggtttgcaagtattttttgagagatagtgatggtacaggatctctcgtgcctctgttcatgttgctccatacccaagtgtttttcaagacttggtacgtacttcgctagttttttttaaaagtcaaattacattaaatcagttaatatataaccaacttatttacaaaaatatattttgtataaaaaatgaataaatgaagatttttctttcacgtacaggacaaatcttaaagatgtgatactagaaggaagagatgcattcaactctgcccacggcatgaaaatcttcgaatacataaattcggatcaaccatttgctgagttgtttaatcgtgcaatgtcggaaccttccaccatgatcatgaagaaggttctagacgtatatagaggatttgaagatgttaacactttggtggatgttggaggaggaaatggcactgttttaggtttagtcacttctaagtatcctcatatcaaaggtgttaatttcgacttagctcaagttttaacccaagctcctttttatccaggtatacaatactaattaatatatttgataaatattgaagtactgctagtttcatagctaccacttaaacctactttttgttgtacctattaaatcaaaggagtcgagcatgtatctggagacatgtttgtagaagttccaaagggagatgccgtctttatgaaagtaagtttataaatatatgaaaatagataaatttatatctctaaagctaattattaaaattttgttaaatgattgacagtggatactacatgattggggagacgaggattgtataaagattctgaaaaattgttggaaaagtctaccggaaaaagggaagattattattgtagagtttgttacaccaaaggaaccaaagggtggtgacttatcttctaacactgtctttgccatggacttgttgatgttaacccaatgctctggtggtaaagagagatctctttcacagttcgagaatttggcgtttgcgtcaggttttcttcgatgtgaaatcatttgtcttgcttattcgtattctgttatcgaattccacaaataaatttggaatttaagaaagaaaagaaaacaatatatacgtaactttttctgttttgttaaatggcttttattgcatgtaatatagtttggtattggtttgagccttttcattgttcaagattatggttgttttagtattaataaacggtgtgtaagaaataaattcggataagtataaaagtgtgtattcgcattaggtttgtaaattactgcttgaagcttgatcacgggtttaacggtctgaccaggtcggtccggattttaaaacattgagtgaactcatttacactactattaaattcaacatatatcttttttcacaaattccataataacacataaattatgactaaactataggtacaaacattaatcagtacatgcaattgcattccaattcaatatatgtggatccttgttccctgaattcagcttcttgattgaaactatttcacagcatgtaggccagatggccctaggcttcgaccaggtgtttcacatggtggacttgtactcaacaagccgtagaattagtaacgggtatggtagctctcaccggaagaaagttgcttttttaaaatgttacttttttttttgtcgaataacgatttcattatagcctcaaagggaaaatatataatgttactttaattattgtctttccaacttatacataatgggatgacaaagaaatatttaaaaagtctaatttaaaaaactaaattaagtttttaacattaaaagtacaatatatttggatttaaaaaataattttagtacgacgttgttaaatgattataggatcaatgagtagttggtagttcctgaacgggttacaaaaaagtgatatcctgattcacgtggtttggtggaccgacggatcttgttaaatcacctgaaagatttcattttaattttcttaacatccacttgaaagatattttttttaataatgaacgaatcatggagttgttgatgttaacacaatgctcgggtggtaaaagagaatcaaggaataaacagaatataattcaaggtggaattttttgagttgattacatattttcaagacatatgctgatttaatagtatattgcaaatatgtaatcaactcaatgttttaaaattgttagcctaagtttaattatattctcacttgaaacaattttactgcatgtagtacgccaactggccttggacttcagccatgtgtttcacatggtggatttgtattcaacaagcctacccacccatgagttttaccagcaacgattaaaacaattgcaaactcaacgcgtctaagcaaagaagaacaacaagttgacgaaagaactctgagctttgcccacctctactcggtatggttcaatgttactatagattactttctaacattaaaacacacactgtttttggatttaaaattttattatagacttaaaaatttaataatagtatgacgcttttaaatgattataggatcaatcacaagttagtgcttccttaaagatattttcctgcgtgggttagaagaaagtgatatcctgattcacgtggttcggttgacccctacttttgttttcgctatggaattataaataaataaaagagaactaaacatgtattcattccatttcattatgtgagcctgaattgtgtgacatgatcagaataccaccacaaaataaaatacgaaactcatcacaatcctaaagctttgattgatacaataagacgcggctaatttaggaatcaaatcgaatcatccacagattggtaattcttagagtggagattatacgataaatcacagataatgggaacttcaacgctcaaaaatggattggttttgtaaactattacattgctctcgagggatattttatttagggtattttgaatttttatgaatcaaatttatttcctacccggccatgacacataaatcaaagataaatatctaatttttattaaatagatttagttctcaagattcagtaacgcatacatataaaggaaacttatcaatgagtacatgaacaatcatgtccacttgcttgatttatacaaacgcaattaggatagtaaggatccttagtttcatctttgcactgttgaggaccccgagcacgaattggactacaatatgttcccggaaagtattcaacaagtacaggtggacgatcttctgcctccactgtttcatatcaaccacaaaaatattagatggtggatgaaacgtgttagataaatacaaaattgataacacaaaaatttacattcataacattttttcatcagtcaatgttttcatattaagcaagtatataaacaatcgaaattatatgaattatatatatctcacctttagcattatacatcacgaaaaacatgagaacacaaagaaccacacacgcactaacagatttcatgatgcaaatgatatgtctatattttttcttttgttgttgtgtttatctggtactgaatattttttcttatcaacaatgtctacatatatatacagacaacacacacacagatatttttttattcttactcaaattaaaggcaataaagttaagtttgaccaaaataattaatgccaatttgagagtcaaaccaaaatatttattaaaagaataacctaaataagataaacacatttaagtaataaatcatatatttgacagctaatctacactcccaacgttccagattataatattttctaaataagcacaaagtttaagagaccataaatgttttgttattctaatattaaatacccataaatatagtatctaacatttattttaaaaattaaccaatagaaaaagattgcaaattattaatagtcataataaattatgcattgatatttgagaaaaaataatagaacgacaaagtgagtaatatgactttacttgcatatataattattttttttcttttctcttcttatgcatttaaatcatcatccacctgttaataataaattggttttaagaaattactattaaaaattatgacattgtttccttttttggataattaatatatatggattatgatcccttctcgttggaatttattaatattatcattactatgattagttttgatttacaaaaatttcacaattattttgtttccttttttgggataattaatatatatagattatgatcccttctcgttggaatttattaatatcattattattattattagttttgatttacaaaaatttcacaattttaagaaataatctaaaattaccattaaataattaatttgcaaagattcctaaagtgtcagttttattatggtcatatattgaaaaattataattgcagtaatttccctttaattgtgagatttctagaaatatatctttttctctgaaaaagaggttttccttgaaatatatatcatgataccagttagtgacttagtgttgtccataataaatctttgtttatcaccacaataagcatactgaaactgaagatatcaccaaactttggttatgattttctttcctatcgcatcgtatgttttatatagttgaccgttttaaaatttgtagtttttttttttataatcgtcgatattctattttaaccttttcgatgtgaagaaaaaaatgaaaactctgacgcatctttcattagttaacttttaattcgcatttgagtactactacacgcgtctcagtgcatggcactagtgtgaatctcgaattcaatcttctttgccattgttatctatatcaaaacaacaacaacaacaacaatcgcaaactatctacatgaaccatcatcttttattcaaaaaaaaatacatgaaccatcatctttttgtccatccccgtgacaataaattagtattaaacataatcagtccacttgtctttgggatttctccttataaaaacatcactaactgtgaaagttaaaaccacatcctcaaatcaactctacctttgttatcatcttcttcaatctttcaacctatatcgacaattatgtcaaaccatcttcaagatcccttaaccacttaccctaaaccgggtttaaccaaagaagaacaagaaatcgacgagaaaatggtgagcttgcaagcggagagtatagtcaacgccgtggctttccccatggttctcaaagccgccttagagcttggagtcattgatacgatcgctgctgctagcaacggcacgtggctctcaccgtctgagatagccgttagtctcccaaacaaacccactaacccggaggcgccggtattgctggaccggatgctgcggttacttgtaagccactcgatcttgaagtgttgtatggttgaaagcagagaaaatggtcaaaccggaaagatcgagagagtatatgcagctgaaccgatttgcaagtacttcttgaaagatagtgacggctctggttctctctcgtccttgttattgttgctccatagccaagtcattctcaaaacatggttagtgaacataaaacgtaaatgaacatttgaagatattttttttgaaaaaattccatatataggacaaatctcaaggatgtgatactagaaggaaaagatgcattcagctctgcccacgacatgagacttttcgaatatattagttcggatgaccagttctctaagttgtttcaccgcgcaatgtcggaatcttccacaatggtcatgaagaaggttctagaagaatacagaggatttgaagatgttaacactttggtggatgtaggaggaggtatcggcaccatattaggtctcatcacttccaagtatcctcatatcaaaggtgttaatttcgacttagctcaagttttaacccaagctcctttttatccaggtacaaaactatacttagtatatttgctgtgctagtattactaactaatgtacctcctaaatcttttgtatggtttgactaatactaatgataggagtcaagcatgtctccggagacatgtttattgaagttccaaaaggagatgccatctttatgaaagtaagtttatatgtttatgaatcgataaattataattgagtctcattattttcgaaatataatatggttaagttattgacagtggatactacatgattggggagacgaggattgtataaagattctgaaaaattgttggaaaagtctaccggaaaaaggtaaagtgatcattgtagagatgattacaccaatggaaccaaagcctaatgacttttcgtgtaacaccgtgttgggcatggacttgttgatgttaacacaatgctctggtggtaaagagcgatctctttcgcagttcgagaatttagcgtttgcgtcaggctttcttctatgtgaaatcatatgtctttcttattcatattctgttatcgaattccacaaataaggatttggaattcacgaattctgctacatgctaagttttcttttcaagattgtttagtgtattatattaacagattgtaataataattgtgaaagggtgtttgctttaggtttgtaattgaaacatttcttcttatgctccgacaacgtttctataatgttttcttactgtaacctttgagtttgattgcaccaaaaagcacgagctagtaaatcccaatttcgattcattgctatcgaaagcagtaggattcataaaatattcatttactctcattttgattacaatcatcaaacgacatttacttattacagagcacaatgagaaacaagtgttattcaaatgctagacttgaatacctctgaatgaatcagaggcttccatgatgggtttcgaggaagaaacgtatcctgcaaaatacacaaagctcacgaattcaatttcaagatccagaatttcgagtagatttttaaaagaaattcgtaccgaaacgtaggagcaagaagggatgatggagatggagtgagaagaggcgtgttcgaaagcggcgacgcagagatgagaagctaaacctaatcctcgtttgaatgaaggaacgtaagtatgaaccagatccatcactttaccgttgtttctcatcttgtattctatgaaagcttcgtgatcctccgtctcgaatcgccttttgccttcgttccacactatctttggtggctctgtcgccatcttcgcctccgttgtcgccgccgtgttcgtcatttgtcaataaacgtaaatcgaaggaatgtttctttatctgattcttatcgggcctattaatgggcctattaaccgcggtgttctgttatgaataatttttaggaggacttttaagattttaaaataacgaaagcttcattggctaaatgtagctaataaacgtacattaggatttcaattttccacaatgtagctaataaagcaaaactctcattgtgcataacttacaaaagacatgattataaataaaaccattctagtttggaactaaaccaaccatcttctctcttctctctgccaattgagctcacaatggagtaacgtgtgcagtctcgtctaagaagaggcacccgaatacattattgaagaaatctccgcctttaacaataccttttccatctatggtttccatgtcatatttgcaagcccgcatgcaatcaggacagtatgtaacctgcgttgcatagacaatcatgagaacttgcaatttccaagagtttttctcaaggaaacaagtatatgtcaggtagttttagtaacgaacctccaaaatttttggctcgaaggagctatcgagcattacatctactccgtacattgctctagatttgggggattgcatctctggatgcgcgagagctgccgcctcaaacactgcccgtatcacctgcttcaccttctcatggatatccatccatttaactattgagagttgaattgtgttattgacaaaatgaaatgcataaaaatctggagaaagtaaacccaaatatagtgtataccgttatgttcttgttcaaattctctcacaaactctgccgtgggcttgtgattcaacttccgaccatagttctgaaacgcataagagaatgaacatgaaaagggaaaacgagagttgctgaatcattatgtggaaagagtgttcttaactaataccatgacagtgaagtgagtttcatattcaaagaaactgtgcttttccaatgaatatggattgttggacaacctaacctgaaatcaaacatataggattgatatatatgagtaaataagcgcttgtattggttgtaatgaaaattaaaataagcattacccaaaatatctctattaggtaaatctccagcgggtcaatactccgcactagcacaacatatcgcagatcaaacttgttccccttgaacaaagcagggtgctctatgtacttctggcagatcttgggaccagtttccatcatgcggatgatagcagataaattatcggttatacttgtgtcgattgtccgtgccatgttccatggtttcaagatccacaaattgttcaattgatcacgtttgcggacacaatagtccccaataaactgggacaattgggtttcaagattataggtaggctgtaaccattttggagatccataaccctgtaaagcaaaacatagggatttcagaaacaagttactaacgtgctatgataatctaagggtataatctgctgaatttaccatttgaatagtctctgcaagatgatgcttcataacaagacatgcctcaaagggaaactgatttatgtactggtcatctgttattcccacctcttttttgagctcatcatccacctgtacacttgtccataatatgtctgcatcttttggttcatttgctgcaggcaggcaagtgacacaactcagaaaacacaaagaaaattcttgattcgtctaatgcatttatgcagacgattgcttagtatatccatccaatgagacgtagatatcatgaaaaatggatcaaatcacatactgatcacaaattctgggcgtgtcagaaattcttcaacttgaggtagatccgtgtaaaccagcaaaggagacccatcactatgctgtatgcttcgggaaactgaagggttggaaggttttgactcgaaggctttggcctgcagtttctgttggtatttctcaaattcctaggaaatcatgacagcgaatctgttaattaacaaaaatctttgtatgaaatgagaggaaaggaagtctgctaatgaacagaaagctaaagaggacaccgaggaagtacatgaataaaataattctcaggagtttgaaaccaggctgtgagtctcgcagaccgctgtttgtcctccccaataccagatagaaaatcacgagtgcactcatcacctttttgagaatgctttataggccacattaccgaatagctggaacatataaaaccaaataaacatgaagatagaaaatatttgcatacatgacatgtgagccctgatcaagaagcgcatgtcaatccacattacacttttgaactatagcaacataacacgtgtttacagcgcatagaagttgaatttaacaaatacgaggagcagtgcaggaaattttttaaaagttgctacctcacagcagattctagtttcccagaaggcatgaaaaggaagggagctactttgaaattgggttcatcactatgcctcaaagctgaacccaattcatccatcacatacctgcgaaaaagtgatatcactgcaccactcacagtcatacatatccaaaaattatgtgcccaagaactacagacaagactatccataaactgtttgattccccctcctaattctaacctcttaagaagtagactagcatcaaatgttcattcccaatactatagaaattttgcacatatatacaccaaaggagacctcgcccagtcaaatcaaagaaggctttagtctagagaaacaaatgctagggtgagaatacattccaaaagtgaaaatggtcattccgacatacaaagagtggtaactctttcagctttcagtgttggattagaatcgtcacaaatattaaatattggatttctctaatttgtctatttaactgaaaattgttatgatagtttaaatagtaaatataaacagccgtgagttttatttcttatccccagcaaatccaccgcactaattctaatatagcaaaaaaaaagagaaacattgcataccataaagaagtttcatcaagcttttcatcatccgcaaggcgataattcagcgcatacaaccacattgcatcaagaacacgatcaacaagagtatcatcaggattcagctcaggaatgcgtggttgaagcattgagtcaacaacatgctttccagtttccaaaatttttgccgtatcaacgccatttagtaaagaaaggtttgagagcgattcaagaatctctagagcattaattccaagaggtccaggtatgtcaacctacaaacaagaagtaacacgtgagctcatctctgcataaataaattttagttaactttgtacagtaacctcaatttgtatctgaataaggacaacttccaacatttacctctaatgaagacagtgaagggaagagcttcaagacttcaagtagttctccaacagaattctgatccaatgagtttccacgaatatttaaatgagaaagtaatggcatctcgtgcacagagaatgcctgaaaatgaagaaagcaaaggcagataaatcaggcacgtaaaatacaaaattgaaacatacaccttcgtcaatgcttgtagcctctacggtcaataaactacactccctgcctctctgagagaaagtagggggacaaaactgaccttattgactagattgtgtattgaccggtttgaaaggtcaagtgaggtgacattgcacaagggttgatcctgctgaacacaaccaggattatccttcccaaagatatctccacagaaaccaagtgcccataacccataattaggggtaaaacacgagttgtaaatctcaagactcggacagccttgcaatatttcgtcagccatctgacgttcactgaaaataatcataaaaaagaaatacatgagaaattaattatatatccacacacatccatatattttgtaaatgcatgattacctcttctgaagaacaggattgtcattcagccacaaagccttcagattcttaaacttcacaatctcttgtataaccacatccgcactctctattttgttcccgataagactaagcgccactaaatcctacccaaaaaatggcagcagcacaaacaaagaagctttagaatctagcatttgaaataaaccttcaccatctgagctagagtctagcatgaaagtactaaaggagaagaaagatctaaagacatgcctgaaatttactaggcaaatgcagggacaacaatgagtcatcaacaccaagaccctccaactccaaccatctcaaagagtcatatcctttatctgctgcataacgaatttcattgtcaattatctgatcaacagagagttcctctgccacttcttcttctccagcatccacatcaatatcaacactcatcaaagaagccatcctctcagccaatccaggaatttccttaagctgaagtaagagattaaaacaaaccttaagcttcatcaccaatccaaaattcaataagcttctttcgagagtgagagtaggcgttacctgcttataggcatcgggaagacgaaaagtccaggcgtgatcgacaaggaagacgtcagaatctttaggcatagattcggcagtgaggagaagcttccgtcgctgatcatcctcgcaggattcgatttggaagtaatcgccgccatcaaaagtatcgtaagcaagtttctcgaagaggcgtgggtaaagcttcggcggcaaacctgaagccgccaaaagtattccatgtactttgacgaaatcatcaaagctctcgattttgctcattgttctctctgaggggttttagcttaagctgcgttttcggcgacagaagaagaagagaagtgggagtgatataatagggttaattttgaaaagtaataactaaaaaaatgtaagaaacaaaaagaggtcctaccgggagtcgaacccaggtcgctggattcaaagtccagagtgctaaccactacaccatagaacctcggatgcttgttaggtgaaagctatcttatttatatacataatatatgcgtattagaaaaaaggaaacaaaatagaaaaaaggaaactttgtaacttttaatcctgaccgctgaaattttgctgatatcttgaccgtcctttgaattgatagctcgtctataaataatgctcttgctcttcctctctatgctaaaatctcgaaaccctaattattctaagattctaatttgtgaagtttgtgaggttttagggatgggttacaatttctacatgagagtgtatgaggttgttgatgatgcttcaacggatgcaatcatatcgtggagcgaaagcaacaacagtttcattatctggaatgttggagagttttacagaaggattctgcctaaatatgtagacttgggcacaaacctctcacggtttttctccaaccttcgttctcatgggttcaaaatagttaaaggaagaactggagtattggaatttggacatgaagattttatcagagataaactggagcttatgaagaagatggttagcgataaacgtaaagcaaggaaagctgctaaatccaaagcaaggaaagctagagttcaagtcgagtttctcttccaacacttgcaaatttgatcgtccattaaatcagtcttctttattatgtatattcgtctccaagtagattcaagtctaagaacttttcaatagtatgtttctctctttataggaaccctctttatatgcctagtctttgattcttctcttatgatggtggcttctcttctttattgtcttatattatgattcataacaacatcacatagaaacttcctaaaacctcttaacagaaaattgaaaacttttgaaacatcttttatggaatatccatccactgcattacactagagattaacttttaaaactactactatggattcaaaatctggaaaagggaacaaagtggtgttaaaaacggatcctttttaaaccctaagagataagtttctctgcctactctgccaaagttatgttatatagccagatggataccgtctttacttcttgtgaatactgttgcaaatccattgcgattcttctcagaactccctcggtttgttgaaactggcattgaaacagcagcagacgcagtagaagaagaagaagatggagatgtttctttggttggtttgatggactcaggatgatttcttgtcatgaaagtttcgtttttgtgaaccttccaactctctgagttgctgctgctgcttacaccatttgcagccattggaattatcggtgtatcggttaagaaatcttcaagtgttgcaagggactgcaactgtttccccaatgaagctattgttttctgacaattcgcaagtttccctgcagctgtttctatgtcttcctgaattatagtaatcaagttttagtggacaaaaaagtgattgtgatggaacacagtctaagtttaactaacacctgaactttggagacagacctgtttgatcttgggttctttattttcactcttgattgagttctctttatggagagagatctcttcttcaagagcctcacattttctcctaagctcatcaaaagcaaacctctcctttctcatgtcttcttccaaagattcaatctttgcggatttagtctttgcatctgcttccattgcgatggtttgagactctacttcagcttttagttcgttaacgagtttcatctccgtttgtatctcccccagcttcgtctcgatttcttgcagacaaacttgagattcttcatatttatctttgattatgtcaaaagatatttgcagctcagctttctcaacttccaacttctccaacttattttccagctccattttttcacaagcaatagcttcgagctcaaatctcaatgtgctctccacttccctgttacatttaacttcacttttgagctcatctttctctacttccaacttctctaacttctcctcaagttgcttgattcggcaagtcaatacttctatttcagtagccaacgagttctctacttgagcaacagcctcttctctgttacattttacttcactttcgagttcaactttctccgcttctaacttctccaactgttcttcaagttccttagttcgagaagtcagtacttctatttcagcagccaatgagttctctacgtgaacaacagccttttctctgttacatttaacttcacttttgagctcctctttctctgcttctaacttttccaacttttcttcaagttccttagttcgagaagtcagtacttctgagttctctatatgaacaacagcctcttctctgttacatttaacttcattctcgagctcatgtttctcggcttctaacttttccaacttctcttcaagttccttaatgcgagaagtcagtacttctatttcagaagctaacgagttctctgagggaacaacaacctcttctgtaactgattcaggtccactcttaccgttcccatctggcgtctcaggcaatgctacaagacgttccatctcaagaaaatcacccatgagatcaagttcaatggaagaggaagttccctgaaggcttctcttctcaatcaatgtggatgatgcccatgaatcagagcaactcacatccattcgttcccctccatcagaatgactatctgtagatcgatgatcgttaaacgaagctgatgacttagccaacatccgaaacttcctgcactcagcctcaagtttcgccactttctttatgctatctaactgctgcttgctggcggtttcagctgcttgggtactcaaatccctctcaatagttctgatctctagctcttcgcatcgcgcaagaagctcgtgtctaagcatcacgttttctttcgccacagattccgccatttggctaagctcctcagacttggttgcagtttcaaaaatctggttctcaaggctggttctagaagactgcaactcctgagttctctcgatcacagcatcttgaattctctgttcttgttcatctcttgcttgccttaactgtctcacacactcctttaaagctccatcaagatggcttactctatcttccaacactctattcttatcatcagcagcctcaagcttctcctttaactcaaccacttcattttcagctttctcccacccttcacaacaagagtagatatatcttcactaaaaagtcgcagaatcataaaacaaaaatgtagaaaaaaagattgataccagcgacagcttcttcagcgactttgacatgttgcttcactagatcatctttagcactcacattagcaagagcagctgaaagtttctcggctaaagtcttcatgctatctttcaactcttccttttcagtttctacttccaaagaaaccgttggtgattgtatctcgtcatcacgagactccattgtactctcaggcttgagcaaaaataaaaacagacattacaatgatcttttagatgcaaaggacacaagactaaaataacaaaaacaaaattcttgatcttacttgaatttcagaatccttctcagatagtgaagacacagactctgattcaccaaagcttctctcagatgattctctcttccttttctccatttatagtttccaagatcacaatcagcacataacagtctcaggatctgaatgagagagaaaacacacacacacacacacatacattggattctttaaaaatgctgaaacatacataaacatagtcaaagaagaaacaaactttaagatgaagtaaactgaaccaatcagcaaacatgcaagataagagaaaatcttgaataaaccaatcatttaacacaaagtattagaaatgatttaaaggaactgaatttgtctttatagtaacaaatgtggttccagatgtccgtttcataatcaaaaaccaacggttgagaaagctacaagacaaagaacaaaagcttgaaactttaaatttgaaactcgttgaggcataagggaaaatctaccaaaaccccaaatccaagagaaggaaataaaagctacgagggtaatggaacagtgataagtaagtctcaaactacactccaaacattggtctatttcagagaacacttaagtagataaattaaaaaaaaacgaacaaaggaagagaatattgtgaaagagaccaaatgtttggtgaagtaaataccttttggttggggactgtatgaagaactttgagatcccaaaatgccccaatggaaacaaaaaaaaatcagcgattaaacaagcaaaaaggaagaagctttcttcttcttctactactgtctgaaacactattacgatttattaacagcgacaaggcagagatatagcgtgagagagagagagagagagagaagagagaattctctttatcttgttttttgctatttttgaaatatttctctaatttttcttctttaattcaaaagatagaaagagagatagagcatgtgatcttctgtatgtggagctgtgaactcaaaaaacatttaaatcttaactttttcagctttttttaaggaattattatttttgtgtatataaatgtaaggaattaaaagttaaaacgtaatttcgtactaattaatttgaattattgacatttaaagtgcttataacaattcccgcccgagaatacattattgacaataatttaggataattaaattacgaatttagaaagcagcttttgaatttaaggaagttgtaacggttttaataataataatgtgattaaagaagagctcacgcgtctcgctgactctggtcattgggttcactgacaaaatcagtgagattcacaatttatccgacggtttagattgctcccatctctcactctgctttctacttttttttttttttttttctgttaagtacaatataattaatttatacactaatctccaatttatcttttcttaattgttggtagttggtaagattaactttattttcactccagattacaattgatagtctctttccttttgtcgtttatctcgagtcccaaaaacaaataaactaaaaactatatgcataggcttaatgacgtggtttgataaaggcccattaagttgtatagacatggtctcaaagcctaaaaagattgttgagagtaagagacccattactctgttttttctgtctcgtcctagttcccacacaaattacacgaaaagacagaaacatcaatgagaaaagagataactattcttagaattaagtttttgtgcatctgttaagtctttcgaatgcatcgagacgtaaaaaaaaaaaaagtaaaggaagaagaaaaatttaggcatataacttggtgagatcttcagagaattccctcctaattacatctcttttcagctttagagctgctgtgactaatcctgactctggcgtccatggagatgccaataatttgatctttgctggtatctcaaacttctccaatcgtgattgtttagccgcctgcataacacagatgttataaggaaatgactgggggactcaaatagcttggtaatgagtagcaatgaacataccttcacaagggacgcatacacttctttcacggcttgctctttcgtgcacagttcttcgaagttggcaaagtctattccttgctttgaagcccaaccttcaactgtatgttgggacgcgaccacaagagccacacagtaactgtagaacgaatcagcatgaaccattatgttttcaacatagggacttatacttagagcagcttcaacctgcgaaaaaaaagaatgttttaagaagcttctccggagaattgagtgatgaagacaaaaaagggtattcggattgagaaaactatactttgcccaaggagacatattctccatgctgaagtttaacgatatccttttttcggtctattatctcgaggcagccatcagggtgaaatcgtcctatgtctcctgtgtagaaccacctcattcccttttcatcaacctttgaacattcaagtgtataaaacggttagaggaagaaccaaaccaaccaattcttttaacattgccgaaaccaataatgttgatttgccaccttgtacacttctttagttttctcctcatttttgaaatacccaagcgtgatatttgagccaccaattacaatttcaccacggggcatcggcttatcactagttagatacccaccttccgcccagtctactagctgaaacaagatataagcatatgatcacaagagactacgacatacaaactaataaatagctaacaaagtattaaaagtggacaaatcaggtaaagaggttacctttacaaaggagcaaggaagtggagcaccaacacggccaacggatgtgtcctcaaactccgagaaggttccaccagcacaagtctctgtgagcccatatccctgaccgattggagccctgaggaatatcagtgttagatcatagaaatggaaagggacgaaaagatatattggagagtagcaagcctcaaggagatattcagggattcgtttacccaacgcagatgttaatgaatctctgagtgtcaccagaaagaggggcaccaccagagagcaaatagcggatttgacctcccaaaactgcacggattttcctgaacacaagcacatcccacaaaagcttttccaatccccaggctccaaaccaacttccattgattgcagataatcgccgagcatatgcaaagtcaaacaatttctttgacaatccgccctttgcatcaacctgatggtcataaattgtcagtgcttatgcaattataatgttttactcacaagagaatgaagacaatttagcacatcttggttgctgggagatagccggaattatttaaacagctaggagagcacgagctcaactgctttaacagaggatagccaaccaaagaatttcgatgtgtatctaacatgcacaaacctttttgcggacaccatccctgacacgatcaagaatggctggaacagctgtcattatagtgggctttagtgctgtgacatctccttttgtacccttttttatcttgtttgaagtatccgttagcgtcaagggagacccatatccaatagcactcccaatagtagccattacgctctacaacaatggaattaggccgcattcaaatactctgaagtgtggaactgctatataaacgcattgagtaatgaacttttaagatacctcagctgctaactcaaggatgtgagccaaaggtaaatatgccatgtatatatccctctttccaaggtcaggaacaattgtcatcactgccgaaactgtagctaggacattaccatgcgtcatcataacaccctacattatttgggaagtgggaaagtcagattaagtaaattttgcaggaccaataacaaatagctgatagaacaattttgataaccatagacaagatttttattctgagacaacagttgtacacgtcaactggtttcgaaaactttctaaccttgggaagtccagtgcttccactggtgtacattataacagcaacatctgctgagagagggaaattaggatccacaggattttcgcggccaagtttctgaacatcagtaaatgaagtcgccatccaattactgttcacatcagatgggaattcatcatccatgcatatcacacgtttcacagtttcaagctgttggcttatgtccatgagctttttgagttctttgctaccacatattacggttgtgacctctgtctggaaagtgaaagaaagggaatcatgaacatatgaaaggtaagcatacacaaatatgaaaaatactaatccacatgataacatagagctcattccaacctatgtgactcttataccagaaacaatcaggacataaacaaccgcagagcatatatgacatggatttaggtcgccataataaagagaaagcagaaaagaggagcaagggctacctcattcagcgagtgacaaagagcttcctctcccaaagatgaatagatagttaccacagtgacgttgcgcctgaagcaaccctgaaacattgaatcacacagaatatttcataaccgtaccaacagtccatccggattataaatcagagaaaacaggaaaaggtataagaaaagatggaaatcacctgtagggagatgaaccattcttctctagtatctgcaaaaatggcgacacgctcttccgtcttgtgcccaatctgaactaacccagaggcaaaatcacacactgcttcgagagtcttcccaaaagtgagccactcgtagtcacctaaatgcagtttctcgaacgtttttccatcctcactagtctcaatctctctagagatcagctttcgggtgccaaggaaaaccctatcactgtgagcattacacgatatctcaaagagctctggaagcgttgagatatgttcccaatgggaactaacaggctcagtaaacctgtgattcctaatagcataacctggttcaccaccaacatcaacaacaacacctcttttcttttctttcttagatttctgaaccagaaacgtcaaagccaatggcacaataacaccagcagcataaggaatcatctttcactaaacccccaaacaaagaattatatggctaataaaacacgtccacctcctgcaaccaaaaccccatcacaatattaataacataaatcaatttcaataaaaccaactttaatacacgcgttagttgtatgtattacagagaagagctacacgaaataaactcaagtaaatcatattcgttaagaagaaccccctcgagaactaattttactacatttcgtttgatcgacggaggaattgagtttaactttcaaaagatctgagaaaaaggcgagtgtagaacaaactaatctagccttataaaaaacacacacacacttccatgaaacaaacacattcgaagaatgtaatcgggaatgtgaagcataagaaagagaggaagatggaatataccgtgatcgaagcagaacggaaccagagaagacgtcgtcgggaacaataaaaaatggaaaacagcagcgaggctcaaatatagagaggaggaagacagagagaacagtaaagggtataatggtcttttagcggagacgtcgagaggactgtggaggcggaaagacgaaacgaaaaaaatataagaagaaaacaaagttattagttttttattattattttgaaattattggatgaggaaataaatacgtggaggtatagtcaggtgatatggaccgttggatgtgtgtaattgttaggtcatcaatctgacaacggccatgcaaataacctctttcctgttggtacgccaattctcattgcacaaaacgctcttatttgtcaatttcaaacctaatttcacaaccaatcgaactgcatttaaacctaataacatggtcttctcatcaaatatgaacaaattttgcaactaaaagaaaatggatttatgtgaaattaggaagattttggttgagtttagacaagtttaaaactaattgacctggttgattatgaagtcgagaaaccaacaaaaagtgaccaactttttctttttattaattttcttttcggtgtgggtcatcaacactttaactctagtcaaggattcgctaattattttgtacgagattatcaacatatttaggaggaactccgtcgttaaacaggatcatgttcctacgaaattctctgtctccgacttcttcttggtccctgaaaattgagcaatagactttttaatcaaacggcattctgatttctgaatagagttataatcattggtcatattagcaattattagaaagagtgaaggaaggatttctctaataacaaattttgaaacgagacgacgcttacaatattgtcacttgtgtcggtcacttctgaaactgatccttctccagaatccgaatttccttttttcgattttgctgacatcatgaaacatggcactcttggttagatttcaaatccaaaagcaatcatgaaaaatgttagcacatataaaatctgaacaaatttgaaatttctattcttttatgagaagaagaagaaactgttccccattctatggagactcattcattgtgaaaggtagatatattaaaggaagcctcatgtgtttatacttgcaccagacggactcagccactaacgagctaaatatctcaaatcgacaactgaagtagcgtcaataaataattgagaagtttgcaacaatttaccagctggaggattcaatttggcaggcacctttttgttctgctgctttgttgtagttgtctgcttttgggcagtaacctttgcaagcgtatgactaatttcagggacgctgcagaaagtaagattattacagatgacacaggaaatgagcgtcaacaaaaaaattaatgatatccagcgaaaggaacaaaaaaaagcaccaatcatgtaagtttcttaatacaatcagagattcagtagttcaaagaaatttggttgatcgtaacctaccaattccgagaaccataagattctgtctcctttcccaatcgttcctgaataaagaaaattcaaacagagatgttacctattgtactggtgtcgagttcattttgggttccaagatggtagcatttgtatcatggattacacataaagcattccatttacctgttgccccatggattcatggctcagggtctcccagctctcgctatccaagcaaaccaattcaacatccccattgtcgaaaataatctgcaacaaagcaaaacagaagccatggcaaatagcgcagcagaaagaaggcagagaaggggccaatgaaactagctgcaaagatgtacgctattcgagttctatatgaccaacttctaccataacccagcacatagaatcaaatagttaaatggaaaaaaatactaatgatgccttcatactattgagtttcaagcaaaggaactcaatagagcatgttcaaagtcaacatgaattcagtgtcatctgaaattagcacaaaggaagataaaatgacaagacaataagtcttgtcaatcatctcatcatatgccatggatatgcagtgcagaaatattccgcactaaaaatttataatataagtacagtatttgatcaatagtaaggtaaaactcatggggacaaatggatcaagagtcaacaacgaaaaaacaaaataaggacttcgaagtccagtggataccttgtgagagttgcttttagaattaaacttctcaacagtgccaggatagaaactggtaaaaaaggacaaaaaaaatattacagaagctccagcatatatatttggccaagtataagaaattttttaccatccatctgtgggagagagtaatttaatccgctgcccaatgattgcttcgccgtggttgctaatatcctgtgacaattattaactggtatcacaggaagatatggatagtcaaataaagatctaacatatactaatgtacttacttttaaagcagatactaccccggagtgtttggaagatgtaattttattgcttacacttgctttgacactctcctttgcacaagtagtgtgtctttctagcttctttattggaatttccgactcaactgttctcaaagataaggagttacaagaaatatgttctcccagatgagttcgcttcctgctacacctcgtgttattttggctggcttcggttgaaccagtaatcgacgtttcgatttgattgcctaataatggaggtaaaactttatcttccgaaccaactgctaggctatctttttgacacctctgatcatgcttggaaagcgttcatgtaggcagaaacaggatcagaaagaaagcttacatagcataagttaagcaggcaagatggtagaaggatagtaaaatgatgcagcgtggatataccatggagatctgtgattggaatatatgaactattctttcaatgaaactctgttccagcgcatttcgggtacgagacttagccttattctgcagagtgcattcaagaaatcataaataaatgttagttaatttcacaagtagagcaatattgacacaatgctggacttgcctggttatccgttatgctagtgaggctgtacaacgatgatggcagcaaaattgaccgtggcgcttgtggagaagtgaccacaatactatttaatatgttgacagctgagtaaccaatatcggctagaatgtgcagcctctgcagttcaaagcataattatattaagctatgaatgagaaagaagcatatgtgttattctgtactatcaagccacacttacaggcgttttacgagaatcaactgcatcttcagctcttttaattgcacggaagatacaaaacaaaaaaggggcggtttccttgatggtaaaaccattattgttgatactaagtaacacctgtaagaccgagaacagagggctgccaaagggaataagtgagaacaaaaattcaaaatgaaaccaaccatcaatagtagtaggaacatagcaaattacccacaaaagcgagcatagatatgctcgtccctgcagtcttctgaagggaactctgggtcatgtgcaagaacatgaattaggaacactgtcatgtaaactggactatcagtgagtgattccccttgatctaaatcccgacatgtccgagattctcttgtagccttgttgatgaatccattgatgtatctaaacgactgaacaaaaagacaagaaaattttcagagaacctaaagggttgaaacaaccgaaatatttccttcttagagtgaggagcatgagaagttacatcatcgtgcagatctctgcatggactagataaagaaaacgaaaaagcacatgcatatctactgggtatcatatgttccgtcaacagcttgtacaacttggtgagaaaagtcttggtaataaaggcgttggaatcctggaagatgataaacgtaaacagtcaaaaagacgatcataaacaaagtaaatccaactttctaagcacgtatatccagtacatgaaaccaagagaagcaattaaaagccagactgcccttacaaggttaacactacaataaacaccttttcttcagaaataaattaccatacacccaagcctatacaatcagagctactttgggatacttcctatatgcagttgcaaggacagatactctcagaagtgacaaaaatgcaggatgcagtatgtagcaactgtaatagtcgactcatgacttgctatcagttaacaacgacaaattgaaaaacaatctgttgaaattattaggataatattcaaaaatcttttctagattgtttggttgttggcaagatggaagtccctttacctttgccatcaaaatggtaagacggaaaacttcaggagaaatatgaaggtcccatttccttgaaagcaatagaacagctttagcagcagccagtctaacattagctcctgtgtcctcgctacaaatttcaaggacaaataagcaccttcgaacatatgacaagtcaacaaggatcaagactgtaccaagagaaactgataatggaattgtgaaagcacataaaacttgtggcttcgtgttaagagcatgtacaacatgattgatttgtatagctatccaaaaagaacataccatgatttgatgccatcgtgtccttgtgattttaatgttttcttcaaaatgtttagcaagtcgtcaattttccttacgacttgaccatgacgaggcaagaaacttttcacaagtgttttgagcccatatatctgccaaagacaacaagtcaaaactgaatatacctcatctttgtaagcagaatttgagaacttcattacgcttatcacaactcaaaaatctaaaatatcttaaggcttacattcaaatcattgcctagctaataaagggataacaccattcttaacaataatgtgattcacacttatttctatatgcggcagcattattcttaaaaattctggagtaaagtatgaaaatgctgaacttcttcgaaagtacacaaataactggcaaatgttgagcagaggcatttacacttgggtcacacttggtttactttgggtttaaatggtaaagtaaatattatcagaactaataaacgggaagcaaaagagtttctttctccagcacttgcctttagcttgcaagagttgcaacaaccagaagactgatcacaagggagttgattgtcagatggttccgcctgtaaatattaccatcaacaaatagaaaagttaaaagaaaacagagaattactagctggatatctccataacgaagaatagcacctcttgtcacttacttgaaaaacccggtatatgtagctggtgatatcttcatatatattgtcatattccaaaacagaatattgcccaacacacgccaaagactgcaaagttgttggaatgttccgtccacacagcaaagaatccatgagcatctgagtaaaaggaaggcaaattaaacaatgtgtcattgctcaattttctctaaaaacggaaaaccatcacatattcaaaggaagtactgtgaaagatatgtgcacacagcagactgtcacatgatcacttcaataattctacttaagccaagagttaggttccctagaatataaagcacaataaagttatatcctaaggattttcccaagttagttacattaacatacacataaatgtgaacaagtaaatgtggagtaaaggaaagtaacaaaaagttccggttgctgaaaaaataacctcgcataactcagaaaagactgatttttcagatgatccagccaatgaactgatggcagaaaccgcacatttggtctgagaacgagtaccctccagacaaaccttctccagaacagggtaatagtcactgcaaaggcaagagtatgtctagttctcattaaaccataaaaaggatattagttgcctaggcatgctataacataagccatttttaagaagaaaaaatatctagaacaaacttatagcatctaatcaatctgaaaacaaagttaagaaaatgccatgtaaaccaagttctctagcaagaattttgctttagcaacacagattttatattttaacctaaacccattgtaagtcaaatagtgctgaagagattacccgaagttgacagaaatataaggagctgcctttgataaaactacaattagctcatcagcagctgaatcattctcctctagcagcttcagaaactgcttttccgaacctctcaggtaagaagggaacatgttgagaattacctaatttaagaaatcagtaacagtgtctcatttgcatattcgaagacaatgtaagcaaaatactaatgcatacttaagaacgctaatatacctaaaagaaaagttcaaaatttataatacaacaaaagttaacaaggaacacctaaaatgaacaaaggatagatatcaattggaacaaaataacttaatgaaaggataataatcagacgatgctagcatgtttcgcaacatctttccttaccagaagaagtttgatggaaggagccttcaattgcgtgttggcagaggtgctgccacaaagctgattcaaaagacactgaacatgctctgagctaaatatactaggcgaacattttgtagaaagtatgcgcaagaactcgaaaagagaatgtttaacaccaatcatcttgagaaacttctcctgaaaaataaaaataaataacaacaatgagaaaatgatcacctctctaatatgtagtaaagttgaatatatccaatatactaaagcgactatttattttcttcattctgattaccaaatgcattttctgtaaaatactcttgctgatactactaaacagaaaagtttgaacttactttaataatctgggcatttgtggatgacagttcctccagcagtaaagttaagacatcaaaaattgatgcatccctcattcggtctaatttttcaaagagatcttctgcctcagaagcatctggaaagcatgctgacagcttaacgaagtagctctttttctttctttgtgcttcttctatattgtctacctaaaacgagtatcagttaaattaataaaatgagcaaagtaaggtttgcgaatccctcaggatctgtgaaacttcaaaacttaagagaaaagtgtaaaacagaccttagctttcctccagagggttaggcaatgccgcaattcattttgcaacctggaaacatactgagtgaataacaagaaagacttttaaccaagacttgatgctgaattattatctctaccttcttttctgagataaaattgaattgagtgacttcaagtggatatgattcataatggcaaagcattggacccagtgccgcatcctctcttcaacgggaagaaggcgaggaaaaagatcatcggagagcacaagttccaaattttgggacctaaatgattcatagaactgtattagtgtttcagaaatatttagaggaaaaaaaaaactcaaggatagttagtaaattatgatacctgaattcttcacaatttttctcgcagcaaagtagcaagattttgcatgggatttgctcgaaattatcagtaattgtcatgtctccttctgaacacttgtcacaataatcttgatatacttctgtcagcttctgcagagccttcttcctaacagatatctttatcaaacaaaaacagaatataaaataaggtggtaggtaatcttgataaaaatagatccctaataatgcctcatatactgtaacatagagtaccttcttatcccgaagcctctcactggcttcagaaattagattcaaaggaacatacttcatattaaacttcataatatcacaagcaacaattagagcctgtgttcgaaccctatcatcaaagtctaataggcgttcctggatagcagctgacacataaaaatacgagtaaaggacaccaattagaagatagtcagaaatgaagaaccaaggcaaaaagagaatgcagcttcaggaatattactgagaactccagatgctttatttccagatggattcgcgaagtaacactgtttgccacatttcaatgcagccattctgacttctgcagatttatctgagaatcttctcaagaactctgcataaagatcttgatatgtctctacgtaagaacttaaacagtgcttaggctgcgcaaaaatccttccagctaagttaagggcttttattcgcacatcgacctgatcagtctgcagacatagaaataacgaccctggtgagtagcaaaaaaaaaaaaaaaacaggaatataaacgctaacttaaaacaaaacagtctatacctgcttaaatagtacaatttaaccaatctcatagaaaagctagatcatatgtttataaatataaaagtgtgtaagagataccagtagttcctgggtcaattttgggataactgctagcagcatctggggagcaattaaggagatcttaaatatgatttcgtgataagaatctttgagattggtctggatggaatctttttccataaaacatgatgttaaaaagctgcaaattaacggctcgagcctgtcggcacacctttcaatgagagaactggcgagcttatcagctccagaagttgtatcctgtaagcacacgagattgaaaacatcacctaatcattttgaaaaccataatctacagagataatcgttgtatatccatacctctccttccttcacaagattttccagaataacaacgacaaaagacgaatttgcctcttcctccagaacatcactcattatagctaaaatgttgttaaataaactatgttgtgtttgctgcgtgttagcctttcgctgctgcgttttcatacttttctgattaattaaactttgttgatggtgctctctgtaaagacaagggaaaaaaaaataccttgttaatgcagttcaactaccaaacaatgaaatcagagtagccatgaaatgaataaatcgtttcatctcttacctaacaagagagaaaaacatgttgaacatctcgtgaactaaatcttggcaatcctcgtccagcattagcagacaaaatttcaatcgagagactgtctccaagattttcgccctcttagagaaataagggcttacagtatcagatagctcagaaaactcagcaataaagagagtgaagatatcctgaaatagggatatgacaatgttagtgcgagtagccataaaactgtgataattgggaagaatgacttaaaagactctatataccctgagatactcgtcttcaaaaggtagatgaggtgctaaaatccggaaaagctcggagacacagacagtgaccaaaagactcacgtcattatcacgatttttaagaagagcatgcttgataatggacttcttcagaggtcttaactcagcttctatcagtttcaaacctttttccttgttggtagctgaaggctggtcgattttagagagagtattagcaacttcctacaaaaaatcacagaaataaacaaactcttagcatgattgaaagtgacaatatacgttaatcgtccccgcataaatatctcggatctgattagaaaataaatcatagcaccagaaacaaaatcgtcgcaaattaggttttctccgatcacacccagacacaaaactcactcaaattcaagtcaatttaaaaaggaatcaagcaatttcggagtgattaaaaagttgtatcaaacccaaaagtgatgaaatcgagtaaactaaaacaaaacccagtaacttgaaaataagcttaagaaattttcgaagtttttaaagtagtgattacagcagtatcagcttaagagatattacccgtagaagcttgaccagagaatccttgttgggacgagataattgtagcaaccgagaacataattcggaaactatctgcgtcggagttttctccattcaggtgtaccgctacttgtaaatcgatatgaatatggagacgaaacgaacccaaacaaaaaaaaacctagaacaccttagtggagtggagaagagaaagcgaatctaaaatccaacagtgagagtctgcaatgaaaacggagagggaagctttgggcgggactgaccctattttccttttttattttcgttaattaattattctctgtgtgttgttcattgcccatcggagactgtaccaggctcaggagaattataactaactttaaatacacatgccgacataaaaaaaaaaacgcacaagctatgattatttatatgggcctacaggcccaactttaatcacctaaaagcctaaatatgtttaaatcaataactggagaaagatcagccatctaaacgtcgtcggtttatcaaatttttattttgttttctgacggcaccggtttatcaactgttaatgtcaacattttttatctaagccaaacgttttgagttttgacggcctcgacgacattcataaatatttgtgtaaactcactaaaaatcctaaaataatcactgcttgagaacataggcaacatttaacatccgattggcgtcaaaggatttcattaaaaatgtagaaaataagtagtataatgatttgttcataagttgattccatagttttgttattctactcattagctggtgtagtaagcaaagagacaacaccacccatgtgcttagtagaaccatacacacacacacttagtggcaacaccacttgactctagaccataatgatcattttctgtctccatttcgtttctgattttataatttcttggatcaatgttcaataattgaatcccaaatatggaacaataataatggtggttgttaataggacaaaagtttctctaaatagatgcgtttttttttaacttttgtaggtttctttccctatctttcgagatagtttcttcatttgcttttgtgaaagattggtttatgtgtcacggatcgatcattgatgaataatgtgagaaaatgacttgctctttatgaagagagtaactgaaaacgatttgatattcaaacaatatttcaaaagttatgtttctcttttgattatgatctttataacaaacaaccaaataaatatccgatcagcttttcttgttcaacaatattttgatctatatacaaatactatcattcattgataaaatttaagatatgtaatgaactatagtatgttctattgttaggatcctacatctaaagttagatggaatctaaagtaatatttaaatgagatacactaattcattaattgttatttagttttgagttagggtctctattaaacttgagaatctaggttattgatccgggtggagtaacctaagaatgatatgttgcatgtccaatcttgagatttggttccacatgaagggatgagaattattgtcttgaaagcatgttaaattttttacaagatgatgcaaatagtaattaacatatcatgatcaaatcttgtaaattgaaaaaactcaaccttttgaggggaaacagctacaatatatactaatgattatctagctactcgtctaagaatataaatgtttagcatttaggtgaccaatatcaaactccgagctacttgccttacgttttacccttgcaagtaagtcaaattaaatttctattcattactaatcacattatgaaaaagggaaaccaaaacttgctgcctacttcattctttttcttgaatctttcgatttttcttaaaaattattattttgataaatatttcttccctatcttagtgttcacataaagtgtgaccgtaagatgggttagctttctcgtggtttgaccaagtcattcaaaaactcaatatactcaatgcctgaatggtcgtgcagcaacatatatgaagtctgctggctacatatgttaaagttggtttcgagtatgtaattttatatataatcttttaatttgttgaaataattttagatattttatacaaaattacaacctatacctcaaactatatattatactatatgcattttgcttgtagtcctatgaatatgagatttgtcttagagtcttcaaaattttatatttcatgaccgatcaacgttcaataaagtcgccgcttctttaaaagaaaaaatttggttgccaaacctattattattatagcttgagatataacttatgatcctacttttaatgcagtttcgaaattattcttctccaagacgaaaagaattgagaaggttggtccataatctttataacttctaagactttaacgtacaaatgatatatcgtcgttggttttttgcatttaaccagaaccagtttcttgtttatttatattttaattaattaattacaaacccctgaacagtaaattaatattggattttaaaacgttcaatttctgtagagcaataatatttcgaatttgtaagatacacgacaatcgatttgaaaaatagacaatagtagtgggatgtcaacgtcatgaacatgtaaggtcatcggacggcagcgatctcccccatatcctcggacgtatgtgggacaaaataccaccaaacaaaaaaaaaaaattgttgctgcatttctttaataatttgcgttatcataataattaattaacaaaaaaatatcaaaatatttccgataaaaacaaatcttcaacaaaatatttaacaaaaaaaaaaaaaattgcgcattttaatgtagtttatgtagtatttcctagtcacaccattatttacctgatataaacaaaaaatagtataaaaacagtaatattatttatcaccatggtttagtgaatgtacatgaaaaatttgttaccataccaatgagttttggaaaattgaaaattgactcagaaaacatgaaaatacaattttgtgatatttgttttgattcctgaatgaatttaataagctcacaaaattaaaattgcgaaattattcttaataaataaatatttcttactaaataaaaggaaacctacggaagagcaaaacataattttcatggcataaagagtgagagagagagagtcatagacaggagacgtttgagattgatgaacagcgaattcgaaacaaatcacatggaagaagagctctctttcgctaccgttaccttctccacttttctccttcattagggttttctctcttatttagctgcgcagctctctctctttcttacggattcacttcttaaaactcgttaatttcttgtgggtttttgtctcttttgcgatctgattccgaaagttgagtgagagtgagagaatcatggaggaaggaagtatgttcagatctctattagcgattcttcagtggtggggtttcaatgttaccgtcatcatcatgaacaaatggatctttcaggtttcttcttaaccctagaatttttaggttttacttaattgtatttaatacccttttgatctgatctattgatctgatgttgctgatttggaatttggtttcagctttatagattggtgataaagttttgatttttttttgttgttgttgcagaaactggattttaagtttccactatcggtttcatgtgttcacttcatatgttcgtcgattggagcttacatcgttatcaaagttctcaagcttaaaccattgattgttgtcgatcctgaagatcgatggaggaggatttttccaatgtctttcgtgttttgtatcaacattgtcttgggaaatgtcagtcttcgttacattccggtttcgtttatgcagacgattaagtctttcactccagctactacaggttagggttttcagatggaaagtttcctatttgtgatatttctattgtctattgtctaattgtttcttatgtatatgtttgagcagttgtgttacagtggctggtatggaggaaatactttgactggcgtatttgggcgtctctcgtgcctattgttggtggaattcttctgacatctgtgactgaacttagttttaacatgtttggattctgtgctgccctgtttggatgtttagctacttccacaaagaccattctagccgaatctcttcttcatggttacaaatttgacaggtcagtgccccttcctggagtctccttatgaatgaatttcttgctatgatatactattcagttcttggaactttcatttccatgatcattgctgagtcatgaaaactgcacttagtttctaattacaatgatatttgcttgttatgtcttttttggatttgatatgcaataactttgcttctattgcattagatatgacatcttagtccaaattgaaaaagcagtcactttaatgtgatttagccataaagttgattgatgtataaagattcaatcacatcaccttttgagaagtaaactatgaatatccatctgcgtagaggaaaattttgatttttctgtttttcattatttagcataaacaccgtttactatatggcgccttttgccaccatgattctcgggataccagcgttattactggaaggcagtggaattttgagctggtttgaagcacaccctgctccctggtcagccctcatcattatactcagttctggtgttctagccttctgtctcaacttctccatcttctatgtcattcactccacaactgcagtcacattcaacgtggctggaaaccttaaggtaactaagacaaccctaaacccgttactaaatttttctttcggattgctctggatggtccaaaccaacaaaaggataagcactattaattcattatactggcattactaagttcttatcaatttacctatcttaccatggtaaaagaaatagaaagcctgtcagctagagtttcttcgcatctacgtcttaagcgtacttcatattccattatacgtcttattcgtagtggtcagggcatgactgtatccatataagtttgttttaaacaagttaatcaccactagaatatcaaattttcgaggcacattgctatggtttttgtcatcaccaacttgtgatttgtttgttgccttggacactcactctcatgtttgtaatatgatttgcaggttgcagtggctgtaatggtctcatggttgatattccgtaacccaatatcatatatgaatgctgttggatgcggaattacgcttgtgggctgcacgttttatggatatgtgaggcatatgctttcacagcaaacaccgggaactcctaggactcctcgtaccccaagaagcaagatggaattacttccacttgttaataatgataaactcgaaggcaaagtctgatcttcttcattccgcagctcagtttagtactcactggttcagggtgctgcagaagagaagcattgacacaaggggtgttgaatttttactaaatatgcattttactcaaaaaccttagtagagaaaagttacatttttttttttcgttttgatttgagctcgtagaagagataatggttcctactactatttatatttctgtgaagtgtagaatcttttaatttatcaaatacattttctgaaacccgaaggagagaactactacatttattgcttcttcttttttgaaatttctgtgtatattcattactactatgtcatgctctacataggaagggtcgagagaatcatctcggctaagttaacgttgagcgaacaagtttaaaataaagactcttcttgaagtgtggagcagttctgatttctatacaactgaaaactgctttattattcatttctattgtatgtgctgtgttggcccaataatgcaatatcttcggaggatagttccattgacaggtaatgtcgagcttctcttggcctgaatcaagaaaaaatggagattaggagagaaatcaatcatactcagaaactatggtgaaccaactggtactgaccttcgccgtctgcctttctccaaggctccggataagttagagggatctgctcttgaaatctgccctatgaatgaagcatattcatggaaagctcttcctttcaatgatctcagagggactactgactctaagacaccggaaagccgtgtcattcgcctactgcatgcggaaaaaaacaaaaagcaactccggtaatgagaaagagaacaacggaaaattttggaagaaaagtgagccagcaagaaatttgcattgcaaccgatggacccattggaaatgatattctcatcatacatctgaagaaaattatttaccattttagtaagtcttcaagtatatctggtttcatatccaagcagcttccattgctcgatgtgtaatcctgccttgcctcgtctactgttaatcctctttctggtaccatggtggctgatgaagtaggaacggatcccgttgtcgtaatttggtttgtcaaaaagcaaaattcttgctgtgacacggtggaagtcatctcttcaagcatctgagataaaccagacgtatcaagatctcctgaagtgttcatcattggctccaaagctccctaaataagtgaattccataagtcaaaaaagtctgagctggaaactatgaaaaaatctagaaagagaggaagctgaattgtaatgtaatactcacaaggttcaggcatctggaatgtgttaggtcagcttctgaaattagattggttatctgatgagtgagatcaagaacttgtggagcttctacaggttctgaatccaagtatggcttgaaatcagcaagattggaacagattttttcccatgattcttgcaccgcagatctagaggtatctagctttggtttctcagccgtcttgtatgtcttaccaaaatccatacggctacattcatctgaaacttgttgcatcttctgggcagcccctacatattccttgaaacagtcttccatcactgtcgcatcagaagattctgcaatgatctcacttgtattctttaaacaatcaaaaatctggaatctgtctatgtatatctcttttgatgggggagtctgtacaacgtcctcattcattgaaacctctactcttccatcaaaatgtccgcaagatactgctcttggcgacagctcagcttcaccatccattaaagtttctggaacatatgaagactctggtacacatgatatttcaactgactgggacacctcattaatgtaagagaattttgatgtctcatactgataacaagctgcctccaatatttctgctctagaaggatcagctaatgggtttgtttccttttgcatatctggccaatatgaggacaacgtaccatcttcttggaaaatcaatctgtcgtccttctgatgttgagaaatggaaacccgtatgtcagtcagaggctcatcttctgaatcagaggacatcacaacattgagcttccgccttctgtttggctgagagaaagagagtggttggtaggaagtgttgctaagttcacacggaatccttaagacgtcttctaattcgtcataatcttcaaaagtagtgttctgcctgaacatcgctgctttcttggcttgtatactgttctttcctgtgccacgcctccataatctattaagcattttttcgttttcaacctcttcaacaaatacttccactgtgttatttctttcctcttccatagataataccttagcaatctcattctccaccaactgagataattgagaagggaaatcccgtgcaattatcttgggaagcagcaagtggccagcttcatgatcaaagagatcttgattacctgtattcttcacctttctggctgtgtatgggaaattaaaccatgaataaatcaaatgtctaaaccttcataaaactgaaaatatccacacctagtcattcactaatttttttttctcgtacgtagcaatttacatccaaaatacctcttttcggtttactctgaaaccaaaactgcaattgcataattgctttccgtatatctccaccacaaaacgtggtcatttcctctagtgaaccatgattaactttaacttcctctgctgcacaaacctgtgaaacaaaaaatgttaaaagaatccattgaaatttaaaggttacgcatcagaatactaaccagagaaaggtggttaaacagttcttcttttgatggcaatgaaaagtatatttctatcctctctaagttgtctggtaacccatgattcttgtctgtaaatatgcatgtgatacagatgccatcagcagattaattaaggtgaactgcaaatgaaataaaaataatgtttttagcatggacgaaaagtaccattggcagtcaataccacaggcccttttgctttcacagcaatctgctggatagcagaaacgagaccacgatcttcagcaaagcaaatatctacatcttcgaaaagaattaaaggcttcaagttagctccatcattctggatatgtaatacgggcatcacttcaactacatcctctaccccattgccatcagtacaggaattgaaaagagggtccaaggacctgaaaaaacaaattatgtgaatacaaacgctattttcaagtttgatagtaccgactgaaatggagaaaataacaaatccaagcattattgttgcaattctatgtaccttgacaggctatatgacttgagagcctccccaaatttctgcctaactactgttccacttcggcattctgatgtattggactgtagacaaaaatcattagagacataagctattttgaaagtaaacgtttccatgccagaagaggaaactaggtcttttagatacatatagcggaaacagttcatacctctaggattttaaatccttgttccttggcgcatgcatgaatggctgcagatttcccactctgcaacacaggcacaattgtactcataaacatgaaactcagaaagcattgtagacgtaaaaactgacagttcatggcagaatatctaatcacacaccccagctggaccaacaattaagagaacattcttctggctatcttcagcaccacttttttctgagtcagagtcactttcagaacagttgtaatcagcatcttgcgatttatcttcatcactactcaaaaagtctttgtttggctgaaaccctctctcataccattggcgcagccattcattcattacctttacagattcagtattaccacatacctgcaagatacgtgggtaagaaagtgtgagaaatttgtgtttggtaagaagatataaacaggcatatctactttgaaagcagtatgctcaaattgtctgacctccgaggcacttcttggctggtacttatctacccataatcgattacaaggttggccactggagtcattactgcatagattagaaattatagatcaagcattctagaaagaacaaaaagtatgctcaacttaaaacatgtgtgctgctactgatatcaaatacaaaatcactacctttctcgacatgacaggtgttgcatttcatgagaaatattggcttcaccaccagcatcatcagacaagttaattgcttcatgaacttcacaatcctaaaaagaatgatagaaaataaccctttattatgaatggttccaacaaaccaaaaaataaagaccaaaagagaaagttttaggtcatcaccgattctgctccatctaagaagccgaggcacccacgtttctcctcctggtcttctattaagactaccgaagatgcctctgcaataccttctgattgactagtgcattgttcaggctcctcatcatcgatgacacacacgtcaggatgtgaaagagatggcaattcatttaaatcaaactccttgggccgaggttcaagagagttaaattttatttgttgatcaggactctcagtagtagatgtttgctcatagaaagtccagttcttccaatcaagggtggttggataatcatcctaagaagaagattttgctattcagattcctttattattacaaacgatcgaagaagttaccctatatgtattagtcatacctgaaacttgtcaaatacatggatagggccaatggtgacgattttatctctccctcgaccaagacacgtaccattctctgctgcaacagcttcttgatttcttttacctcctttccaagtcgagaaaaacggatgtatttgcttcccagcagacatccgcgaattttcctgatcaaatagaaagcaaaaaaaaaacaattttagatgagacaaaaaaaagtcacaccaagttttgccaaaacatgcttaattaacttacctcagctcttaacttagcttccaggcgcaaattgggaactggaggtgaaacattggcagcaatcatctgatcaccagcagctacaattccgtttttagttgcacatttcttaggagttgtttttcgaggactctttcctttagccacctaaatcagagaaaaaaaaatagagagatcactcttacaaaatcttctccaaagtagttccccaccgtaatttatagacgaacacaaaccttcttggtagctccgttcttcggagttctctctttctgttttctcgtcttcttcccttgactacgaccatctcctacttctcctccttcatcgcacatcggatctccattagagtcaattacatcctccggtttatgggggagcaaagacgactgaaccaatttccgacgaacattccgccgtggagtctgatccattgcaatcaccgtcgcaattggaggaaatcagagttacggtagaatctagggtttatgtgtgaatttggggatcttggtaaaattaaattataacgttaaggttaaaagatgacatatgtctgatgcttcttttgatgaaagatttgttttatagttaggtgagaatttggagggaagaagattcttttttcgctatttcccgctaaactttaaggccgtgtttgtctccgtctctctcgaaccgcttcttcttttttttttaatttttttgcagctctttttacacacataaattctttgcattacctctcgggaaaaaaggaaagtgggcttctaagtgggccttaatttcaggcaattaatttaccggattacccttaaaggcttaaaccgattctggtagggggggataaatgttgagtgttgaccgttaaaccgttgaattatcccacgttgtacatataaccggtaggctcaaaccgaacggaaataaataggggcaaatccgtcattgaacattatgttatctcctaccgttgtcctaccgttgaacggaaataaacagctgtgagctatttcgataaagattgtaacttttcctctctctctctctctacttcgaacaggaagaagatagattctctcagttctttcaaatccataaaaatatacctggaatcttgtttctatacttcttctgtttctcatactctccactaatactaacatttttccagaattttgttaaaccctacaaaaatttgaactttttaaaaccctagaaaattccaaattcgtaaaaccctagccaagttcctctattgcgtgaggggaactcatcagaacccacgaatcgaaatgaagaatccagaaaaacccttacttctgtttctaattttagcttcaagcttagcatcaatggcgactgcaaaatccacaatagagccttgctccagtaaagacacttgtaactcattgctaggctacactctctacaccgacctcaaagtcacagaagtcgcttctctcttccaagtagacccagtttcaatgcttttgtctaactccattgatatctcttacccagacgtcgagaaccatgtccttcccgctaagctcttcctcaagatcccaatcacttgctcctgtgtcgacggaatcagaaaatccctctcgactcattacaagactcgtacttctgacacactaggatcgattgctgactctgtttacggtggtctggtctctccggagcagattcaggtcgcgaattcagagactgacctttcggttctcgatgtaggtacaaagcttgtgattccattgccttgcgcttgcttcaatggtaccgatgaatctcttccggcgctttatctatcttacgttgtgagaggaatcgacactatggctggaatcgcaaagagattctcgacctctgttactgatttaacaaacgtgaatgctatgggagctcctgatatcaatcctggtgatatcctcgctgtcccattgctaggtaagatccaaagtctctcttctttatttagttagaagagttctaaagtttcaatctttgaatagaaatttgccaattaagcacagattataacagattattgaatgttctgtctatttgtatcaaaacttctcagcttgtagttcaaatttccccaaatacgctacggattacggattaatcattccaaatggaagctatgctctcactgcaggccactgtgtacaatgcagctgtgttctcggaagccgaaggtattaagcgattgagttttgttagtcgaattttggatgatttgctgatatttagcattggtgtgatgcagtatgtattgtgagcctgcttctatatcagtctcttgttccagtatgagatgtagaaacagcaacttcatgcttggtaacattacttcgcagcagagtagctccggttgtaaacttactacttgtagttacaacggtttcgctagcggcactatcttgaccacgtaatgagtctttccttatcacatttcccctgctaatgaatttaacaacctatataaccaatctccctccgtctctctttgtttgtttttcaggttgtccatgtctcttcaacctcgatgccctggtaagtatactgtctcatgcgttatgataaaacacaatgagtgaaatcttgatctccagctgaaatgcaattggtaaaaacaatttgcaggaccgcaacaattagcaccgcttatagccccgcctgataatgttccaaaggaactgatgtatctaccttcaccttcaccttcgccatcaccagagtttgatgatattgctggtggaggatcatctatagccgcagtccccgcggcttcacctggaggagctacggtttcttcaagcaattcaatcccgggtaatccagctaatggtccaggcggaagtatttctatagcttcttgtccattgagctattactcattcattgcgttactcatccccattggttcttgcttttttgttttctaagtttgaatgcaagacaatctcatgaacactgctagtactttggtttgtcattgttaaatttgtattgaatgcctggccggttgacggttttttccggtttaaaattgtccggttcacagtcttgcaagtctgggcaaccaaacccaattcaatccaagaagaagcccaaattagtttggataacgaaaagcccatttaagtttttgattcttattgtatataaacgataatttgttcaaagggacaaaggaaataagtagttttttttttctttaaaaaagaaattggtttaaagaatatgtagttgaacctagagcatcctctgccataatgatggaaaaccagttatcttcacttgcctagaaatttctccataaagcatgtattttattcagcgcacatatttaatttcaaaaaatctaaaaatctcgattctgcaaatttaattatttccatcctaagcgaattattttattttatactactatacatttcttcaacctagaaagacgctcaattttgaaccttctacgaaattcctcaagccaaagccgtaccaacgtaccatttctttatccatgataaaattaattgtatctacactgtatacacctatctatctacatatattatattcagaattaaaactaattatagatatcgtatgataatatttgtaatggtaaggccatctctttgttcggttgttgggaaagtacggaggaagtacggtgccagtgaagctgcccattatgggaaaccgcttcaccaagattattgtcttatttttgtgactttcggggtaaactaaaacgtcttcattgccaaaaccgtctcgagatgctattagtttcttcatgcaaaaaaggaatatttttgggctggaaagctgacaaaaatggcctctgtttgacctttttaagggtttgcttaggaccaaagtgtgaaatgtctaagcgaagacatgtctcataaaccctcaaggctttgtgagaaagtcaaggctgtccccaaaagaacatgccatctctcatcaactccttcgatcatgtgctcttgcgtgtcttaaagttctatataagttttttggcttttgccgaaatacacatgcttcttttgaaatcatcattttgctttagtatctatctacaaatctccatattctcacatgcatgcacttatattattgtggtattatcttttataagtatcgagagtcttctaaaccagaaaataatctaaattaatttttcattacgcagtgattatacaaatttattgataacattagattgtagatatatttgaaatatacgaaataatatctttaacaaacaccttataagtacttgtcgataagcgtcgatctgatggagtacgtatatccttttacttgtatgattgttatatacatgcagtttggagaatttagacaatagtcatgcattttttactattaggttgtagtatacaattaagaaaatctagctgagtagcttagctagattcgacgtggagaatctcctcaaagtaattcacaatatcaactgtatcctatctctaaaaagagaaaaagggaaagttaacttaaagtaggcttaagtatgatgtgtaattgtgtattgatatgcatccatgtgatacaaacacacacgtgattccttcaatctctaatcccacgtaactttgtttcgcctttctttttcctaaaattattagaaacaaaagaaaaattaagtggttgtactccataattttatcaaaatttgacctaacctactactgtatgtttctgtttacactttacagtttgttttctatgtgtgttaaaagtgttgaaaacgtatgataatagaaagaaaaaatattgtcatcgagaactgaaataaaataagaaagaacgcggttttgtgccgcagcgagacagagtggaaacagctgttgttgaagtgattaattcactcacttcagtcttcactatttggctgcgcgtttccattttcattaactattttatattcgcaaaaatatctatttatataaatatattaacattttagagtacaacacacatatatattaaaatgtttagacttttcataaaagggtttaggtttattttagtttatcatttttgtttgtgagacctcactaagacctcacatgctacttcgtgaagttgcctccccttgtccctccatatcagaatcctatgtattttcttccctttctatattttatttctttattattttcattaattattcttctatttttagtgaaaacaaaagtttacgattcaatatttagcctataatcaattttaaaagatgtatattataaaaataaactctacaatttcttaaactgtgttatatttagatgtcatatagatttggatgaaaccattttaatttgataaaggtcaatctgattaaagaattaacttttgaaaataataatacgggaaacatatataatattatagtataatagcattcttatgcatgttatcttagtgacttttttattttgtattagtgatttttttaccatccaccaatgaattaactcgtttaatatatatatattttttaaaaaacataaagaccaatgagcaggtttgaagggttcttttcctcgaaagatcgtaggattaatcaacacattatattcaaacgcagctgtaatttgcaattgcagaaagtgatagctataagtcatcaaaaacataaacttcattttcttttgacaaaaataatctcaacctcaatactaatcctcaattttcccatcaagtagcttccgtacagctagctgtacactcatagatttttatattttaaatgttaattaattcaatggttactttcaagtttagaccaatattaaatatttactttaaccttcatccaaacgtcacaaacaacgtgttggaatgttacttcactaagtcggcgttcaagtagtggagaagctcgtaacgagaatttagctttttacatatctcataaattagtttgagattcgtctccgtgcaatgatctatcttggtaccaaaagaaattcttacaataattaatgaagattaagcttactatacataagaaacaaaatctgacatatccatttgtgagtattcgggtgaaaaatacttaataaagaaaacacctgtcatgcaccaaaaacgtcatattgatacacaaaaacgatactatttcatttgaccaaaatttaaatttattaaataaaccattattgtccccctctatcacaatccccccaaatcaaatcatgctatatataatctcatttccttgacattatttgtcattcagaatacttttatctcatattcccaacacttgttcaagcatatctaagtcaataacaacattacaacataacatggtgaaacaagaactcaagatccaagttactacttcctcatcatcactctctcattcttcatcttcttcttcttcttcaacgtcggcactacgtcatcaatcttgtaagaacaagataaagaagtataaaggtgtgaggatgcgaagttggggatcatgggttactgaaattagggcaccaaatcaaaagacaagaatctggttaggttcttactccaccgcagaagcagctgctagggcttacgacgctgctctcttgtgtcttaagggacctaaagctaatctcaacttccctaacatcaccactacttctccttttcttatgaacatcgacgaaaagacccttttgtccccaaaatcaatccaaaaggtcgccgctcaagccgctaactcctcttctgaccattttacccctccgtccgatgaaaatgatcatgatcatgatgacggactcgatcaccatccatctgcttcttcttcagctgcatcttcaccaccagatgatgatcatcataatgatgacgatggtgatttggtatcgttgatggaatctttcgtggattacaacgaacacgtgtctctgatggatccatcgctgtatgaatttggacataatgagatcttcttcaccaacggagatccgtttgattattctccacagttacatagctcagaggcaacgatggatgacttctacgacgatgttgatattccgctatggagtttcagttaatccaacggtccatattattatactacgaaacacttttaattcacattatttcatttaatttattctttcaattcatattattcgtccttgttgtttcgttatgtattaaatatacacacactaatttaagaagatcacatggactagaggtttttttgtcacgtcttcactttttttcatgtgtttttttcttttcttttcaattttattacaaatcttgtaattcattgattatttaaggcccaatatggtagacgcctagacggagatagtgaaaagagcccaattaatatactaaaggcctaataataacaacaacacacacgcatgatcttgtactagctttacttcttactacatacatacacttgggcttgtacttgaaccgttaccactagacatcatccccctaagactataaccaaacgtaaaagcaaggttaatcaactagctacacttctaagttctaacaagtaacaactctaattaactactctagtgagctaacacttactaacaaaacacaatttcacttttgggcctatttcgtctgcagcccaaaatctcttttgttgacttgtctcttctttgtcgttgacatcacgactcacgaaagtttcttcagctacatcttcttcttccttcttccgttcttcgctagcttcttcttcttctcactgacgctttctccatgttaaatcaaggactcaaatcccagcaatttatatgatcgtcgtaatgatgaggatggtgatttggtatagttaattaaatagattatgttaaaaaaaattataaatcataataaaattatctatttaacaagttccattatgcatgaatttaaattatatattaatattattttagttaatacacttatttgaaaatagagattaattactaaacatatcttagattttaaaattttataatatattataatatttgtaaaattatatgttataatatattattccttattcatatagagagagactctttctctttatttatttacacacattgacatttcttttttggttgatcatatatggcaaatttttggtaagattagagtcaagttaattatatctttgatcatggtttcatatgttattatttctaatgagtttatgatatgtattatgcttaactgtattcacaatattgacacttttattcttttctttttttttaatcattgacacttttattcatgttactattatagactatataaacaaatataattaattaatgaaattaaatatatttaaaatataacttgatataatttaaaatttatcatttagatatattctaatttaagattaaatttaagtattcaagttaaatcatattataaatattaaattatacttatttgtttttaaaaaatatattattatagtaatgagagatttggtgacaccaatggaagtaaaaaatctggaaaaaaaaatctaacaataaatacaccaaaaattataatattaaattggtgagtatattaagtctctcaagcaatgcacatgctcaaaaatactattgggcaagacagcacatttcagtttccatggcttttttatcgctgccttctgatgtagtagaagaattccttttcaagactcctattgaatcgttggtactatgcaaaccaacctgcaaacaattgtacgctctctgcaacgacaagagattcatttacaatcacttggatctctccgaggaacgattgatgcgaatttatcttgataagattaaaatcattaatccggtaaccctagatatcttatgtctaccagtaccagccgagtttgattctgtcacttttaatgttattcattgcgatggattattgctatgtcgatggaccacaagaggactagatcggtacaacaaacttgcagtttggaatccgatttcgggccaactcaaatttgttgaatccttttttcacggtgtaactgatctatacggtttcggatacgctaataatggaccccgtgacagttacaagattttgagggttagttattggcgtaaggaatgcgagatatatgacttaaaatctaaactctggagagctttttccgctactttggattgggttgtaaatacgccacaacaaaatgtgtttatgaatggaaatatgtattggattgctgatacgttgggtgataatattcgagaaaccttcatacagagttttgatttttccaaggagacattcaaacccatatgttcgttcccctatgagaataagattattgacacacttataatgaatggtatacataggattgctgattcagttatcctttcaagtttcagagtagataggctttctttgtttcgtcaacaacgccttgaagataaaaaatatgagatggaggtttgggtcacaaacaaggtgactgatgaggttgtctcatggactaagtattttaatgtgactcaccaccctgatctccccatcttaaatccctatctcttcacatacatgcgtgttcctacattcttcatccacgagaccaattctatcatgttatggtgcgataaagctgctggaaagggttttgcttgtacgagcttttacgaaattggtgatcagggtgaggtcaaacatcaacttgagacaagaaaacgttttagagctaacggtgaacgtaactcttgtgtttccagctgtgtttacgttccaagtctggttcccattccagagtaagctaatgaggatacatagacccaaaaaaaaaaaaaatctaatcacaaatcatgtgtatttgtagcattatgtatcatagtttattgatcactggattgatcaggttttgcttttaatgttgaatcaaattaattcttttttttgttagcactaagatttgatctgtaagttaaacccaattatgtatgcatgaagatgagccctcatacgtacacacacatatgaacaagctctattctgagatttagattctacacctaactagaaagaatcatcaactactttgtaatgtaatgagcctctctatacagaaatctaattaatagtagaaacattgatataaatagaagtgcaccatatcatagttgtattatacaaaatatgtaacacacgaatatagaaagaccaaaacaaagcttagaacgaacatgcatgagccaataaaatacttactccatgagacaacctcatcagtcaccttgtttgtgactcacacctggttatctcttgttttggctccagcgtattgatataacaaagaaagcctatcttcttggaaacctgaaaaggcggataaatcaagaggaacacaccaggcataatcaaccctatcctcaacaggccacgaacatatgggcttgaatgtctccttggagaaatcggaactttggagcagtgaataacagaaacggtagtatgcaaaataccaaaaccaaactcttgggaaactggtagacataagagatctaaggtcaccggattcatgatttcaaccttatcatgataaattcgtatggatcgtttctataagagatccaagtgattgtcgatgaatctcttgtcgttgaagagagcgtaccattgtatgcatgtcgctttgaatcgtatcagagagtcgatcggggtcctgtaaagtatgtcttctactatacatcaaacttattcaaaaggcagcgacgatttggttacattagggatttaatgtaatcgggctatatacattaagtcggtttctcatattgggccttaaatatatatccaccaattacaaacatttgaagaaaaacttttatgggccggacatatttgtttctgggaaaaaagaggcgttgtaagaaaattaatagtctgttaacaacaaataagatacttaacagattcactttaaacaaacaataatgtttaaagtgaatttctaaggttaagctcacgtgctttgttgatttaacagactctcttacagaagcaatatgttacttaggtgtcttttttgcttttgacttatattctgtgtttcattgtttatatatatactgtattataaaactatgtaatacttgaagataggagcgggccgattgaaaaatgaaatggtccataaaaaggtagtaattgccaaactcgaggtgacaaaaaatagaaaagtcggtttgcttttatttttgaactttagtgttaataatgcaacttgtaattatgttgtctacttttcatgttttgtagcaaccaacttgaaatatcaatgatccaaagtaaaggagaaagagagaatatgagtttcgagaggttaccatttggcagctcctgtttgattcataattttggggaggtttaatttttgtatcaaagtagtgaagtaacaatataaatgcaaagatagcattaatcactgaatacggagtgtcgcgtggaaagctgtttgaccaatatgctttgggtcaaacaatgaaccccattggacaagcactttcatcaattccttcattaatttcatttaaaaatctccattaatgaggttaataaacaaacccattaaggttatttgtatgatatgcctttactctttgcatgtaattgtttttgttataaacgaggcaatagacatgcatgtcatatggaatgatgaaatcttaaaattaaaataatgaaaatcgtagtatgatacaacacatcatttttcattatgcaggaaaaaaactctaatttaatgatatgaaagtataaatgtttaattatttagttgttgatttgtaaaatttgcgtagtaatatcacatcgtcctattgtatactacataaacaagtattttcttctcgtccacaattttttaaaaattgttatagatattgaagtattgattatcaaataatttaaacaagtggtattcgtgcaattatccaaattattggctgtgcatagatgtcgtatattgaatagtatggcagccttaatctgttgtcgaccaatcaaataaataaattacgtgtcgtgagttatagtatatcaatagtttcaataaatgcttgttactcatagcttagctacagagcaatatttattgtgattgaaatttcatttataggacacagtacattttctgtttatagaacttgaaatttggaccgacctttatttttcttagaggaatattgcatgttgagtggttagagactagagtagagagactgcaaagtttgaacctccaaagatttgagtcaaactgttgatgtaagcaaaattaccacaggatcttcatgacatcaaataatttccttaagagtacacaattatttgtttcaccacacacgcaaaatttcgaactatttcaagacatactttaatatgaatcagtccagacaaataaatgaatcaagataattgatatatatgtaaacgtaagaaaattggattataaatcgttttaactttatttttgtgatatccatagtaagattggatatatcttgaaagtgtgaatgagtctacatgcttagctatcacctttaaatatttggattatgcatttaactgaaaaatcaacggagtacacaagatgacgtattgagagtatatcagctcgtatgctcaagaatgtccattttctttctttcaaaactacttgttgcttttttcaatcataatccaactccattttatattttgtttatgttttcaaagtagatcttagttatacctctggatattcttacaatttaaactgtttacaatggtgaaaagccaacaacggaaattagtaattggtaggattcaaacctagacccacaatagaattattttgtgagaccaacatcagacaaactgctctagtctaaacctttagtttaagcaatgataagatacggtttctacatgcttgtagttattaaaactagtgattcttatagttccaaacaaattagagatggtagaaatatttaatgcgttcacctaataggctaatacatgcataaacgaaatatgagtttcgtgtggattttttggcaactaatttggttagactacttacagagttacagtttcaggccaaataacccatatcgatccattgatttttttagtttttacttgatatggctactatagcctgcgttgacaagtctgagtacgaagaatcttcttcattgattcgtcttctctcttttccttgacagaaataatataataatactactctaatcgattttttttttctttttaaaaagagatcaaatcaagtacaaaacgaatcacatattccgatttaaggataatgtatcaaactaaaccaaaaaaaaatccatctacctgtcagtgattgagatcaatatcaaaacatcaatccaatcatccacttttttttttcttttacaaaattgaaaagacaaacattacttcttctatgcacatttacattagttagataatgtaaaaaaagaaaaaaaaaaactccatagtaaagcttctcataatttaagctcactatgaatacataaaaaaaaaaacaagatataaacatttctctatgtcatctttaattgtcacaaattttaccatccatttgattttgaactgctttcacagctgcaactctagcagccgtcgcagctttattagctgcagccacagctcgtatcacctgctcatcgatccgtctctgattcactccattctttgctctttctcgtgcactctgcaagtaattaaaccattaagtaatcataaatccaaacaatgtttaatttctctaattgaaagtttcattatgtatgtaaaatacctgaaccgccctacgaaccgggtcagagtctaaaggaagatggttaacgagattaccatcatcccattcaccggatttgatatcaccggttctaaatctatacgtgccatagccttgtttacgaccttcatgccaagctccttcgtaatagtgaccattagcgaaatggtaaacaccaaatccatgaatcttgtctccaaaatactctcctgcatacttatctccattcctacaacaacaaaaatttcataataacagaactcagaaataaaacagagaaataacagcttttgtttgttattacctgaaatggtaagaaccaagtccatgtttgacaccaaatttgaattctccgacaaaagagcttccatcagcacaagtttgaactccaaagccatggctttgaccgttaaaccattcaccagagtaagaatctccggtgtaaaaccagtaaactccaaaaccatgtctaagtccttgcttatactgtcctttatatttacttcctttagaccaacactcgattccataaccatcgtaccttccattgatccaatctccttcatatcttccattaacgtaataataataaactccacttccgttacacttccctctgttgaattcaccttcgtagaaatctccattgctaaagaattgaactccttctttaacgacaagtcttgtttcttcttctttgatcggttccggttttgaatctccgatgtaccattgaaccggtttcggtttgtgtttgattcgagaccttacacgaatctgcttgattgcgattacggtttggttaataaccgccatgtttctcgacgcgaagaacagagcaagagcgacgaaaatcaaacctagtaagagattctccgacgtgaaaatctcatcaacgaagaacagtaagaaagatgagagactcaggaaagagagacaagcgagtgtgaatgcgagacccggtttaattcggttcattgacccgaatgatttaaccggttttctcctcctctgtttttcctctttctcaccggcttcgagatcttgttcacggcggtggtgagaggtttcgttgaagtcatcacattcagtgattgaagaaaggctttggatcgacgatcgaatcgtcggagatgatctgagtaacgacgattgagtcctcgtcagtttcttttggctcatctccgcggaaattattttttgcaaaaaacagaacaaagaaacaaaaaaaagctttgattttgaaggcttaagagtagaatcaccactttcgttctcgatttttccggccaaatcttaaacggtaatatgttaaccaccactgcaccaccgtgccaagcatcgcaaaacggagaagaagacgagcgatctctcaactccagcaatatcttgttcttatacgtcgtttttgttttccgataccggagagttttcacggcgaagctaaaaagaaggagaagaagaagaagaagctcactttgcttaggagagatcgagaaagagagagagaagctttgcgtcgggtttgggattattttaagagacaagaaaaaaggagttagatttaatattgaccgttagatgaaaatctgacggttgattaacgaaagcgtataacaatagccgttggatctgagttaaggaagaagaagtcacggtcttgacggggaatattaggagccggacgctttttagctttactgttgcaggccggcacgtgccgctacacacacatctattggtcacaattttttaatattaaacaaataaacataactttttcgttttacaaaatttaaaattttgctgaaaaaatctctgctttttgggggaattttctatattaatataacagttgaactggactttcaatagagtattttaaaattttaatccatattcatagtaagtatactttatatttattaatagaaaaagtgtgactatagactaaaataaaatcaacgattcatattgggaagaagatagttggtgaaaactgtaaagataggtaatctactaatcgacggtagagattaattacttgattcggaaacaaaaatatcaataaagataagaaacacaaaaaatgggttttgatccaatttgtgaataaaaacatatttaccaaacatcctcgcatggtgcactccgcattactaggcctcatatatatactttaaaaaaatgctcacatgggacaatattttatcaaatttccaatataatgtataataaatgtatatttattcatatataattatatactggaaaacgttaaatcggagccggaggctaatgacattgtataatgttattttcaaaagatagaaaacgacaatcttaagctaatgacattagattaaaaatggttcttctagtatttgattgattaagctaacatcgctttcactgagatctaagttcttctgatgcattcaattactttatttaactttcggctttagaaaagataatccgaccactaaaatataataatttcatcaatttcagtctttcagagaatattcaaccttaatctattaatttactcattaaggacttttcaagattcaacaaaagactctaaagactattattgcatttgataacgtaaactttactttattgatttgctttgctaaatcaaagtctctcccgaaatggaaccgaagaagaagttacacaactagataaaaataaggtatctttctaattcaaacttcagacttttctcttaagcttctgcttcatcctctcaattgcaccacgcaacgtctcttcgtctttacagaacgcaaacctaaccaaattcttcccttcttctggattcagataaaagacgctcgttgggatcgcaacgaccccaacttcttcaataagatactcacagaaagcaacatcgttctccattccaaatggagtgtgatcagcaaccacaaagtaagtcccgctcgatgggaacactgtaaatccgacttccttcaaacccttaaccagagtctcctttttcacattgtaatctcttttcagctctttgaagtaagactctggtgccttgagagctgcaacggctgcccattgtgctggtgttgatgtggcgaatgtgaggtaagagtgtgcttgtcgaactccccaagtcagatgaggcggcgcaatcgcccagccgatcttccatccggttaaagagaaagtctttcccagggaattcatggtcacagttctttcatacataccgggaagagaagctatagaaatgtgatccatttcaaacgcaagcttatcgtatacttcatccgagaacacaagcacatcgttttcaatgcagagagatgcaatggtttcaagctcctccctagtgaacatcttcccggtcgggttgtgcggagtgttcataaggatggctcgagtcttgttagttaccgcagctttaagctcttccaaagggatggagaagtccggtggacgtaaagtgattccttttactttagcaccagccatagagagtgttgcttcataggaatcataaaacggtgcaaagagaatgacttcatcaccagggtttattaaacccaacatagctgcagctatggcttctgtgcaaccagatgtaacagtaacttctttctcaggatcaacaacaagacccgtatcttcacgaaaccgcgcagctatagcagagttgagctgaggaatgccgtatccacgagcatactggtttttaccatctttaatagcttggatcgcagcttctttaacaaaatcaggaccgtcgaaattgggaaagccttggcctaaattgatcgctccatgtttaactgccaatatgctcatttgagtgaaaatagtagtcttgaacttctctaatctcttcgccacctaagtaatcaagtttggaaatatttagaagaacagagagaaaaaactttactgctaatatctcaaataccaaatccaaaattttcaaagtacaaatcttttatgcattgagatcagtacgtatgccaatgatgaccctaaagtcacaaacgagaagaatcatttatcgggtttaaactctgcgatgcttaagcaaaacccattaattgggtcatcgagctaacgaagatgaaactgggattgattcgatagtgtaaactgttaaaaggtacagtgggaccaaacagcaagaacttaagtggaatccaaatcggacaaagttggaaatcattacgaacagaggtaaaaaacaaaacatcaaatagacagaacagcagcttccaatgttggaaaagcagtgcccaaacaaataggaggacccttcaagattagatctttcaagaacagtaacacgagaatcgaaacaatgcctttgttcatcatcatttgactatttaccatcaaagtaaagatcactaagaaacagagaagtttacctggacgggtttttgagtagactcgttctgagtcgaaactgtggtcatggtggctccgataggacgatggattttggcggagctttgtcggaaattagaagagaatgggagaagagaggctttgaagctaaactgtttgatcatcacaccatttatgtccaggtacattgactctgcattaccacaagaaaaattcggtaagctttttagggtttttgattcgttcgaaatttaggaatttttgccttttgtcgcaacaagttgcaacttttgacgtcaagtgggcttttacaacacaactcatgatgcttcatgggccataccatgccgccctgaagttgacgatgccaagttttagttttgttgttaaaccttttctttatcaattttctaataatataacaaaacatacggcaaaaagtaaaataaaaaaatacgaatttctaatttatcagccaagaaaatctcatttttgtttgattagtctaagtgtacctaattttagttaaatttaacatcaaggataaattgtggatttatttttctttccaaaatgtttactggtagaggataagcatatgttagccgagggtattataggctagtggcaaagcccaccaaagttggcttctgactacacttactctgtgtgggttaatgtaagccttttgtgtggccaagtttgaaaagtatagctttttttttttaatcatcgaaaagtatagcttttaagtgagtagctcgtgaaattggtaagtgttggaaattcgaattttgataaattattaaaattatgtactacagtaccacttgttacagctgaattgatgtattttataaccaaatgtgtaaatgatgagtttggacattttatataattgggcttctttatgctatatatattaatagcctatcaggcccaatccaactgcctgatcgtttcaaattctcgagttggatcagattccggtttacagattttgacgcgacctcatcgattcgaccatcaaagcaaagctctccttcttcaagctccagttactctccttctttagaagactgattttcaatgtctcaagttcgagtgtagactttgaagatcttgtttttaaaaagattattaaaaatgtaacacatttagcacggtaaagagagaaaactccctaatcgatatatatacagattctggccgaacccaaatctaaaacatcttgggcgagcaaaatcatgaaaacaaaggaaatagaaacacatttagcacaacttcgaatcaaaccaatggggtttctagaccgaaccaaaaacaacggcaagtccccacattatctatatcatcccaactacggagctgttctagtccgacatgattttcttttttcagcaactgtaatccaaaaaatatacaacagttgctataatctacctcttcagagatccctcttttgctccaatatctaatagtatgaactcatgtagagccttgctcctatatcgagcggaccatcatctccaccaacagcatgaagaaccacaggaatggtcgagaaaagttggatggtcaaaggaaaaaccgcaggggcaacctcatctattgacacggcctctggtgactcagtgtcatggacagacaatgcactgcattttgcaacgcacacttcacaaggactcaccaaatagacagcttccttcatgggcttgaaaaagcctcttccacctctcttggaatagagtttatcgacgattaacgttgatgttgcctctagccagtctgcacacaagccttcgatttggtcgtagtatattctccgttcaatctgtgacagcatcaataacaacaagtgtttagcagactgtaaacaggaatttagataaatttaattgtggtaaatgaatcagtagagacttacgccaagcttgctaatgtaaacagtcataaatcttgatcccaagttcattactctagcttcacacggaaaaatctgcagagaaagaaataaatgagtttccttaaccaacataaacacaagaagcatcagaatgatgcaagttatcaattcacttacctccttttgcttcagcacaaaccaagtgtaaagctt

SEQ ID NO: 39 - DNA, 95771 bp, Arabidopsis thaliana
gaattcttcgtaatgtaaagaaaaaacaattattcaaatgaagctttttaatttcgggccgtaaaagttaatgggccatgtgcaattactcacaccatgtttttattcctttccctttttttctttttttcttctttttttccttttcaacgcgaagaatgtttttattttgatctcagttgatttgactgtaggcacagtttttgaattggaggcaaaagtggagcaagtgatcccgccggtgaaggttgaagacggcgaaagcacaactcatgaaacgcgacggatgcgttacggagaggagtttctttcttctcgactttgcaggcctccgatggtcactggcctggagaaatcactggacctctcttcttccttcctccattggtatgtttcttcttcgttttcctttcgattcttactttacgtctatcggcgaatactcttagggttagaattagagatttaggtttctattgcgcgagaaattataagaaattgaagggataatgaagaggaatcaatgaaacggagagaattttcctgcatgtattttttttctgtatatcacagattcataggacatctcgaggagatatttgatgctgagcatcgtgaagagattcttcgatatatctatcgtcaccttgtattcttgcagcagattttaaagaagaagcttgaccagagaagatcctcacatgagttctgtttttctcccttaatttgcagaacgatgatggtggatgggggttacatgttgaaggcaagagctttatgttctgcaccgcactgaattacatatgcttgcgtatactcagagaaggtcctgatgaaggacgagaatatgcgtgtaaactgacgagtaagatgccttggatcgtgacatttttgctcatctacaacaatgaaagttgtttcccatcaatctagttcttccaactaatcttgaacctcgtgccacttttttttgcttcattttctttgttttcgcttaaatcatctaaacattgcccccacacttatcaacacatgttgccccttcacctatctatgaaagagattaagagaagatgtcgaaatagtatttccagaggagtggtgcagcgtttcttaaagatgttgatggtgaatacaaacgaagcagcttgtttgttgacatcggtctagctcaaaccatacatatttgcaaagatgttttggtttgaactagaccgagtacaacaaacaaactcctccgtttgttttcacgatcaccatctgtaagagtaccatctacgtccaaagatgttgcctctagaaagcctattttggcatcttttcttgcaaagatatgtgaaagagaaacgtgtgtccataagtgtagcaatattttcaaatattcagatgattcaagcgaataaaaaaaaggaatcaaaataaatggcatgcggaaatctcaaccatcaatgtcacaatccggtgcattttactaatcagtctgagaaacatgatcgcgtctttaacctgggaaaagtaaatctcttccacaaatgaagtttcatcccaaggaagtaaaggtgttgaaaatccttcgacatttgcttctctagttctatcttttcgccaagtcagtagcagattcaaattaatatattagtgtctgctaaattatgattgggattttacagtaaagttatatggatttgtatactatacaagtcaagttaggattgtccttttttgagaagcataccaaattgtaatccaacaaattctatttaagatagatcataagttggtgtacctttatgtatgcaggtatttaatctaagtggcaagaggtcatatcttctagatcttttatccactacaatagttaacaaaaaaaaattcaatcttttaaatctatcagtttcaaaatctaccgttagacttaacggtatttcgcaagaaaatagtagattttatattttatgagcaaggtttgaaattattataagagcatatttttcttgttgttgtgaatttgtgatgtataaaaatctagaaattgcatttcaatcaacaaacaagataatttcaataaatatggatacgctatcttagggttttgtaatagatcatcatgttagttaaaatattatagatctattcgtgtaaattctttatccaaaaagcactaacagaaaatatgttgagataaacaaaactgaccttggccatagatctggtgacatgatgagtagtatctaacgaaaggctcctgggctttgcgatccttcaacaaatgaagtgtaatttagacaacgtgttaaaagatctagtcgtgtaatttatctaaaaagcactaagggaaaattgttgagataaacaaaactgaccttgtgggctttgtgattcatgcgatgagagatgagatttctcttttcaaatcattccatcgtttttgatagaatagaacacaaatcattacagtttctttcgtggacttaagatcttatatattctttagtgaagaagagagacacgaataaaaagaaaaatgaatataataacagcttttctgatttcagattctctacatgtaagagaatggatcgcttatatgttttctgttgataagtgactaggagacacaaaaaaaatgtgtggttgttgttgaaattaaaactctaattcataaaatttccttcttaattttcgtttgaacaatttaagtttattcttctctttcagtcaacaaatgaaggaaacattaatgctttcctttttattattatatttaccaaaccatattttattttttctaatttatatcattttattaatattgttttccttttgaagcatatctacttttaacaatgtgtcaatggctggttcacaaagaaaagaaaaaacaatgtgtagtggtaatgcttaaatatttttataaataaatcatctctaaattaataatgacgtgattatgatatttattaatttataaaaatgattcccttcatttatctatatactaattaacctaaagaactaatttgaaccaaataaatgttggtttatcgaggtattaagttatcgagtattaatttctaaagattatattcgtacatgcaaaatattaagttagtacgttaaataaatatttgaaagaaaatttttaaacaatgatgtggtgttcttcgtcactttcttagactaaaaataaatcctacgaactatactccaaaatgtgccagaacaacaaaagtaaagttacaaaatcaacaattatatatataaagatgtctataccttaggcatgactttgaggacaaactaaatcccagatattacaacatgaaacaaacaccgaaaacattaaatacttgaaagttgagaccatatataatcttcacacaaatgattaaaggctaacttcttagtccttacagatagattcaaaccaaatctcattagaagcattcgatactaagctcctcgttaccttttggaagttcctttagcttggcaactgccgcttctatctctttcttcttcttttcatcaaatgatgtcttaatcatcatcttcttcattactgtcttttgcatcacgaaacgcgacgctagtgcaaattgttctttatttgaacccttgaaattgtgcatccatatagtatccacacgaaagtcagcattgggaaacggttctgccttctcccataaattgttttgtgctccaccgtcagaagaattgccttcttccccaagaggattgttattctacattcacaacaaattaaagtattgtatcaaatctcaatcaatattataacaaaagtgattttaaagagatcaaagatcaaagcatccaattaaaatggaacatgaaatgaacatataccttaaatgatatttcaacttctatcattttttcagtccacacagctaagattttccttagcacttctacttctcgaggattcttcaaatctaaactcacagataaagatgcaggtgatgttgcatagttggtatcccacttcaccatcccgttgctttcttgcttctatatttaaatacacaattaacaaacatgtcaaactaaatataaatgtttatatccttaagtgtaatttcttgtacctgagggggacatgagatgttgatgctagtatgaggcaagagtcttcctgctacccaatagtttctaccaaactggagtctaggaatttcgagaacgacgttatcactctcacatgggatatattctatggagagaatatcaagacgagctgcacgcacttcaatgctatcaatttggttgcatgacatggacaagatccttaacgttttatgatcaatcttcaaatgaccactggggttgaagaaaatgatttgtaggataagaacctcgagggaggggcaagacgagatgacttcgttgaaaacatcaacctcagcaaagatttgaaacaggtcaaggtacttgagatttttacaattgttaaaagcttgtgcatcttgtaatatgtattgatatagcgagagtgttcttaggcttggatggttgaatgtctctgtggacagcttgagcacattgtcttcacctgttggtgcgaagcgaccattaaaatttgcaaggataagatttttggtgtgtttcatactagtcagtgattggatccaagaagcaagcatcccgtcttccaattggtatgaataatgggatattatgcaagtctctaaatggccattgtgcttgtttataacctgaaaaatgcaaaaatgattaagatttaaataaggacaaacaattatgaagagtctatgttttcaatttatacgtgtttctctttatatcgtatatatatgttgaattttatagaaaaattgttaatatgtaattttatgtatgtgtgtatttattaatctatgtagaaaaaggcatgagatcatacttctctagattattgatcataaatttgtttaacataagataacgtttcgggcgaaataccgttatttgttttaaatgtaacaatgtttcaaaaaaataccgttatttatttccctctaaataccgttaaataccgttatttgctatttattttattttttaaaaaaaacataaatttgatacatatacatgtctatgatttcacatttatatgtatgaaatttcttataagtcctcaaaggcaatataacaattttcatcttttaatccaaaattccttttatcaataactgatttaaacttgtaagattgaatattgagagaaaaatgaaaagaacctcggttataattgacaaaaaaaaaaaaaaaaaactcggttatctgattagcggcacgatctaataattgtggcaggacaatcccgttgatggtgatggtctttcgcatgtcaaagcaaagatttgacacttgtttccatgtatccccccattgtttggacaaaacacatgtctttatcgcttcttctgtggacaattctgataagattttggacaacatatcgtcaggaagttgattaacattatcgattgcatcgatactgattcttttgttcgatgatatagaggatgcattttgtaagagagacatgaatgaagaaaagagagtttgactcaaaaactaaggaaatggaagtatagcttatttgattttattgttgcaaagaggcacatcgtagagtatatatacacaaaaggcaattcaggttaattaattaccttcccgtttttcaattggagaattttgattattattttttgtctacatttcaaaatgagaaagaaaataatcatttaatacgtggaattatagtttagtaatacatggcatgaaaataattttatcaaattttatttcggcatcaaaatttgtgtgttttttttttttttttttgaaattaaacttattgttatgatgcatttattgagacattatttgatcgatagtagcaattttaggagagtgtctgttgtatatatatatgaactatgaagattgaaggctatttgatgtactgtatatatgtaatacttgggacatagctaaatatgcatattgtgtcaatttcttttacttatctagcgttttctgtcaaattcattttcagtttgtagattggtaaaagtgaactgagaaatacaaaatgtctttaatgaaattaggtgtttactatctagtttctaaacttttggtaattcagtagagcggcacaatttgcagtttcctacgaagagatgattatcttgacttttataattagcatcagatatccgatcgccaactaatccctacaagtaaatcagtccaaatagttaagtggtccgcacagaacaagtttgtttgcagtggaaactgaaacatcaaatatgtgcgagtttacatcctaacctaggttctttagtgaaattgatcctctcacaacttacaagtccaaacaaaatatcttcatcacttgagttgagtccatctatcgttactgttttcagacaaatccaatggtccccatatcagcggctgctctcatctccttcgacaagtccacattatatcttatatcgatctatgctattttattatacaaaattagaaacatttagtaagacatcgacacatcggtaattatgtttcatcttatcatatttatcgggaaaaaaaaatgattttctctattaaaaaaaaaaattatccttttttaccattatgtagttgaatttaggttgcttcttaattttttttaaaactgttcaatatttactcacacaattaatattgtgcctttttaaaaatggaagtcctaatttttgttaggctatcaattttgctgactaattaatatattatccataagaaattaacttttatttaggcaaatatctctgctaaacttggcaaacatttatcaaaatctacatttaatacctcaaaggatttcataattgtcttgccaactgaacccaattattagaggtcaaacttgtactactaactttaacaagtcaaagatattaataacttgtactctattcttatcatctcattgcccaaaaaaacaactataaatacttacacaaaacattaccaattcggatctacgattttcaattaactctcttcttttttttttttttttggtttttcatttaagtctattcaatcatggaaaccggtttaaacatcttaaagctatcgctatgcgtcagcctagtcgtggttggatcatatgctcaggctcccgcaccatggaatccatctaatgggtttcgtccggggacatgtgaccactacgagtgtcccacctataaattggtagaggccggatacggctttgagatccgcatgtacgacgctgccctatggatatctactagtcctatcccctccctatccatgactcaagccaccaaaaccggtttccgacggtaaatgaataaatcgaatatataagacttggtgttctttcggtttctttatattataaactgaagttgactacgtttttgggtttatagattaaataggtacatagaaggagataacaagagcaacgtgaagatgaacatgacagctccggtgatcgcacaagcaacgcctggaagatcagtctacacggtctcactctacctcccgaagaagaaccaacagaacccacctcaggccgatgatctccacgttcggtctacgaaaccaacttacgtagccgtgagacagatcggtggctacgtgtcgaacaatgtagccaaggacgaagctgcggctctgatggaaagcctccgggattctaactggattttgcccatcgagaagagcaaaggaaagttgccggcgtattttctcgctgtttataacccgccatctcataccacggctagggtgattaatgagatcatggttccgtttaacatgtagatcatgttaatgacgccctcacgatttgattgttacgtagcaattggattagaagaggtggtttagaaccgatcgatactgtaacagcagcttgcagcttctggtttaaccggtataaattgtatctctggttaagtggtgattaatattgttattttgtaaaggtggggaaaactgtaaccaaaaagtttgataaaagattaaataataactaagattattgaatcaaaattgaaaatcaaacctaaatatcatcgaatcaaaaaaaaactgtaaatgattttttcagtttcgctttttttttttttcagtttcgctttctagaacacttataaagctgtaaaagaaagcacctgatcaaaaccatgaaaaaaaagagtgaaaaataaatattaggaaaatataaattaaagcgataatttatgtaatttcgatatttttaatgcatattatttttgtcggccaacttgttatatttaatcatgtgtttacaatgcaatttaatcctatccgaagatgaaccacacacataaaaccttatctgttacaaaaaaaatgtttatgtttttcttcataaatgtataaaaccttgtatcagtttacgttgcatggccgcaacggaaaacaaatccgccaatggaagcggctctgagcatcttcaagctctcgttccttctcacccttctctccggcggttcagaccttatcgactcgttgccgccgaattgtaaccgagccgagtgtccgagttatgaggttgtccacgccgggaatggctacgagattcatcgctacaacaccaccgtttggatttctaccgaaccaattcaagatatctctctcaacgaagcttctggcaacggttggaaccagtattttattcattattcattcctaaattaactaaggtttttaatcgaaaacgtattcaaaatgcgttttgctaatttgtatgcagattgtctgattacatgaacgggaacaacgattatcaccagaggatagagatagcacttccttatatcacccaagtctctcagaacttgagcaccttcatagtctctttcttcgttcccaaggcattccaacctgatccacctccgggaaacaacctccacgtacagagatgggactcgaggtacgtggcggtgaagcaaattagtggatatgttgcggatcataaaattggaaaacaagtggctgagctgaaggcgagcctacaaggtaccgtatgggccaaggcaattgagaaaagcagagaaaccggcggtgtcggatcggcttgggcttacacggtggcgcaatttagctggccgttccagtggagtcagcgggtcaatgagatttggtttccgtttgaaatggaagatgaagaaactgttagtatcgttactcagtgaacaaaaaaatgaacacttttttatctttttatggtgtagtgacaaagcaaagccattgagataagcctatctcctaaaagttgttaaataactgtccattgtcttactctggtcagcacattccctaaagaaaagaaaatcaaaagagtacttttttctgataagtgataacccacctgaggctacatactcaatgcaactcacagcacctatgtaagaaatgagagctatctatataatcgaacaaaacttctaatcaatgaactcctgattacgcgtttgttccagaccaatagaaaactcaaatccacaaagaacctagcatattataagaccgcttaatagaaacacccctcaagaaaagacccgaattcttgaatcacctggtttatttacaacgatgaagacaacaaaagagcagaagaaaccctaattttctcaatcttttgatgttaacatgagcaggagagtaaaagaaagatttactgatttcaagagagacaaaatccccacagacttttcaaatgttctaagaatgacataatgcaaaaagttttgaaaatgacactccaataacacatatactgtatacatacactctaatagtgatcgtatttgcttttgaaaacgctactcaatcagatttaagaaaaaataagacttgaaatctgtgttatgtcaagcataatactgaaaactctgtctatatttcatttttattctatagatagtccctttttttgccagcatttatacgggtcataataggttaacatgacagttttatactagtactatttttcattattgaacttttatttggaagagggaaaattaggagtcagacagagaatcatatagggacgtggcatatagccactccccacgtggctcgaagccacttgatacaaaacatgtcataatgtgggtcattttttcgtaccattcttctcgaagatttgtaaaatatctctatctcaaccgttggatctagtatgatcaagatacttgaggatttcgaaaaattgtcgagaccttttaagaaggatttttacttctatcatgaagtagctccgaaaatatcggcatctttaaggcccaaaattggcccatcttcgttcttctatgctacgttcatgattcgtgcttctatccaaatcattggttgtagacttgtagtgtcttttttttttttttgttataggttcgttgtagtctctgtacaattatactaacagaaaaaaaaaatatatataagaacagaaagtacacaactgtaaaagaaaagcattaaatatcatatacttttaaaccaatgagggaactccagtgtcatttttggcccgacatcactcacataattgaaggaaccagacacccaaataagtcgaaacaacttgaaaccaccctttgatattatccttacatttttttgtcttcccccgaataaattattttgtgggatattttatcgattcaccacctgaatataaagattggattgtaatctcttcttatcaccaccttgacaaattataaagcaataatctactttggtctttataaaagaagaaagaattttggtaatcttataaccacattgtttcttagacaaagcaatataagtcactttggtaattggtattaatcgtatagtccttctttctaattaatcgtcaaatgtatatttctcgacataaactaacctacattatagtttttttgggctatattctgatatagtattacctactacaattatatggggtttaagttaaaccgtttaaccaaccaaaaaaaatatttatatgatttttttggcccgtacatgtcggttcttgtttctcaggctgtccctctatggctatccaatcgcttacgtccgtccaaagaagattttattcatatcgaataataaatgtttagttgttattatatataacattattattttgggtaaagaatctaacattatagttcacatcaatctttaaaaaggaacctacatgcgaaactattgtgttctttcaaatatatttctctcatcgaattgcctcctacgtggcttctcatgtaccaccacccctcaaggctcaacatatattataacaagaaactttattcgaggataatgtctgtgtatgttctaaatagtgaatatagttaagtattaataatgtatctcaattattatctatttatgaaaattgaaatgctgacaccactgtattagactgttattctgttagttaataaggctaaagttaattgacataatgtgtatgtttacctctctagatttacaaaaaaaaaaaaaaaaaaaaaatgtttacctctcaacagaactaatcagttatcgctactgtaaactaagaaaacgatttaattattatcaagattttaaaattttatcaaatattccttacaaattatttttttgttttgggatatcattttccttctcccatatttttgggacatctatttgataaattcttgaatacaaactgaaattaacacagttgtgttgtggtatagatacgaactgattttagtcggcaatattagttaagaatatttaaccagaacatgaaaagaaaaagaaatcatttaatcctttgaaaaatatttaatgcggtattcaggtgagtatcatatttatcaacaattatttttatagcatgaaagtatttccgaaaaaggagtaacgggcatataaccaacgtggaacaataacggtctcaagaatgcaaaacccacaaagatattattaattgctgattctttgacagtgacagctgcctccgcaactttcttagtgaacgtgtcgattttgttatatgaccccatatgttaataatatgaataagagtcaagtattttgcctataaaaaaaataagtgtcaagtatagaatctttaatttccacacaaaaaagagtatggtctaaagttgatgaacaatgaagtatcgatccatttttctgtaaaactatttgtagcagatttagcaattatattccactaaaaatgaatcttgatattgtttggaatcttaagtttttaaatgtgagagcaccccaacagtaaagaacataatccaaactgtatgtttggataactatatcatttatgatataatgcattgtatctttgatataatatttaagtaatctgtcttaagaaaactatatatggaccacaaatttatttttatgtggttattcataaacactttcttatatataaccgtgaaatatcgcatatttgttccatggtctgtccaaggttgagtctagtttttgataatggcacctaaaatttgaattcggatcaaaatatcatccttctaattaagtggtccgaatttaggtatttatataaacactttataaatcaacacatcggagatatatacaagtatagtatgtatgtggtaataaagagaaacactaggatcctttcgaaaagccataccatacccctttcgaaatttcaagttcattctgcgaacatttaaggacataaagaacgaattagattcatcggaccggttgacgaggtcatggttggtcgccgggtcatgactcatgagttgttataatcaccgaaagtaggtgatgaatacatagaggaggcaaatcagcaataataataaaaaaaaggatacttataaattatgagggaaaactagtacgcaactagtgattatgttgtcagccaacaaactcccataaaatatcaaattcctatcgctctcaaatattgtatgttttatctcgataattcttctttaaatttgacttctgtactttaaccccaaaaaccaaacattgacgtccatgataattaaaacaaaaacaaaaaactgttgacaaaccattttaaacgatttttttactatttagcaaataactaatcacaatggaggctttcgcaaatatcgtcccgatatattcaattttattgatatagatacataaaagagaaaaaaataagtgattagctttagttttgaacagttttgatcgtacgtcgttgtaagatctttatcatctcatctgctatatatacactcctccgagtacataacccaatgtctcagccttcaaagctatcaaaatcaaaaaaattctatcaaacaaggaaatatatcaatggcggtattgtctaaaccggtagcaataccaaaatccgggttctctctaatcccggttatagatatgtctgacccagaatccaaacatgccctcgtgaaagcatgcgaagacttcggcttcttcaaggtgatcaaccatggcgtttccgcagagctagtctctgttttagaacacgagaccgtcgatttcttctcgttgcccaagtcagagaaaacccaagtcgcaggttatcccttcggatacgggaacagtaagattggtcggaatggtgacgtgggttgggttgagtacttgttgatgaacgctaatcatgattccggttcgggtccactatttccaagtcttctcaaaagcccgggaactttcaggtttttaagtgctctgttttcgagttagtgctctgttttttgctctgtgtttgtttttatagttcatgttctatagctttttatgctttattctggattttttttgtggttacgtctcaagttttgttctttaatcttcagaaacgcattggaagagtacacaacatcagtgagaaaaatgacattcgatgttttggagaagatcacagatgggctagggatcaaaccgaggaacacacttagcaagcttgtgtctgaccaaaacacggactcgatattgagacttaatcactatccaccatgtcctcttagcaataagaaaaccaatggtggtaagaatgtgattggttttggtgaacacacagatcctcaaatcatctctgtcttaagatctaacaacacttctggtctccaaattaatctaaatgatggctcatggatctctgtccctcccgatcacacttccttcttcttcaacgttggtgactctctccaggtttgtcgcgttattctttaagttccttctccggttcctgtttcagaacagaagatctaagctttttttatttattaatattttgcaggtgatgacaaatgggaggttcaagagcgtgaggcatagggttttagctaactgtaaaaaatctagggtttctatgatttacttcgctggaccttcattgactcagagaatcgctccgttgacatgtttgatagacaatgaggacgagaggttgtacgaggagtttacttggtctgaatacaaaaactctacctacaactctagattgtctgataataggcttcaacaattcgaaaggaagactataaaaaatctcctaaattgattgatatatctatttaatctataagtgtgtgctacatacagacaatgcatctgtatattttgaagttaatgttatttgttaatccaataactgtaaaaacatgcaagagtgtgtttgtttgtttcgtaatatcaacatcgctcccatcttttatggataatatcaagttgtttaaacacactgttttgatgtaagctacattttactttatgtgtacatcttattgtgttatataaattatttcaaaataaatatgtcctacacggtgcgtggataaataccttgtacacatgatagtatattgttggatcaaatcttgtaacagttttttcttataactttataacaacattaaagatatcgacaaagacattacaaccgaaaatctcaatattacacgtcgaatgtggtccgagaatttcttttgggcaccaatatgtttagtgatatagacatatatttaaatgattcgtcatatacttagaaattccgccaatctttaaagggaaaacgacttgtcattgtatatatttgccatatgataccacatcatcccatggaccaacttgtatatgttcataacgttgatatataaaagtttataacgacaccaaaacttcatataattcttatttttgccgagtgtcgacaaatgtttttatattcttagaaagttttaaaatcttgaatttgtcgaagttcaaagaaaataatcttcatactagtcttacactcttgggagatatcgaaccggaagagtatggtaagtcccaagtcccaacttgttcagaatcctaaaccggttccaatggcaattacgttaacaatgacacctaattcaatcctcataaagaagatgtaactgatcaatgaaataaattacagacaagtgagcagattttgcagttgaataggaatttgataaattagcttctgtgaagcagcacacaatcattgtctaaatgtttcattactaagaatctatggaaatgatgagccatcatttcgtcgacacacacacttagatcatccgaagttaaagagcacactgctttcttgaaatacacgctactttttatttattatatcacttcatttctgccctttcttcttccataagtcaccgaacatcttcttcccagaacttttcctcttcccagacccgtcatccgaatcatcagccattcccggtgatccgacaaacctgcctgcaaaatgcttctccattgacccacactgctctgagaaccgaccattcatctcaacccctccagataaaaccgcagctgcagcatctgctgctttcctccactgctctgtttggaccttcagcttcttcatctcagcttctagagtctcttttgcttcttccacggattcgagcttcttctttagcttcgctgtggtctcattgctttcttccaattcttccccaatctgactcacctttgaagctatctcatcctctttcgcctttgcgcaggacatttccgtatccgtcttcttcaactgatccttcaaggtctcattctcctcgctaagtgataccctttctttctccaagtcatataatctagctttcaatacattgatttggtcttccttagaagccaattcatcattcttcgtcttctcactttcttttgctttctcatcaagaacctcgaacacatctgtctcttgatgtccatctccaggaatgtcatctctctccggagcaggagtgttcggtttcttggatttcttcctatgaagctcttcttgagcacgtttcttggcagcctcggctttagccaactgctgtttgagcaatctcaactcttcttgggcttgtcctagctgtgactccaagccagagatgcgacttccaagcttcttctgactcagcggatctgtatgaggcccaccactccttggagatctacggtcaaggccgagctttggactccggtctgtaatcggacggctgaggtgatgcggatcagaggaagtggacaacagtgatgtccttagcctaggagattgcctctgaggcaactctgaacctctaatactactcacagatcaaagaagacacatatcagatcatagagactaacaacaagaaaaatctaaatcacatttttcatcaagaattgaagtaaaaccctaaccttggttttggcattctgatttatgcaaagttgctgactctccaaaggttaatgatctgatgaaaacgaaaacattcctcagaataaagcagatatatgaactggtaagccacgcgccactaagtgagagtgagaaactcttaaacagattccactattggagtcaaaccagacacaagtgagatataacaacacattgcttttgcttttactcaaaaacgctttagaagatctaagataacaaacttcaatctttcaccaaacgctttagaagatctaagataacaaacttcaatctttcaccaagacttgaatcagatttctcttgaggaaaagtttcttatcttgcatacacacataagtaaatgggttggtctaattgtagaaactaaccttgaggataatgtagagtactttctggggtttcacctgtggaattgaatacgaagaatgattgcgatatagtcttaacaagtaatgcaagcagagaaataataaagaaggacaaagaggaaattgtttttgaatatgctgctggtgtgattaattttgttgatagaaacaagaacacgaagacaagaaaacccaaaatgtggagaaaagagaggtcgtagctttatgtccagagagagagactctcaattcaagaagcagagagatattgaaaaagtagacgttggaagatttgaaataaagctggtgaaagtgaatgacctttgggggaagataaaggacaaaagtgtaatttacatgtcttggagggtgatgtcccacatttacatgtaatcataatgttttgtttttaattatcttttactacattaagattccgtatctttgcatgatttgattataaaagttgccaaattgtaccaattccttcgttcattggaggtttttttaaaaaaaattctaacggatttctactgaatttcacaaaatgtagtacaaaatttggcgtaaacgacagccaaaaaatgggaaacaaggcaattacacaagaagttaagaaccctaaacctaacatacgagctaaatataaaattttgaatcaaatcatgttacttctatttataaagacaaaaaatggtttaagagataaataatttattacacgcatgtgtgggtacccttatcaatcggtctgacattgtttctttctttttgtcggtttcaacaaagttcaaactcttttcttttagtttctcttcttctttttatattccaatcgttctctttttattttttttactttataaaaccgtaaaccaatatattgatatatgttaagcttaatgtatgaatatacccatttttatatctattattttaggtttcaatgtttcattgtacttcaaatttgggattcctaatggtaaatatcataacactactatatgaaaatggatataatgtacaacattcaagctttatattaaagaaacccatacacaatgttgaaaaacaaaaccccgtaacaatctgtgttcaagatgaaatatcaatcactactaattatttttatttcacttttatgtgccaactatctatttatgttttttacataacattaatcactcactacatttttgtagtataaagtaaaagttgacaattgaaaatagtacagagcaaattgtaagtaaaattcagcgccactatgatttttgattgtaagtagcatctacctttaacttttggttctttttatgatgatgttgttgataattcaagtaactaataagagtactacatatcaatcagtacccaaaagaacaaaaaaaatcaagatactgagttttgggagttgtgaaattagaggtccattattctctttttcgaacataaattcatagaagaaagtaagaaaccccataagacacactaacacaaacattagctgctcaaatcaagatattaaatgttgaaaattagttagctgctagtcataaatcataatccattaattatcttttataatttccatcttataacgaacccatacaaagactctagaagacatatatgttgacaaaagccgactctagaaccctaaacccctaattactgctttggtcaacaatcaccaactttgaccttctcttctccatttagaaatttgcaatcaaagagacacaaaacaagtgatcttcaaattttttgtcaatgcagattgaaaaagaagaaccacaaagaattaaagaagctgtaacacaacccaacctttttctattaaaactggaaatcatttcgtttcttttctttcttcctataggaacagacatatatgaatgaagttataatcatcatcagattcagacccatgagtttccattattatcctatttattgccaggtaacttcagttggtgcacatgtcgtcgtggcatgaacctctgccatagacacagccatagccatcatcatctgttcctcaaaactctctggaacaatgaccagaggtggaggaggaggaaagttgtggaagccctcgcctgtcatgtaagaacttacatagctgttgctgcttcctgtttctcccatctcgtaatgatgacgatgatgatgatggttgtctatgccatctacctcttgttctatgtcgtagtaactgtcacaatttccgggaagcatactgtatgaagaaacgttgacattgtgattatgattgtgactggaggattcgccaaccatttggcgttcagcaagtgcggagattgcacaagaaagcccaccagatgatgaagacggtgttgctggttctacgattggagtcactcgtggtggtgaagaaacataactatgattatctgttacatactgcctagaagaggtaatttcccctgaagctgaatttctctgcgtccctgtttcctgttagaatcagtttaaaaagctatgagagaactgaaaaatttaatatcaaaagttatacaaacaaataattttacctgaacagagagccatattgcttccatgaccatcaattcctcaaggtcaacgtcaacctcatcctccctgaagagtttatagacaaatcaaatatatgaatcactcttcatttctaagtgaatctgtgttcatatcacttagctccaaaaaacaaaacaaaaaaagtctaatcacggtgtcattgtaattcagaaatttcatggttacaactactacattactccatatatgaagttgacaaaaaaaaaaaacagagcagccaatggaaagacagacctgtttcctcgcgggcgggaatgttgtctaacaacagatgcgttctgcgatggagcaatttccccgtcatccatgagggagttataagatatggctgcaaaccaagggacaaaaaggaagcctgtcaaaaccgcctttgtttgttcctgatggaagatttaacacgttcttgcagtaaaaataaaccgacctgaagttgaaccatattccatctcgccagtcattgcgcttgtgctagaggaacatgattcaagacgtttctgcattttctcttcatcatcctgcatttctttctgcctcatccttattttggcttctattacccgttgctcttcctgcaaaaagatacagtgacagaatataccacttgagtaaagcaccatttcatcaaagcttatctagaaaaaagttatgttgtgtggaaattttaagacttacaacttgttcaatgcccttttcctcctttgacttgactccacgatactcgacagcatagttgggagttttacaaaaagggcacctcataaatgtcaaggaggacacaaaagggaaaaaacccatcaaattaataagaaattttctcaaacattaagccaaatgttaaagaagcccctaaaagcttatgcaaaggatttaaaatgaaggatactgagtaggccgagctgaattaggattcttcatttgcaaaaaacactctgcaccaaatgaacaaagaatgccatgtcaaatgaaatggaaacatgaatagaacaaagaagctaaagtgttattgaatgtgttacctgtacaaatgcttttcatgcaacatcttgatctattgaggctaggatagtactagaaacacaagaagcaaatatcacaaagttagatcttacatgacaagaatgtagtagttacagagactgagagaaattcacaaaccagaaaacaaattggacattcttcaagatcatgacagctttcatcgtctccaggatagcaaggagcaagcttagactccacaatcagttttctgagctttttaacgtcgacatctttattcacatacaaaccttgaggctttgtatacctttcttccaccacttgcctcttccttcccaacttattacccatcacaaagttttaacctttcttctactaaaccctattctcctattaccttgttaaaagcagagattctgtttcctaatctcacattaacacctaaaattcaatttgtttctacaatgaaacccactggagaaacaaataagcctaatttctaacctaaaggtacatactttaaattggaaacaacctccaccacataacctgcgcaaatggtaaattcaatataagaacacaattggggcaaaaccctaatttgagagagaaaaaccctaactttggaactaattcaattcggggctggttacataaaacattatcaaaccctaattacgtaatttacgtatcgaagttgcaaaatattccacgaattgaaacagaagaaaccctacaagttctgataaaaaagtacggaaaaagaaggataaatcggagaagaaagaaacctgaaaacttcgagggcagaagaaaacaagagacgagagatcaaacaagggtttttgggtaaacgataagagacacgatcagaactttactctgtagagatagaaagagagagaagagagaagcaaagataatacagtgttgtgtgtctctttcgtattatataaaattcatagggaaaaaaaacagagagagattagaacaagttctgtatctgcaaatttctttttaatatttcgacggaaaaatctcagaagagagagagagagagagagagagagagagagatggtgatgatgtggagaagctaaaagggaacaggaaacgatggagtaagagacgagccaaagaatccaactctttgcttctttcttcctctccacgcgcttctttcttcgcgtgtgtttttcattttcgtgtaaaacgacgtcgttacgtttatttatgtttttttttgtttgttgaccaaaaaaggattagaatatacgaaatcttgtgaaggcggttttgtcttaagcaccgagttggatcagaataatgtcttttttaacattttattctttaattgtatctttgtttgtcgcatttgcataattgtatagtccaatattcgtaatttaccatcaaatttattaatggaaaaaaataaagaagttagtatctttggtgtgttacgagactcattatgtgttcaaagttttggtgatatttcataaactagattagtcggcgttaatgttatatttaattgaatttaaaaatggttcttgttgacgacaatatagcttagtaggttctacttctattagctaataatttttaatagacttgtattgtatgttgacgtataatgtttcggataatcgttgaatcaacccaactatataccagaaaaaaccctgaaaataactaccagaaagctagattaagaaagaacgttaaataaaacaagaattgtagatgagacgattaaaatcgtgagtgtgttttgggttgatgaaaggaaatggttcacccaacacaaaattggttaaggttggttagagaaggttaaccatgagttttgttgctatttgcctcagccatttacgcacttacacaaaaacctgttttatatataaacacaagaagattagttcatataatgcttcatttggttgttgtgaactgtatcgcatgttggattctaaaaattgtgaaatagtcacaagaattaaacagtttttagtgaaattactaattttagtgaaatcaaaattcttttagttaaaaacattattttgcaagaaaagaaaaacatgaaatataaatatataaaaaatatggaaaaaaaagtaatacctagttggacttgggtagcaaagacgccccatagagaaaagcccatagttgaggcctgacttcttaatctgctagtcgctttcaatgcctttgtcacacactcacacttcttgttttgataattggttctaaaacccaaatacacagaaaataagagaaccaagtattaatctcgcatatacttgggcttcatggtccttttaaacaacatatgaaagctataataagcccgtttaaaattcggagacatgggccgtactgaaaggtaactcataattactttccaaaacacaacattcgttattggacctaatctcaagagtgacgatccagttaagatgattaaatcaaatcaacaacaacattatctcattagataaaaaagaaaagattttggaagaaaacgaatgatttaaaaatcattgcacagaaattattaatgactcaatattctgaccatagtttatacaattcttccatgtgaggcatctctttgaataatctatcgaactccgtcgtcgtccccattcgtcctcctccgccgccaccgccgtggagctgtctggtatcttcaccgattttactaccgccatcgtaacaacggccgtcgaaagcagagggcgaatcaaaaggaccggcggcgacgatggcgttcttaccggtgagttcttgaacaacggtcttgaagctacgagcatctgtctcaacatactgtgtgttaatgaacacaaccttcatcggctccgatttcactttccctcttccagacattattactaaattaatcgattagagaaacaagaaaagaaaattttgtggtgttgatgattaggttgatcaaatgatcttagtacttagtatatatcagctttagctctcttcctgtgtctttgggtgttcagatgttttgtagatttatatgcatagttgcatacttaggtatttatagagagattaaagagagaaagatataatctctgtggggtactgaagtgactcattcaagtaaattttttcgtattctttttgaaacgattttataatcgtaatcttgtcctacatgaaaacatatgtgacgacctatttttttcttgttttttttcttcctgacgtcatgatacattttcgacgaccaacgttttttatcatattcgttgaattcctaataaatattttcctaattattatattggccgaaaatatttacggctctagtctagaaatgcttaccaatgaattttatgaatgaagaatttttttgactaattaaagactttttatacatctgttgatgaaacaattactgcattctgtatattctttagaatttaacagcaacggtaaacttaaaacaattttgaaactgcaagaaaataacttaatagtaattatttaaaatcaaagattaactacatataattatttttataacctattgttgagaatattaaacaaggtaactatttgttatacaaagcaacaatcattcaacatttactgagatcaatcgaaaagcacatggctttgtgcatagataggacctttgatcattaagacatgttgaccgttaataaaatctagcagccttgaaggaccaaacattaaaatttatatatcactatcaccatcaaaagtattaaaattaccaaaaatcatagtgtattttcattagattgggtcaaagcacgccttctttgatgaaatcctgttacatcacgtgaaacagcctaagaaaaaactactgaaaacttaccaagtatttacacgtgagtagaattttgcacgtccccccacactatttcgttatgacaaaatataatcgtctttgattatgcttctagaaaatagtaaggtgatgtcatttttttcttcaaaaggtgatgtcttttttttccatcgacaaagaaaacactaatggctttagtttattttttcaagataaaaatttctaatcaaaacatcccaaatggggcttttagttaataaccatgttttccctttttccacagccaacagcatatgaaaattttatacggtttaaaacataaaaaataggaggtaacatatactcacatcattgtaaggtaaattttaaatgtttgcatcttgaattatattgatatatagattttattttattttaaatattgatataaatgagtaatggatcatatttttgtagattttactatttaaaagagattagaaaaaaaaaaaaaaaaaagagattagaagttcagcatgatgcacaagaagtcactgatagttacatacgatgtttcatggggagtttcataaagggacccaatcattcattcaattccctgaatttttgttttgttgactcagactttcactaacaaaattcttctcagaaattgcaaattagttcattgtacggttgtacttttgcgatagccctaattattttcagttgttaccaaccacacaaaaattatattggctttaccaaaattttcatatgaagaataaaattatatatggatcagtttaagccttaaggtaaatacaaatcaatccgttatcatttatcactacactacaacttttagaagttgatacgtaattatgtatagtctattttttgtttgttgataaaatttggtgcagtacgttattgtacgtacagttttgatatcaatattaatagactgatgaacatacaaagggaaagtcaagtttggctataacggatcagagtaaggttttgactacaaatcttgactcaggaacctgactgttttttatttgatcgcctttgaaattaagtatatacaaagtttgaacagattagttattttatctcagcttttaccgccggtaatatatagttaactatttcgactggggtaagttatgtccatttgagtttcagcattttggaatttaactttgaatgaatataagtaagtaattaactattgttctgtttttatagcagataaaaattcaccgaagatcaatttcttttttttaaacaatccgtaatattttactttacaaaattaaattccaatcagattcgaaactatgagtttagcttgttacatcgtgtagagttgtgtcttgagattagcccagcccatgtagcacaagttattgggtttgttacaaaagtgaagcccatatttcccaaataaaatatgggtgtttggtggcgtgttctgttgggtgggtgttatgctacatgggctaatctaaaaagttattcagacccaaattgcccacataaattatccaagccctaacacaactatacacttataaacaactttttagtggttttaattcaaatatttaatacgggtgtgatattttccatgctatctatggtatgtacaacttgtttttggtaaccgatccaatttggttgttgtaattcgaaacctaaattactgcgaaaacactgatcgatccgtacagaagcaatttattgataattttgatccacaaattgttcgacaagattggaacagtttaccttatatactattattctgctcatatttaaggaatttttaaaatataccgttataatttagaatcatatcagcagtcagaaacaaatcaattggtactcttatagaaacacattaattcagaaataaatcaatctgtatgattgacgaaaccattaaatttcaacccaaaatttcagccactgatgtaggtttcttatagaagtgtctagagatcgcactggtatataatacgatggaacacaatacgatactatcattctctcaatcataactactttttttttgtacattgtcaattatcaaaaacaaagaaatggtgtccactatctccggttttagcttaattttgttcatagctgccgtcgctagtagcatttcagccgccccttcagccgctctcgtcggaagaaaagtcttcgatgttcgaagctatggtgctcgtggtgacggcaaaacagacaatactatggtagtgaaatttctagttttgtttttgatccaacttattcaacattaatgttctgaatttgttgattaattctaacacatgtttgacttattgtcttgatttggcgttttaggcatttacaaaggcgtggaaagacgcttgccaatggaaaggattacctagagtgtatataccatttggaaccttctacctcggtgctgtagccttcacgggaccatgtaaaagtcggattagtttcatcatcaaaggaactttgttagctccaaaagatcctaacgccatcaaacaagacagctggattatttttaggtacgttgactatctcacggtttcaggcggcggcatccttgacggacaaggaagctactcttggccactcaacaattgccgccaaacccataattgccgggctctaccgatgaacatggggttccagttcgtgagattctcgagactcacgcgcatcaaatcgatcaatagcaaaatgggccacctcaacttcttctcagtccaacactttgatatcacacgcgtcaacattaaggctcccggagatagccctaacactgatggaatcaagataggttcatcaaaccacatgaagatccaccacgttgacatagcaactggcgacgactgcatcgctatcttgtcgggaaccttcaatttggatatcaacaaagtcaactgtggaccgggccatggaatcagcgttggaagtcttgggaagtttaaaggtgagaagagcgttcagggattaattgttaggaattcaatctttaatggtacgagtaatggagtacgaatcaagacatggccttcgccgggtgaaccgaacttagtttcgaattttcttttcaagaatctccagatgattgatgtccaaagcccaatcaacatagatcaacgatactgtccaaatccaccgtgcagctttcaggtaacttccttaacaagaaacaaggttttagtctttttgacatgacctaatttgattttcttctttttattgtagtctttttcaaagattcagataagagacgtgaagttccaaaacatttggggaacgtcgacggccaaggaggcagtgaagttgcaatgtagcaagaatgttccttgcaaaaacgttcagctcttcaacattaacatagtgcaccgtgggagagacggtccagcaacctctgtgtgtgagaatgttggcggttggataggtggcaagatttctcctccgtcttgcatccggtgatccacattttgagtttttattatatgatcctgattagttttttcgtagcttttattatatttgtaattcctgatattctctgatcactcgtttagtttgttcatgtttgaacccttctaaagggaagtgaagatttgaaagagaacaataaatcttatcaatttctttgatagtaactgttataatttccagctatattctctcgagtagaagaagtttgggccaagtcataaaacataaacgtttcagcggattgtaaaagttgatatctccactcgccttttgttttaattttgctgaaaaacgacgaaatctctggacgagtccagccgttttgtattcgtgtcgttgacgcgctctaggtgcgcgtaggattattttacagttcgcgtctttaatttaagtggcacacggtagtcataattgtgaattagtattcattttgtggcctagtataagcccactatggcccaatataagtagcccattgcatctacaactaattgggtattttcctaactatattttggttcattcaaaattactcttcgcatatcttacgcattttgaatgaaccaaaatataatataagtagcccattaaatccttttcagcaaagaatataagctatttaattgatttattttctttttttgataaagaagttgtttaaccttttacacgactaattaccaactagctccgttatctttactttgctataacttaattaacgtgtaacgtgtacgtatcacgtaatgtatgaaccacatattcgatttccagtggtttcacccaccactttggcactttctatacattcttgcattttgattttcttgttctacatgtatttaaagtaatatgaggacaaaatgtatatctacgaaatacttacgtggatatgtaaacatacactcatctcacgttcagtccgaacaaactactaatgtggatatgtattttacagtaatacccttttgatatgtatggtgacattcgaaccaattctgatccagttcaatcatgaacttttgttctacataggctttttcaagattaacgaactttgggccgagcaactttattagatttggttaaaaaaattcgggaactctaaaatgtgaaaaattgtaagaaaaactagttttctttacatcaatattaaataacaattttttttgtaggaatgtgtttgagcgacacaaaactagtccgaaattttgaaatccaaatataatttttcaaagttgaaaaactgaacttcttttccggcgaccattttttagtttgaaatgtttaataattcgggcatataaatgtttatgtataaaatttgccaacaaaaataatgtatatgtataaaatatatcgtgccatattggggatatatgtgagtccatcagtccatgtgagtagtttcaaccacaaaatgatggacatgatcacctatgggccatcacacatgaggaagctttcacgttttaatttacactactaacaaatatctctacatagagactatagagtaatagaccaattattgcttgtctcatcaaatctcaattccatgctgatcatatgctaaaaacatgtatatgtgtgaatacatatatagactgtgaatggtgacataaaccgcactcaaaaccgtaccgcaacagtgcagtaacagtattaaaatttctacatatatatatgtatctatatattttcgttattatttgaaccgcaccgcacttctcccgcacagcaaaacgcagttaccattcggatccatagtatatgactatatcgtaagctattaattagtcattggacaaaagaccctttgaccaacatgttgttactttagttatgtaatcattgggtttttaatttatttagtttagtccttttcccaatcatcagctgattaatagagggcatatggaaccatttacgtataccatatgctttatatccaataaatgtgttagatagtgttgttcattaatcagaagatctgatacgcagccgacctttgatttaattatgttgctaattaaatcagttgttttcattattttatgaagcctgatatataattattgaataggacaaactattgttaactaaagtatcgcaagaacgcaggtttcagagaattttataatttaaatgaaagcaatttgcagccaaagatccattaggttaagagctttggcagttttttcaggtaaagtcggttggtcaaactctctcaaatgcgtcaacaagtctaggtgctatagcctatatagtgttacaataatatgttttcactatatttttataatttatattgctgcttttctacgtggtatgtatcacacgttcgacaaagaaatatcaaaatttataaactttttattttgttaaaggcttaatttataaactttttttggatgtcaatgttaagtaattttttttatataaacatacattatggcaatcaaagttcatatagtttagttattgctaaatatacaatattaaagcctcacataactatataattttgggtactacatattaagtgtttcataaaaaagatttatcaggtttaattaagtaaacaaataacaagcaacgaccatgttactcataataatggtcttgcgagccaatcatatagttttttgtttgataaccacgccaatcataaagtttgttagttaccagttggattaattaatgtagattgctggacagaccgaatcctacctttcaatggatttcagtaaatccaaagccactattcatctacaaaccaaaaattttaagttattatatttgtttcttatttatatatgttcatttttgccaatagacaataataggtatatatgaatcttggggaaaaggtgacttggttcaaccatgtgcttccatgtggtcacatgaactgaaccatattgcatatatatgtacttatcatattgtaactacatacgtttaatgcgcatatatgcatatattatatagttcaaacttcaaaacgtctgattagagaaaataatatatgattatctatgtatatttttcaaagtatagccataaagaacaataaaatttggtgctcgaggtagtcaaattacaattagtcgaatcacttttatgtagacgcatctctaaacagaagttaatttcaattcaaacatgaaatccattttttgtattattgtgcgtgtgtgttaaaagatccatactatttgttagcgatcgagcaggtcttcggtctcatacatttgatcataattttagttcatgtccaaaattgtataccaacgacgttgcgagaaattggtcaacaatatatacaactccaaggatgttaattaaacgatccacttagataattaaaccatataataatttttcttcctgaaaatcgcaaatccagtattttatatcaaacatttatatcgccaatgcccatggggagtttggtttacaaatctgaagctctgaaatggacacctgaagcctggatgttccgttaattaagaatatattaaaatgattaatgtaattagtggactgtgatgcatctacgattgcttcatttcaattttcaagtgggtgtttactcaacgataatggtcatcaccaaccaacttaagttaatcactcaacctaattttgtataaccgaatcttttttcttttcttcttcttaaccgaatggtccgaatctcttgttagaatatttcatgtatactataagactttattctgcataacccaatatacacaattttttaatcccaatttctctaaataacataatacaaaacttcattggaaaatttacgatagcaatttactgaccacgacagatttgtagtgatgtatgaataatagaagccgtagacacaaaactataacaaacatctcgaggacctaaaaaaaaagaagaagtgaaattactaagtactgtagcaagtgtatgttctaaagttccaatgagtaaaatggctcaaacaaccgattcataaaatatattttcaaaaatgaaacatttatatatacccatggtgtttaacaaattcgtaaaatgtcatacattttcggtacacaaataattttataatctcacttacgcgttgaaacaaataagcaagcgcgtaagacatacattacacttttttaaaatgactggaatgcatgacgtttgggcacattaattatgtaatttgttcggtgcttgtgttgtgtgtattcttcgtcagtgagaacgcaaaagttacgaaccaatttatggtttcaagtcaaagacaattgaaaagacagtttatggtttacgtacgtggtggttcgatgtaaaacgttttgatgtggaggccacaacgcgtcttaaccaaaaagccaattgtcacttccattaccagtggaatacaccaaacctggcctattcatatgtttatatgcatgcccatgttttttaatgtcaaatctctaaattctagttggatttaagtttcacgtacttacgtagaagcagacgaacttcggggcagtacttaaatactattatcagacttaattttgaaaaggaattttttttccggatcaacatcgaactaaaggtatatgattagaatctaaaccaactacatccaggttcagtcgtccgactaattttagtactgcatcaacccgagaaaaaaagtataggttatcgaattttcaactagtctcaggtaccaaactataaggatctggttcaacgtactttacaagaattagaccactcaataataccgacagtctcagtctctctaacacgcatgtaattttattatttaatgagatttgaatccaagtaaaataatttacacatttctcaaaatccaactattactacgaccacaagtaatttggactattaggtataaaaatcacttaaaaactaagactaataattgaataagttcccataacgaatgtctcacatcgttggtatcatctcaattgttaaatttgtttgttttatgttacgtgaaactactaataactgcactttccgaaagaagacaaaacagttgatctcaaatattttgttaccgtccaagaggtagttcttccatccttcaatgacattgtaagcacttctaaaacaaaatctgatcaaaactacttcaaacacttctaatacacaaaaattgatctcttaaactagaatgccggaaaaaaatatatctcttaaagtagaaaaatttctaagtgaaatgatcaaatttattacaacttattatccaaagataaattgtgggagataaacaagatgagccattttattgaaaatgataaagagggacgatgaaaatatgtaagtctcgtcagataattattaggacacgtgttaaaagatgagaaaatagtagcgtgaatgacgataataaccattatttctggtatgtatatatatagccttctgtcccaagatgctcatcactcacaatatggacaaaacacaaacttggtcttgaagaaaccaataccaaaaccccaaaccgcagcgtttaatcaagaatcgactatggcttctactaccttacttccttctacttcaacccaattcctcgaccgaactttctcaacttcatcttcctcttcgagacctaaacttcaatctctatctttttcctcaacacttagaaacaagaaactagtagtcccctgctatgtttcttcctccgtcaacaaaaaatcttccgtctcgtcttctctccaatctccgacattcaaaccaccgtcttggaagaaactatgtaacgatgtcaccaacttgatccccaaaacgacgaatcagaatccaaaattaaacccggtgcagagaaccgccgctatggttttagacgcggtggaaaacgccatgatctcacacgagcgccgccgtcatccccatcctaaaacggcggatcctgccgtccaaatagccgggaacttcttcccggtaccggagaaacctgtcgtgcataaccttccggtgactggaacagtaccagaatgcattcaaggagtttacgtcagaaacggagcaaatccacttcacaaaccagtctccggccaccatttgttcgacggagacggtatggtacacgctgtccggttcgataacggctcggttagctacgcttgtcggtttaccgaaacaaaccggttggttcaagaacgtgaatgtggtcgtccggttttccccaaagcaattggagagcttcacggacatttaggaatcgccaagcttatgctcttcaatacccgcgggctatttgggttagtcgacccgaccggaggactcggtgtcgctaacgccggtttagtttatttcaatggtcatctcttagccatgtccgaagacgatttaccgtaccatgtcaaagttactcaaaccggagatttagaaacttcgggtcggtacgatttcgacggtcagttaaaatcaacaatgatagcccacccgaaaatcgatcccgaaacccgagaactcttcgctttaagctacgacgtcgtttcaaagccttacttaaaatacttcagattcacatccgacggtgagaaatcaccagacgtcgagattccgcttgatcaaccaacgatgatccacgatttcgcgatcactgagaatttcgtagtgattccagaccaacaagtggtattccgattgccggagatgataagaggtggttctccggtggtttacgacgagaagaagaaatcaagattcgggattttgaataaaaacgcgaaagatgcttcgtcgattcaatggatcgaagtaccagattgtttttgtttccatctatggaactcttgggaagaaccagaaacagacgaggttgtcgtgattggatcatgcatgacgccacctgattcaattttcaacgaacacgacgaaacacttcagagtgttttgtcggagataaggctaaaccttaaaacaggggaatcaacacgtagaccggttatctcggaacaagttaatctcgaagctggtatggtcaaccggaatttattaggtagaaaaacccggtatgcttatctggctttaaccgaaccgtggcctaaagtgtccggtttcgctaaagtggacttatcgaccggagagattcgaaagtatatttacggagaggggaaatacggaggagagcctctgtttctaccttccggtgacggagaagaagacggaggttacataatggtgttcgttcacgacgaggagaaggtgaaatcggaactccaactcataaacgccgttaatatgaagcttgaagctaccgtaacgcttccgtcgagagtgccttacggtttccacggaacgttcatcagtaaggaagatttatcgaagcaagctttgtgttagttttagatttttgtaggatcttataaatgttaatatgagtgatagtgattagtgacataggattgttgcctgagggattgttatgcattagtccccggcaacgagtttcttgaattttagttatacgtatatactgtgattatgtattatgtatatactatgatcaagtgtccaatgatccaactgtgtacaaagttttgtagtaaagttttaatttacacacagaatttgttagcataaaaatttatagatttgatcaaaactgatttattaaagatggttattaaagtagattaaagtggagttattgttataaacgatgagaaaaatgcattacttataaaaatagctaaatatagtcgacacactaaacttgattatcttagaaggtttatgctgatatcttttctatattatgtaagcttccccaaatatctctgtgagctgcatgtgaatgaactgtgtagagctagagaagcttcttatagaaggaatttgaccttcgaaaatggaaacccgaaaatatctcatgtgatctctgttttgggaatgaggtctactttaatctttctgatcgttctttgtcttttttacaattatcaacaacttttatttatctgctcgtttttcgtctgttcgttttttgttcttcttgcaataattggtattacaaattacgaaattaccacaatacgaattattgtttttttattcttcttcttttaaagtaagaaatccatatccctatacttatatttcgaaattacataaaaaaactaaccttgtattttataaaatattacttaggaataccattagaaatagaatttaaaggtccaaactaattcagttcattaaaataaacaagtcaaaactttatttatgcaatttaattataaaccaaaaagatgcatttatgggtttaacttgttgacagcttattttattcatgaatttacgttgaggttgttgcgatttctactttaagcaaacgggaaacatctcacagttttgacttgtgatcttttatcctactcttattggttctaaagtgcatacacgtaagcgtatacataagcactcgcatttcacagtagccaatcgattgattctaatctttgaacatgtaatacacttcatggccactctttttttccgggaactatcttttttttttgacatggaaaaagaccattttttgatttataacgtgcatactgctgtgtcttttttctaaataaatagtttttatcaaatatgtaatcatactagggaaaatctcatcaagatcatacgtatttttgtacatgacttttaaatagtatattcgccgaaaaatacgttgatgtctcggaatttgacgcctcaaaaacattagaatatacaaaatcaagtaacgagtttgtaggttgaaactaaaatgccacgtaatacagtgcgtagggtccattcgatgtttctagatcaaagtctacacactatagagacttccagatacagatacacattcgaaatcatcaatgaaaaataacaatttaagtatcttcttatcctaatgtgtgtgtgcttttttttagtcaactattttgtgtatattgtaagatgtatcatgttatgacatgagtatgttgctacgtgtcgtgagatatcgaacccaacgcagatatgagtatgttgagctagtttcttcttatgaaacaatcatatatgtctataatgaatagatcacattatctgcctgaaaaaaatcccgtatattactcgacgaaatataaatacccaatgtagctgattttgctttctctggtgacatatccaatttggctaaatttgttaactagtctattataggtttataatagatctagctatgttaaagatactaaagcatcagttacataaatttttggcgcgagtttatatcttttggaattaaaaataagagaatttaaaaataagaagatcattttgtttggccacaggagttctgaaaggtcaggtatgatttttttcttgctcgctcttatgattttgtttttattaatgggttttcaaataagaaaaactgtttttcgaagcccggttcagatccattgttttttgtaaaatataggcccaattcaccataagtccatgaccaaaacaaaaataagatagaaccaatactgaaccaggatcttctctcgctttcgtgatcaatgtcgccaagcttctcgagatcatgtggtcacgtcaattgtataaatacaattattgacgtaacacaatctctacagttccatcgaaatatctcgaaaatttccagttaattctggtaacgtgaacgtatcttccacctcttcaacctacacagctttctagaaatttggctcgcttttctaagtcctctgtatttttttgcacgtttttcaactaagtttcaatatgaatcatttcttctataaataaatgatattttcatcaggtaatgatacattgtgccgaaataaaacgtcaatactcattagtcaaattaattgttcacataatttaaaactgtgttaatccatccagttattttcttacaacaaaataatcttttccatcaacttttaaaataattaaacgcagtgctaagaaatctaaaatcttgatttagaaatccattatggtttctggtcaactgaaatccataatttcctttaacatccaaaatccaaatttgctactatgataatagatttcagacgattttttttcttttttcaatcatagagtccacacgaatatttgcaagttactatataaaacactataatggtcaacagataaaaaaaaggcgaatgaagatatgttacgtaaaaagaaaatactgtaattataaattattactttaaaaagctttaaaatctggccacatgtttttaaagagtggtgtgacgtaacgactagagtcagcacaatccattattgtatcataaatattctcatctataaattacctaaacccttacaggtagtgtcccaaccaaacaaatcgagaaagacgaacacttacaaaaaaaaatctctttgtgagctttagcgatcgtaacaatggcgaacgaggtgattcttcttgatttctggccgagtatgttcgggatgaggacaaggatcgcattgagggagaaaggtgttgaatttgagtacagagaagaagatctaaggaacaagagtcctttgcttctccagatgaatccgattcacaagaagattcctgttctcatccacaatggtaaaccggttaacgaatctatcatccaggttcagtacattgacgaggtctggtctcacaagaaccctattcttccttctgatccttacctgagagctcaagctaggttctgggctgatttcattgacaagaaggtatcttatttcctttgtgcccttgattgaataatgttgaaattgaacttgggatttcataaaaattgaaactttagttgagtttgctagtgattggctcaaatttagggttttgcttgtagactcgtctttgagcttgtatgggtttgtctgatgttataatattacttgagtttgtagttgttagggttagagatctcacctccaaatttcagatttttcttgtggactcatctctgagctagtcagggtttgtcttcttagatagtttaatgttatgttacttgtgcaatttgaggtttttacatactagtttcgctagtagatatcatctttgagctttgtttgggttcatcttagatagtttgatgatatgtttcttttgcaatttgggggtctctaggactggttttgctttgtagacatcatctttgagctttgtttgggttcgactgagttctgacatagcttggtgttatgttactctgtgcaatgtttcagctgtatgatgctcagaggaaggtgtgggcgacaaagggtgaggaacaagaggcagggaagaaggatttcattgagatactcaagactcttgaatctgagcttggagacaaaccttactttagtggcgatgactttggctatgtagacattgcgttgattggattctacacatggtttccagcatacgagaagtttgctaacttcagtatcgaatctgaggttccgaaactgattgcttgggttaagaagtgtttgcagagggagagcgtggctaagtccttgcctgatcctgagaaggttactgaattcgtctctgagctcaggaagaaatttgtacctgagtaaatatgtttctcttgtcatatggttcggacttaagatgctctctgttttactttcgtgtgttgtctttcttaaataatgcagagcatctgtgaggtggtttgagtgtagagaatgtatgtctttgctgtagcagattcctgtgttttctggatttaatggcttgtcctagtttttatgcattgtaactatgagtttaattaatgatcgttaatctataatgattattaatttgttactttgatatgtaattacgccaatacgactcttctacctgaccaagcttatcacgccaatgttgctgtaaaagacaatagtgcagtttggcgattaaaacctccaacatcgagaatggtaagccggtctggatctaataagcccaaattggcatccataagcccaaattgaaattggcatccataactccatattgtagtcaattggaagttatgtggttgatgtgatcattagtgtcggtatgatcagattagccacgggtttagtgtttcttgccgaatttgaattcggtagatcaaataacattactatgatccgcacagttcatgggatttgaatttgatttacgattacaacaacgatattaacacagaactatcctgtaatttttgggatcgattagtaaattttaaaatattatttcaaaggctttatatatataaagaatttagagtataaacatagataaagcattatgtatttataaatcttatgctgatattgaaaaaataatggtgtatgtgatatatttaatagagtgcaatactctctcaataaattagtatagctgttatcactccttgtgtaaatgcgtatttcttgtacatgcatggtaagtagcttgtcctcgtatgtaccggattgtaatgtttgatatcaaatcaagggaatcacgtggtaaatgtacacccacctaactgagagataataatacaaacaactgtgagtaggtggccacgccaaaagtagagactgatgcagcaactaagcaaagtattacttcactcgatcaactttttattttgttaccttcttataaatcaagtcgatttctatattgtcaagtactaattccattctaatctcttacatatacgtttaaggtttgaatcagagcaaaagataatcacactcttttatattaagtgatgttttcactagttgcacacatatgacaattatttaacaaagttgcaaaatacattttaaatcgttacgggtaaaagcttactgtttaaaagatttatatatggaccataatatgctttgaaaaaagctgatgtgacgtaacgggaatcaaaatcctttccacatcattttcttcccctataaaacaaccgtcactcactccttctctactataacacacactcgcttgttcacgcacaacaaaaagcaagaatatataccactttgtgaacttcagagatcctatagcaatggcgaacctaccgattcttttggattactggccaagtatgttcgggatgagggctagagttgcgttgcgagagaaaggtgttgagtttgaatacagagaggaagatttctcgaacaagagccctttactcctccagagtaatcccattcacaagaaaatcccggttctggtccacaacggtaaaccggtatgtgaatctcttaacgttgtccagtacgtcgacgaggcttggcccgagaagaacccgttcttcccttccgatccttacgggagagctcaggctcgattctgggctgatttcgtggacaagaaggtaactaatcccttttgtgccctagatttcttaacttgagtctgaaacaatgtgatttagggttatctgaaaaaatgagtttggttccttctgacataattcgatgttctgtaatggattcagttcaccgacgcccaattcaaggtatgggggaagaaaggtgaggaacaagaagcaggcaagaaggaatttattgaggcagtgaagattcttgaatctgagctaggagataaaccttactttggtggagatagctttgggtatgtagacatttccttgattacattctcgagttggttccaagcctatgagaagtttggtaactttagcatcgagtcagagagtccgaaactgatcgcttgggcaaagcggtgcatggagaaagagagtgtgtctaagtctctccctgactctgagaagattgttgcatatgctgctgagtataggaagaacaatctctgatttgaataatcttgttgttctcttgttgctaagctgtgttctgtttttgtctttgtttttttttttcccctaataatgcgagagagccttagtgaatgtgtgttgtggtttttatgcatcctaagtatggaatttaaataaaatttgtttcgacttaaagagtccaagtatgaagtcacatccttttcaaaagaacaaacacaagaaaaagttggaattcttttttctttttctacttgtctagtaccgcgtatacgaaaatagtataacacccagcaattaataaagtagatggccacgttacaatcatgcaagtagtggctctgcaaacataagataaaaagaaattgggttctcagccacttttgggaggacatgcagactaaagcactctctaaactccgcttagagggaaaacaaaaagacacctctgatctattatcactattattagggtttttttgtttgtttttcttttctttgcttcttaagagataatacattgatcactaacataaaagctggtcagttcccttactttgaggctttgagtggagactccactacggtgtggctcacaccaacagtttttctctgattatccttttgtcatcaactcaccattcaccgaataatataatttatacgtgtgatctttgtttcgaagatcaatacaattctattgtaaaacatatggtttcggtcattcgattgctagaaaagaactagtcaaagcttcatatcgttattgcattactgtcatcaccattcataagttgtaagaagaatagcaaagaggaaaatttgtatttttcatcaccaaaagaaagatttgcatacctttgatttacactctgcaattgtttaaaaggggactactgatgatatttttaacaagctgaatttagtacaatatagtgatatatacaccattagcagcattataaagctactctcattaaactaagaatgaaggaaataataaacttaccaaaatttaaaattggtttaatatggttggccaaaaggttcagatgctctgtttcgagtaaaaatcaccgccaaagtaataaaacatccctttcactatcctgcttgtaattttttctctcggcagaagatgacatcattcatcaataacatattttataaccttgatttatcagactgctattttctcaaaaggtacttatcaaactactatggtaaaatatttatggtttctataaccaccactagcattattaaactactagtctacgagatatcataacgttaccataaaactaatgaaagaaatgataaaaattccacactttgatatttttttaaaaggtttaatatgattgaccaaaacgtttaataatttcgaatggacatgttacccttattaacagcctaacgatgctacacattttaataagatacgactcaatagaaaaagcttcacggatcgaaaccatggcagccgaagtgatccttctcggtttctggccgagcatgttcggaatgaggacgatgatcgcgttagaggagaaaggagtgaagtatgagtatagagaagaggatgtgatcaataacaagagtcccttgctactagagatgaatccgattcacaagacaatcccggttctcatccacaatggtaaaccggttcttgaatcccttatccaaatccaatatatagacgaggtttggtctgacaacaactcatttctcccttctgatccttaccatagagctcaagctttattttgggccgatttcatcgacaagaaggtaaacaacaagtgtcattaaatttcactgtccttgactgtaatttgtttttgagatccttaacaatatatggagtttgtgggagtttaagttacaaggagtttcaactacaaacctaacagtattagacgagttaaagaaaagatattggaattgaaagatttcagatgatagaactttagggttttgcttgtaactcatttgtgcgtatgttccctgtgccacaaggaacagttgtatgtttgtgggaggaagacttgggcaacgaaaggtgaggagctagaagcagccaataaagagtttattgaaatactcaagactcttcaatgtgagctcggagaaaaaccttactttggcggcgataaattcgggtttgtagacattgtcctgattggattctatagttggtttccagcataccagaagtttggtaacttcagcatcgaaccagagtgtttgaagctgattgcttggggaaaaagatgtatgcaaagagagagtgtggctaaagctttgcctgattctgagaaagttgttggatacgttttacagcttaagaagttatatggaattgagtaaggatctctctaaattgccgtttcctgttctgtttagctatttgttgtgttgtgatgtgtgtttctgataatgaaatgaagtctttgttcgaaattcggatgctttgttttgttgaaattcgatgtttggtctgaattcaatgcatatagatgtaaattttgtatcatcagtttttcttagatcttcatcgttgctaaccactacatcgacgtataaataacactttatcatgatttcccttgttgattgtcttgcatgatttcccttgttgatttatctctttggatttagatcatttcaaaagatacaactgtgtttgtttcgtatttctagcaaataacatctgacttttgagattgattaccaaattgtaaattagtaatattaacgacgattgcaattgcactaaaatttaacaatcacttagattatttgaacaaagtattttataaaatgaaaacattagttaacataaaaaacatattcataatcgaaatataattaaaaatatatgatccaaagataattaaaaaattagtttacataataaatatatttgtaacaaaaaccctttaaaaaaagtatttaagagttaaatttacttgcgtgaaaagcggttgaactaataacacctcttacagacccgtaggttgggacaggatgcttagtccgtccgctttgttttcaatgcattgaaattcaacacttagattttttgaaaaccaaaatattttataagaaaaactttagttaaaaaataagtttacataataaaataatttatacaaaaaaccataaaaaattaatctaaggatttaaatttacttgcatgaaaaacggttgaactaataacacctcttacggacccgtaggatgggacgggatgtttagcccagtttgtttcaatgcattgaaattcaacacttagattttttgaaaaccaaaatattttataagaaaaactttagttaaaaaataagtttacataataaaaatatttgtacaaaaaaccataaaaaattaatctaaggatttaagtttacttgcatgaaaaacggttgaactaataacacctcttacggacccgtaggatgggacgggatgcttagcccagtttgttttcaatgcattgaaattcaacacttagattttttgaaaaccaaaatattttatataaaaaaaactttaattaaaaaataagtttacataacaaaaatatttgtaataaaaacaataaaaaaaacatttaagagtttaatttacttgcgtgaaaagcggtttaactaaataacaccttttacggacccgtaggatgggacgggatgtttagtccgttttgttttcaatgcattgaaattcaacacttaaattttttaaaaattaaaaatattttacataataaaaactttagttaaaactaaaaaaatcataatcaaaaatataataaaataagtttacataataaaaatatttgtaacaaaaaccgcaaaaattaatctaaatattaaatttacttacgtgaaaggcggttggactaataacaccgcttacggacccataggatgggacgggatgctcaatccggttgttttcaatgcattgaaatttaacacttagatttttaaaaaccaaaatattttttataataaaatatccaattaaaataaaataaaaacttttgctaacaaaaaaagagaaaaacgaaaaaaattgaggtaaaaagttttaaaaatcaagaggctaaatcccttaattccaaaattctaaatccctaaattccaaacaagagtctaaatacctaaattccaaaagtccaaatccctaaattttaaaattccaaatccctaaattccaaacaagaggctaaattttttaaattccaaattgatgaacaataacataacattcgcctaaaagacatacagtgaacgaaacagtagacaagtatgttatgaatttgtttcggatagaaagttataccaatttatgatcgagattgtagcgttcgcgtgttagcaaacagtcaaagaaccctatacctgaagaacaaaagaagatgctaagtcccagcgaatcaaaatcaaatctcaaaatcaatttaaagtaacaaaaatctcttaccatagaataaaattaaaggatcctggagagtcttcgtccttacttgcttggacccgagaagagtcactacatgcgagttctgtgacacgcaaaaaaacagaaaaacagagtcacagaacaatgaaaagagaatcgatgaaccctagaagaagaccctaacatatacaattataaatcatcgatgacagaatgaaacagaaataaataataattgaaagagagagaaggactataactaagtaacctgatcgcagatagatggctctctcaggttgagattggtgatcctttagtcgatcggaatcacaagtgagatgagagaatgaagacgacgaacaacaagtgtatgctagacaatcttaatctgggggagaaactcttgtctccgtataaataacaggagcgttgaagaagaaaaggaaatcactaacggctagttatgaaaaaaatggaaattaagtaggggaaaaatgttatttaatacctcaacttacaaaaaatggccaaattaaccgtgaactcgtgaaatgaccgttttaactctcaacaaaaagttgacttctgttttaacttttaagtttgcgttgactcggcctaataaaccaccgttaaaaattcttctaacagcgtaattaacagccgttacagaacatccgttaaggtgatacgacgacgttttgtgctatcaacagacctcaaagtcgacgaaacctctgaaaaacccccaaatcaaaacccaaaccctaaaaattattctctctcaaatttttcgatcaaatctgcattatgagctgcaactcaaggaattcgagtggtgaaagtggaggctgcaattcaggaatgatttcaaatgttgaagctggaggtttcaagagtcgtgggtttcctgttaagtgtaaatgtgggctcgaagtcgtcatgtttacatcgagcacgactaagaaccctggaaggcctttctttcggtgcaaaagctgtaaagatgtaagtagatttgatatgagaatgtgatgttttttgtgtttggtcagtaaaagcttgagatggaattgcaggatcatttgttcaaatgggtggaggagtgtatgtatgaagaggttgtagatgctctacccaaaatctccagcattgataacgagataatcaatgcaaaagctgaggttgcagttgaaattgcaaacttaaaggagctaatgatagagttgaaagaagatggaatgtggagcaaaagagaaattcagagatggaaaaagatgacgaaagtgtgcttggtgtgcctttgttttagtgtgattgcaattgtaatatcaatgttctataagaaaaaaaaccaaaaatttgttcttggttattagtgtgtaatcgaatgggagcttagtttgaatgtgatgtctttgttgtttagtttgtgtttggttatgcttttactatgtaatgacatgtagctttggtaatggtaatgaatttcatttgaaagaaaaggtcaacttcttaaaactgagactaagctaatcatatagagagacaagtgcaaacaacaataagaaaccaagacttagattatgtcataaagacaagttcaaacaacaaaaacaaaccgagaatgtcataaagaaagaaagacatatgtcataaagacaagttcaaacaacaaaaacaaacatgagactagcatatcatgttccacgagaacattcaaaccatggtgcaagtccagcaagtccttgcggttgtgcttctccttgtggttgttcagacacttgtgatgttccacgacctcttcccctctgtctttgtgctccacgagttgttcccctttgtctttgtgttccacgacctcttcctctttggctttgtgtttgtgatacattgttctgcccttgtgagccattgttctgcccttgtgatccattgttctgcccttgtgagccattatcctgcccttgtgacacattattctgtccttgtaacatattttcctgcccttgtaacacattaccctgcccttgtgagccattatcatgtccatctgatccttctacatgcccttgtggttcctaatacaaacattacaatcagtttttgaaacagaatttttgaaaatagaaatgaaagatatacaaacctcatttatccttggtcgacctcttggtctctttggtggacttaaaacagtagcatttttgcatgatttcttgttgtgcccttcttgcaagcagttagagcatgtcatgatcctcttttcccttgacattttgttcggatttgaggaagaggcaacttcatttcttcctttccttcttgcataattgcttggccttccggtattgcctcttctccatggtggtggcaagacaggcagcctattcaatcgaccacacaaaggcatcccttggacaggcctaataccacggaaatatgtttctcgccacctatttcttgtgtagtagtcgttcacatagctttcaaccttctttttttccctattatcacacatgttgcatgaacacatgggatcccaaccatttgccatttcctgcagccgcatgtctttaagtccatatcaacaaagtagccaactccattgacatagatttcatgcaaattatccctggacatgtatctctgtgtattctggaccccagcaatcatcttctcaatctcagcatgagctcttggtgtgaactttgttttgcacctgtcagcaatgataaaccttttagctgtcctaaccatgcattgcctcctaatatcctctagaagatctaatagtggtttccgcctagcttgtctaatggttctattgaatgactcactcagattgttgagattgtcgttgcaacatgtaccggttctaaagaatgctctaaaccatgtaatcggactagtaagttggagagacgtgtaggcttggatattgtacctttttaagtctgcatggtaattattgaactcttatacggtgtagctgcgtgctatcttccaaaatagacgttgtagctcaatgtcgtggttgtcccttttccaattatccatgatgtgttttgaacattgtcgatgctcagcttgcggaagaatggtatggatagccttgactaaaccctgcaaaacaacaaaaaaaacacaagtttagtatgattgtctatctcaaattacagtagatatatgaagggaatcttatagaatagagactaacagattgtttatctgaaatgattgctagatcagtcatttcgcatagccccaagcttgtagagagctatctcaagaaccagtcccaattgtcatcattttctatctcgactacagaccaagcaatacggacaattcgattgtcaccatctcttccaactgtggctaatagatgtccttttatgtcccatttcagaaaagctccatctatccctattacaggtctgcaagtttgtttccatgactccctttgagcttgaaaacaaatatataaccggtaaaatctctgcttgcttccaatcactgctcctgcaactgtctctatgttgaactctgtccccggattccgcaataacacctctgcttgataatcccatatcctagcaaaatgagaatcatgactagcacgtctagctctcaaaacttttgtctttgccttagcacattggtctggagtcacttccaacttgtattctcttaagatctcagcaaccatctcatgtttagtgagttttggattcactctcaacctttcttcaaacaaaaacccaatagatgacacctttaacatcttcgaatgtcctgacctcacacaagtatgctcattgtaataagttcgtatttgcatcttatgttttctcttctcataagagcaacggactctgcacggacattcaacaccctcatcactaacatacacacacttagcagcaacaaccatagcttcagaattataaagtttaatgtcataccttgtctttagggaatacatcaaaagagcaagcttgaaatcttcaggagagttataagtcttctccaatgctagtaaaatctcaggatcaccaagatcatttcgagctgcctctactctatcatcatcttcatcatcagaggacaaaggatctggaatcttgtcttcatcccatatatcatctaccctgtcattgtcactagcttcttcttctccattagcctctggaaaatctctttccatgtctaagttaccatcttcttcgacacctaatccagcagtatcatcttcttctctattagtatctactgcatcatcaacctcatcgcagtcttcatctccttggactgcacagtcatcgtcttcatcaagagcaggaacttcagcctctaaatcctcctcttcttcatctctgattctccttcgtttacttcgtctaagtggagcacgaacttcgactgcatctgtcacatcaacgcctgattcttgagcttcatcgtgagcttcctcttctccgccacaagacgtttcacctaaagcttcctcttcctcttgtccaatttcacgacgagttgattcttcaactgcaacatcagcttcctcttccaatctattttgccttcgtttacttcgcctaagtggagaacaaactgcggttgcatctgccacatcaacggactgacctcgagcttcttctccaatttgatttgcttctccttccggcattggttcaactgcatcgtgagcttcttcttccaatctgatttgccttcgtttacttcgcctaagtggagaacgaacttcggccacatttgccacatcaacatttgatactacattcgcttgacctcgagctttttctccaattcgatctgcttctctttccggcgttggtttagctgcatcttgtgctccgtcttctccgccacaagactcagataccacattcgtttcacccccaacttcttctccaatttcatctctttctcctcgcggtggtgcttcaactccatctcccaccaaattctctgattcgtgaagcattggagatccaatcctcataacgacgccattctttctaactaatggcatttcagaaaacgaattgaagcaattagggtttcgattttgattttgggggcaggattaggtttcgatttgggtttagggtaattgattttgttttgagaatttctattctcgattttgatttctctttagcacgaaaacgaggtcgtaagactataataacagatgcttaacggattaaaacggctgtcaattacgctgttagaaggagttttaacggtggttaattagaccgagtcaacgcaaacttgaaagtttaaaacagaagtcaactttttgttgagagttaaaacggccatttctcgagttcacggttactttggccattttttgtaaattgaagtattaaataacattttttctaattaaacttaataaactacttaagaaaaatgggaaaataataattggaaccgactttaatttcacaatgactcttttgcccttccatcgttgacgacattgtttctccttctctcttccacccatttaaaaacgcaaacttggaaaatggagaactgtttaactacgccaacgggctgttttaatgacaaatgttagactgggctcagtaacggatgttgtttcttgtcactaaagaatacgattcatagatttaaaagtaatccatttactttgcttttactttttcatgtgaagagaaacaaaaaaaagttttgttggtgatcaagtttgtagtgtactagtaaaatagtaccatagtatgtgtgtgtgtgatgtggaaacaaaagaatatatagaaaattttatgttttgggtttcatgtattttcttttaacataaaaacaagaacagataagcataatgacgtaagcagtggcctaagcatctcttaaaactccatttaaaaaaacatatcgaattgaataacattgagttgacttgtttaacattcacaccttgcttgctacggtatcttagcttccaagattcaattaatttttcattttttatgttcacagtcaatagtaataagacatcagcatcgcatacaaatttcttatataactcgactagtttactctataaagaatcagcgattggagtatagaaaaggtttaagcaaaatccatcaaagaagagttccttttcacaataatggcggatgaagtgatacttttggatttttggccgagtccattcggagtaagagcgagaatcgcgctgagagagaaaggagttgagtttgagtacagagaagagaatctgagagacaagagccctttgcttctccagatgaatccggttcacaagaagattccggttctcatccacaatggtaaaccggtttgtgaatccatgaacgttgttcagtacatcgacgaggtttggtccgacaaaaacccaatccttccttctgatccttaccagagagctcaagccagattttgggttgatttcgtggacaccaaggtacccaatccaaaatctctgtttaggtttttttttttttttttgtagactgataattgaaaatatttttgggcttgatctgtgaaatggtgcagctgtttgagccagcggataagatttggcaaacgaaaggagaggaacaagagacagccaagaaagagtatatagaagcactcaagattcttgaaactgagcttggagacaaaccttactttggtggagataccttcgggttcgtagacattgccatgactggatattacagctggttcgaagcatcagagaaactagctaacttcagcatcgaaccagagtgtcccacactgatggcttcggctaagaggtgtttgcagagagaaagcgtggttcagtcccttcatgattctgagaaaatccttgcgtttgcctataagattaggaagatatactgtgtctaaaagtcttattgattctttgaacgaaaaaaaaagtcttagaatttcatctcacgttacgtttctatgttcactgatttctatatgattttgttgtacctttctttctattttcaccaaataatatttgtttcttgtcactcaagaatatttgttcacaagctaaatgtttttaatcgctaacgactaatgctagatccaaaatttagttaatttcatatccaatcaattaaaaaatttaaaaaacaaacataagaaaaagaaattttttaaagaaatccaaaaaagaaacaaaatcaaaattttaaaaactatttttaaaaatcggaataaaaaacttgaatccgagtccttgggctcttgaactgaattcaactacagtggaatggatggtacctacataataataggaaaaacaagttgaatgtttggaatcgctaacgactaatgctggatccaaaatccggttagatttcataccattatgtaaatttagtattcaaaaaaaaaacataagaaaaagcttttaaaaatccgaaaaggaaaataatcaaagttttaaaaactatttttgaaaatcctaattaaaaacttgaatgctaaatctacataatagtagaaaaaacaagttgaatatttggaatcgctaacgactaatgctggatccaaaatccggttagatttcataccattatgtaaatttagtaaccaaaaaaataaaaataaaaatcaaaaatatatattttaaaagctattaaaaatttaagaagggatagaaattgacctgtttcttaatgggtaggtgaatgggctttttgttgggctgaatatgagaatccaatccaatctcctccaccaccgtgtctgtcaccgaatgcttccgttgatccatatctcctgaacaagagcattgaagatccgacgccctttgatgtcaaacaaaacctccgacgacgaaggagagtgagagaagatatcgacagacgaagggaggataagaatcagaagcttcttcttcatccacagcgccacgaaattcgaagatgaaatagaagcaggaatcagaagcttcttcttcttccacagcgatcgtgacctctctcgatatggcgttcggcgatgtatatggatcatcaatttcacggtcacgagagatcagcgtttctctttgtaaaccagtcgaatttttatttagaagagagatcagcgattcgatttgtaaaaccgtcggagaggaaagggaagaattttttagggtttagaagaaggaattatgatttctgaaggaaggaaacaagagacttataggaaacaaaaaaaaagaagggaattgatcacgattacgcttcgtttacaacggtcttatttttctaactgcaattacggtcacgtgttgaaattttattaaggtttcaggtggtttagattaaaaatttaaatcatagcaaaacctctgtcacagaggctctgtgtcaacaaataagaaagtcaacggaggatcagtaacaagatcagaagcaatctctgtttcaacaaataagaaacctcacgcataaagagacaaatatgaccgttgttagcaaatttccttttcctcttaacctaaaaggaaacagcctttgcttataataaatagtcatatcatcttcttccttgtcaaatcaaaattctccataacgaaaacaaaagaaaccttctttcatctttttcttttttctcttcatagatgaaatccgaagcaattctctggagaattcgtttccgatcaccgtggtggaggagtgcttcgccgagacattagggtttgttctggaaactcaactcttggatatattttatggcgttatgatgcatgacaaaggtattcagagttctattcacctatgatctccaggtaaaacattccatctgatactgtaaaaagacatgatctttgttcttttcttatgtatctcaatgatcctgcttgtctgtcgtatagttctgctattttacatctcaaggtaattctttacttgaatttttagagacagaacatcatgaagaaacattgattgttctacagggttatcatgcgttgcaaggacatagggttgctcataagctgtggaatgaagggccgaaactattagctcttgcattgcaaagccgaataagcgaggtagttttggcgatcattcattgtcatttttcagctcaatgtctgatcttgctgtggttttcctcagtttttggaatcgacatatatccaggtagagtatgagctctcatctgtttgaacattctcagtttcccttctctggtgtaatagttgatcaggtttaccggtgaatagattgctgcttatacatattgcttgaattctctttctgcatagcggcaagaattggggagggaatattgttggatcatggaactggaatggtcattggtgagacctctgtgataggcaacagtgtctcgatattacatgtaagcgtctcttctccaaaccatttcctggaaattcaatacagagaccatatgattatttttcagtttttcaaagctatttgagttttcactgtcacagggtgtaacgttaggaggaaccggaaacgaaactggtgatcgtcaaccaaaaataggtgaaggtgcattgcttggagcttgtttgactatacttggcaacataagcattggtgctcattaccggactaagggtgcaattctcttcaaagcccaacaatatcaaaacaggtcaattctcagccttttaatattttcatttttaattcaagtaaaaacaaatagggtttttattcacggatttgttaaaaactattacaacttttttactcgagtttttgtttcaattttgaaattatatattttaatatttaaaaaaaaaatttcaattttttaaaaaatattttagatatactatttttttaagtgttgaatcttttaattttgtgtgaactagttggatacaacatccaaacccctaataggtgttctaggttcaacatggtttatacataatataaattttaacacttgatatttttactaactttttttttaattctatagttttatactactattaaataatattttggataaattatatttttaagtgttaaatgtttaatttttgtgtgaactagttggatacaacatccaaagccctaagcggtgttctaggttcaatatggaggtttacacataatataaattcttaacacttggttttttatattaaaaatatttttatatttatatttttatattacaatttttaaaaatatatttaaaagaataatatctgggaaaaactattttgttttaagtgttacgtttttaatttttgtgtgaactagttggatacaacatccaaaccattaagcggtgttctaggttcaacatggaggtttacacataatataaattcttaacacttggttttttatattaaaaatatttttaaatttatatttttatataacaatttaaaaaaaatatttaaaaaaataatatctgggaaaaactatttttgttttaagtgttaaattttttatttttatgtgaactagttggatagaacatctaaacccctaagagctgttttaggttcaacatggtttatacataatataaatttttaacacttgtttttttaattaaaaactgtttttaaatttatatttttatattgctatttaaactttaaggtttttgtatttttcaaataatattttggataaactattttatattttgaaaataatattttgaataaactgttattttttaagtgttaagtttttaatttttgtgtgaactaattggatataacatccaaatccgtaagcggtattctaggttcaacataatttacgcatgatttaattttttacacttggtttttttattaaaaatgttttaaaatttatattttatattgctatttaaactttaaagtttttgtattttttaaagaatattttggataaaatttatttttgaagtgtttcaattttatattttgtgtaaactacttgaatacaacattcaaactcctaagctgtgttctaagtttaacatagtttacaaataatataatttttaacacttatttttttactcaaaaaaaatatattttttttaaaaaatagtattttggatttaaaaaatataatttactacatctcacgtttctatgttcatttatttcgatatgaaatttcttggttgtaccttttttctattttcaccaaataatatttgtttcttgtcactcaagaatattgttcctctctctttaagacttacaatgttgtatctaggctcatagaggcacaagtcaattttaaaaaaagtctggtgcttgttagaaaactgaaaaagtcataatattgtctccaaacgtataaagtattcatattatgcatttctcaaacaaaaatcccaaacacattatatcaattcaatcataagcctaaatttgatcaaaatttttgtccaataattgttcgttttattgtggctataggcaatttgcctttttccaaagcatgtccacttattctaatcttttgtaaaaaaagataatgaaaatggagaattagattcgaaactcttctttattttggctctatatagtgagtagttaccactctctcttctttcacaccgacagctaaaaatggaggaagagattatcctattggattattgggcgagtatgtacgggatgaggacaaggattgctttggaggagaaaaaagtgaaatatgagtatagagaagaagatctgagtaacaaaagccctttacttcttcagatgaaccctattcacaagaagattccggttttaattcatgaaggtaaaccgatctgcgaatcgataatccaagttcagtatatcgacgagctttggcctgacacaaacccgattcttccttcagatccttaccagagagctcaagctagattttgggcagattacatcgacaagaaggttacattttttcttttacgttattgagttctttgcactatataattccctaactatataagcaaaaaacgaatgatgtattgctaattgttttttttggacaaactgtgatcagacatacgtgccatgcaaggcattatggtcagaatcaggggagaaacaagaggcagcgaagatagagtttatagaagtactcaagacacttgattcagagcttggagacaaatattattttggaggaaacgaatttggactcgttgacattgcctttatcggattctatagttggtttcgtacgtacgaggaggtagcgaatctcagcatcgtgttagagtttcctaagctaatggcgtgggcacagaggtgtttgaagagagagagtgtggctaaggccttgcctgactctgataaggttcttaagtcagtctctgatcatcggaagattattttaggaatcgattaagttcacttacccctgttctgtttttcatgttttttctcattttaaaatgtggcgtgtatttcaagtttgtcaataagtatggtatagaccaaggtatgtttgtggtgggatttgagtgaagctatgatctatttttatttggaatccaacttagcaagcatcgaatttgatcaacagagcctattgtttgagttgaaaccaaaccaatcaaaaacaaaaattcaaaccactcttcgtcggaaaaaagaatgacgaattttatttttatttttttgtcgccaacgttaaatgtcgttgaaagcaaaatttgaaaacaaatgtcaaatagagagtaccaaaacaaaacaagagccacgcaacaagagagtacgtttacatggggacttgtactatgattctttaattatactaatgagccccacattatgtgttacctttatccaataacctttttttttttttggttctacagagtacaagctatccaggttgaaaaataatgcacagaagcattttttttttctttttcaaaagcataaattttcatcacagagaacaaccaaaacgttaaatttcttcattgtaggacgcaaacaataaattagaatccattagcaggaaaaacggatttaacaaaaccaaatggactgtagaaattgtttttgataagaatcaaatggatagtaaaattgcaatgtatggatcaaataatttattacccgttttacctttagaataaatatcgtaagcatatataagacttttttgccgtcaattgttgggtaaaatgaaacaaccaaactttatcttttgtttaaatccataaattctacaaaacctgacaagtttattccaaagtaaggtgtaaccgaaacttataaaagaaaatgatcgacgtgattgatacatataaagatattataatctatgtatcattctttctatcattgaatcttgtaaaactcatggaataataaattatacatttctaataaaacaaaactgcaaaagatgaatatgcatggagttgtatcaaatcctcggaaatataacaactccgcatagtaattactcgaataggtattggtcacagaaacttagaaaattcactgttacgaaataacgttcccaattaaaatacgtttaaaccaatttattgaatgatacgtttcagtgtaataagcttattactaaaggcttttaccaatgcaagaatatttcaaacattattccctttattttattgtaacaaaagagaatatttcaaacattcctattctcaaaaattggacatttggccaaccatcttcacatcatgctaatcagatatagagaccagattcatctcaattactacatgattaatcacttctacaaatcagacattaacagtgtaactaatactccattttgaaggaaacaaaaaaaaagggtcgaaagtccatgtgatagctgtctgtctcgtgctaatctcacagccgttggataagtcgtttgctgacttgaatcggagatttcggtggagtacgaagtacaggataactacccattagtttaaaagactgtacgaatgtcgttttcggtaatacttttggggcttttgaccaaaatgggcgttgaataacccgacccgttaacccaacttatttgtattgttttatatattatttcattgttgagcttattatttgtaattttgtatagcattaaacagaatttttttaatgtggtagttgtttttcatgagataacagaaattttcagatttttgtaatctatattattggcttgatttagcaattttggtttgaattgacacaccatatacttaaatgcatgatttactagataaactgaaaattaagtcattctgacaaaaaagtttatacgaacaatatcatttgtgaagcatggttttgttttagcgagctatttatcagaatttttaatatttgtatcatcattcccaatttcccatagatgaaatcatgaaaatacattttactaattctgtttttttttatataattaaaatcattatgaacaataaacactatcagaatctcaatatattctcctctcaaaacttcagtttttttttccatttgctttagttagaaacaaaaataaagaaacaaatcttaaaaagaagagatgatatatttccatgtatatacaactacaagtatagcataaattacaactcacaacatctaaatttctttcttaaaaaacagttacaacgaaactaaatgcagtaaccaattaagggattaaacaatatacaaattggtcaggaatagaatatataaaggtacatgttcatacatataaacacgcattaattatttaattaatcagagcattatatggaagagaatccatagataaacatacagacaaattatttccttttcatcttattctagaaaaatccaattaaagctacttattatagtcgtatagcctatagtttatataaaaccaaaattgtttttaacttataaaatatctttaaaataaaataaaaagagaaaaaaaaagccattttcattttttcatcatcttcgtcttctccattatctctctacccaaatctggcagagaaaaacaaaagaagaagaagaagaaaaactttcgatatggataagagctgtaactcctccggcgattcctccgccgtatccgcctctgcaacgagtagtaccggtaacaatacaacgaacagagatcattacctgagacaactcaataagctgtctcataagatatcaaaaccgacgaactcttcctcctccgtctccgtcgcgaatcgtgaaattgatcttccacctcctccaccgctgcaaatcaatcaagggaatctccatcaacatcaacctcctgtttacaatatcaacaagaacgatttcagagatgttgttcagaaactaaccggttcacctgcacatgaacggatctctgctccgccgcaacaaccgattcatcaccctaaacctcaacagagttcgcgtctacataggatccgtcctcctcctttggttcacgttatcaatcgtcctcctggtttgctaaatgacgcacttatccctcaaggttctcatcacatgaatcaaaactggactggcgttggatttaaccttcgaccaacggcgccgctttctcctctcccgccgttaccaccggttcacgcggcggcggaatcaccggtctcttcgtacatgcggtatctccagaactcgatgttcgcaatcgattcgaatcggaaagagttctctggattatctccgttagctcctttggtctcacctcgttggtaccaacaacaggaaaacgctccaccatcgcagcataacagttttccaccaccacatcctcctcctccttcctctgctgtttcgcagacggtgccgacatcgattccggcgcctccactgtttggatgttcaagttcgcctaaatctccgtacggattactctcaccgagcatacttttatcgccatcgtcaggtcaattagggttccctgtatctccgacgacggtgccgcttcctagccctaaatacaaaggtcattgatcagaaaatcggaaacccttgtcggtcaaagtgagaaaacgtcgtcgttttgaccgtcgcgacaaaattccctttgttctttttgtacatcattagtggagagtggtgggatcatttgtttttttttttgttaattaactcaaagattacttaaatccgtttttttttttactttcttttgttttcatggtttgttcatgttagaaacaaagaagactaggaaaaagaaaggaatacacttttgcaactctattcaatttttataagtttgccattatgatttcatctctttgtaaatcagattgcatacaagagttttttcttcatcgtctattcgatggggtattaaatttttgattggttgattagctataccaaacacttcactgttcctttggttgaattttatgctctgatgctttcattttaagttgaaacttcaaactctgacgagatcattaatttaaacctgtaaagtgtcaaatgactaacgagtgtctattgcttaaatagttcttttgaaatgtatttttatttttatataatcaaattgatgattgatttcagaccaggtaaagtaattggctttacgcagtccaataaactagtccgcttttaaaattaaaaattgataaacaatcaatctacgcaacaagataagagacaagagactttatgatcttcaaattgatgagaaaagaaagcaagtttcgattacacagacattgaaatcgataacaacaaagaaataagaaaagagaaaataaattaaaaagagataaaaagatgattgatggttcagacttgccacaaatatgatgaatgaataagcttttgaagatgagcgaaatggcaagagcgacctcttagatggattaagaaaaacatatggacgagaaagagaagaaattccaaaccctagaagaaaactagcagtttcactcaaaagatcactgctgttcctcggtcggttttggcgctgctgcttccttgatctcatccgcagcatcatcctaatataatccccaccgttacagaatttagtcaatggaatgcgaatcatccataacagaaacaaagaaagaacaaaggtgcggggattatatgaacaaacctgcatatcagatgtccagagagtgagattgtcacgaagaagctgcatgatcaaggtactgtctttgtatgactcttcaccaagagtgtccaactctgcaatcgcctcatcaaaggccttgacgatacataacaacaacaaaaccagtcaaatttatgtccaatgaggtcaagtgttaaaccaagtccaatcacattatcataattgaaagatgagtagattgaaatacctgtttggcgaggttacaggcacgatcaggagaattgaggatctcgtaatagaacacagagaagttcaatgcaagaccaagacgaattgggtgtgttggagcaagctctgcattagcaatatcctgcacagataattacacatagagactataagctcaaaacctagacaatctcaagatcttattcgagaatacacaaatccctaatttaagtctcattatactggaaatctaacaaaccaccatccacggatcacacactagactcaaataaactagatctgagattcggaatcaaacctgagcagatttgtaagcggcgagtgtatgttcggcggcgtctttcctctcttgaccagtcttaaactcagccaagtacctgtgataatctcccttcatcttaaggtaaaagaccttggaatcaccagaagcagcggcagggatgagtctagagtcaagcaacttaaggattccgtcgcagattccggagagttccgtctcgatcttagacctatattcacggatcgccgtgacgtggtcatcgttaccacggctctcttccttctgctcgatcgatgaaatgatacgccacgaggcacggcgagcaccaatcacattcttataagcgacggagagaagatttcgctcttctacggtgagttcatcgccatcaacggcggcggagactttctccataaactctaccatctcttcgtacctctccgcttgctccgcgagcttagccatgtatacgaactcttcacgcccagacgccattgttgtttctagagagaatcgatctaaggaagaagaatcaaagagggaaagatctgagatctgatcaaaaagagagaaacggtttcgattagagaatcgggtgttgtaggtcaagcgagagaggacgatgaatgagtttttgtgtttaatgagggaaagtgataaatgcgttttagaggaaaagagtgaaatttggaaccaagatctaatctgggccgttggatttgtggccggtcctgctttttaaagggggattttttttcacctcaaattaagaacaacataaatacacttttagaaaaattggtaatgtgattattggataaaatttggtcaattaacaaaataattggtaatgtgattttgctactattagtataggcaccttaaggaattataaaattttgggtctagtggttaaaataggggctagttttttgtagatttgttaatatagttatttactaattgtgaaaagaaattggagttgtgagattgatacaataatggaagcaagttgggttaacaaaaatggagacagctcagagggacacatgtgtgttgtgagcatgtcaggggatccaatggaccctttcttctccaactcagctttcacatttttgtgattgctcaaacggttttttttttcttctttcaaaatttaaatacttcggaggttgtctattcttcaaatcttcaaacattcaactaagtacgtaggcgattcttacgagctttttaaaatcattatgttcttaattatgtggttgtatttgtactgaagtaatttattaaaatactacaatatttgtttttcctttttccgttttgcttaatccaatgcttatccagttatcctaatccatgattatgttttttcctatcttactcctttttgttaatttgttttatttgcattagttttcttgatgattatgttttacattcaatgaaataataagattactctatacttttctagcataaatattaactatacaataacatgtattcattgaacgtatagtcatgatatatctaaagatcatacgttagaaaaaaccgtcatataaaaaaggcgaaaattcggatatgttcgaaaaagatttgtggttaatctagctatatagcgtacgcaagtagatcaaaagtttttgataagtattgagataactcctaattataattagtcatttagataatgatgatccttatctaattagctttcttatctctatgactatttatatacgattctctacttgtatagagaccaatcttcatgaaagtgttaatacaccagatgatttgctccgacgtgttgggtgtgggggagatagggacgagagcatgaatcgatgcgaaacgtaaggtttgaaccatatcgaagtgttcattccctaattgccatcccccttaaattttgggacattcaagaaatattaacagagataacattatctgagttcataacatggatttacgagtggtcgggtttgatcatacctagcagagatatggacgattgacaattgtgtgtttttgacggatgagacgtgacattaataacttatacgatgacacttatattaatgcatgttggtgcatgctcaagtcaacataaaataagaggtttggaagcccaacaattgagcatatgtgggatatctccgaggctcccctgccaataattttaattatcttcccttctttttcattcttaacttaaaaaaacttccgtctcgatgtgatctatgactatgatgagtctatcttgtaaatcatatgattcatattgataacttacggtataagttatgataataacaacaaacgcattatcttatttgtcgtcgactgtcgacaacaaaagatcttacaattttattataagtttctgacaattaactttaggataatattttatttatttttgttgaagtctttaggattatacataaaatacttctcaaataccaacgatcaagttactttaaacttcttccaacgaaacaatcattagttcattctcttatggaagccaatcaaatccctctaaagaataaaaccatgaactttgttactactaaaatgttttctgtacttagtttcgtttagtccttaagttgataaattttttttaccaatctttactatttggagtaatgcgattaaataaggtcgaatttcgatagatgaaccgttaacgatttgacgaagacacttttcctcagtgttatcttcgttcgttgacattagacaataatccagttttatcctattatttcagaagataacgaaaatatttcctttgtcactaagattccgaattctttaaatttaccataagtattaaaaacaatttatacgaggtcgaaatcaaccacatatgtagtagaagaaaccccacaacacgacattcgttaaatgtctctcatacttttccctttatataattgttttgcaataagtttttgatgtaatatgtttaaaaattcccaccacatatcaaatactgcagcgatagctcctctcacaaacacacaaacagagtcaaaagcagtgactctgttccaaaagcaaagcagcttcccaagaagatcaaatccgaaaatgtgcgatccaccttaatccctttttattattattattattgttattacatcacttcctataattccggtaaaagttttatttcccataaacttccaaaaatagttggttcctttttattgaagttatctcttcaaataattttattggttcttctgtcttatgaacaagaacagaggagctctgtcttgtttcctcttatttacgtactaccaatcctcatacacacacatgtgtctttggtttcatctccgaaaagtgataatctgttttatttgatttgacttttgagagaacagagcatatataaagaaacagagcagctctgttttttttttttgtgttgcagtttgtagaatcatggagaggtacgaaatagtgaaggatattgggtctggtaacttcggagtagcaaagcttgttcgtgacaaattttccaaagagcttttcgctgttaagttcatcgagcgaggccaaaaggtctctaactctcttgcacctaattcaagaaatttttgtttctatcacttttgtctgattttgtttatttgttgatgtttatgaagattgatgaacatgtacaaagagaaatcatgaaccataggtcgctgatccatcccaatataataagattcaaggaggtataatacaacaatgtcttctcttttgatgttactttatctatcaaattgataattgtgtgaaaacataggttttattgacggcaacacatttggcgttagtaatggaatacgccgccggaggagaactgttcggaagaatctgcagcgccggaagattcagtgaagacgaggtttaattttatcaattctgtcattattatctaaataaacatttgttttaaaaagagaaagaacctaaaagtcttgtaagaaacatttttcaggcaaggtttttctttcagcagcttatatcaggagttaattactgtcacagtcttgtaagaaacataacattctaacttaatcaaaaacgttttttttttcttttcttgtaaacaaaagaattaagagtgtttgtttttttttatgttggaaaatgaagcaaatatgccatagagatttaaagctagagaacacgttacttgatggaagcgaagcgccacgtgtaaagatttgcgactttggatattcaaaatcaggagttcttcattcgcaaccaaagacaacagtaggaacacctgcttacattgcacctgaagtgctctccacgaaagagtatgacggcaaaatcgctgatgtttggtcttgtggagtcactttgtatgttatgcttgttggtgcttatccttttgaagatccttctgatcctaaagattttcggaagacgatcggtcggattctcaaagctcagtatgctattcctgattatgttcgagtttcggatgaatgcagacatcttctctctcggatattcgttgccaaccctgaaaaggtaaacaatgttctctttcgatttcgacttttagatttttattctaattaagatttgattgtaacagagaataacaatagaggagataaagaatcattcttggtttctcaagaacttgccggtagagatgtatgaaggatcattgatgatgaatggtccatcgactcagacagtagaagagatagtgtggatcattgaagaagctcggaaacctatcaccgtagctactggactcgcaggtgctggtggctctggtggaagcagtaatggtgccattggaagtagcagtatggatctcgatgacttggacacagatttcgacgacatcgataccgctgatctcctttcccctttgtgaacaattgtatcaaaaaccaaagatttcatgtttctgaagcctgctgatactactacacattgatgatacacagacgtgaatataattgttcactaaaatgtataattagagtgtgaaaacatttgtctttgattacaaaaatgttctgttagacatttttatacatatgcatggaagatgtatatataaacagaaacataatatctagtcacgttatataacttctgaatgaatgatagttctgtgtgtcaaggtgaaacataattatttttctgcaatttgctagatacaacaacaacacaaataaagaaacattttaaacggaaaaaaaacataaattagtaggtgttaagtagactccaaacagtttgctcaacttgttcccatgattcagcagtccgaagttcgtcccaaatactgaatattgaacccaacacattttcttcatgtaatatacagtaacacctgaaaccaacaatcacagttacttaaacaacataaaaaaggctttaaggctattcttaaccatgtttacgacagtttactacttacattgtacggtaggatggagacaatactttcttcctcgtactgtctgctgtttttgttgttccgttctctgaagatctacttctgattaatggaagtccataattttctagaagcttcttaagaagatcagcgtctcctctaaagacgtccaagtatattggtatcaagtcgcagatgggatctcctgcaatttcctcaactctttcagaaatttcggcatttggattatgaatttgggagatatctcgtagataagacttacctatggttaaatcgctgaagtcaagaatatgactgggacgccatgagttgtgttgaccatcaactgaatcatctgcgtatggttccatgtgaatgttgtcatccattacgtctgagtgtatccaggtgcagggcttgatttcatctccaccatttgtctcctgtgataccagaaatagattatgttaattcgaatggtttctggaaaaaaagaagaagagaaagataagagaagcaaccttgaagacgtggagtaaatctacaaaaaagtcatcgggaatgtattcgtctatcttggtcatcagagcccgaggtatcggatttcccctgagaggttcaaacaaaacaattaccgtgagtaagcttttatcaagagcaaagcaaatggaaacaaagtcatatttcagaaatttcaaacttaccagttttccagacgactagtgacgtccttcttcttttggcacagagcatcgacaaaaactttccattctgctggaatgttcaactcctcatgaacagcattcacattcaacaactccggacgtgtgaccggtggatatggaagtagatgaaggttgcgtagttgttgtccgagaaagaaagccaggttctgagcgtcgttccaggttagatcatctcttctgcaacaacagtttcaaattagagatcatacatctggctttaaagatgagtcatgctaaataaaaaaagaggaaaagaaaactcacagttgggcaaaaatcttccctttgcatcttttggttataatatatggccaaacatgtgaactcaatgaaccaaaagaatcgggtgctggcttcccctggtttttatgttcacgtagcgttttattccaaataccaaatgggaattcgctgtttaacatggatgcatcaaaatcgaaactggagctagagataatatctgggattctcttgccatcccaagggacaactttgtaagatcctttttcgaagaaaagaatcccgcttgctagaacttcaggaatatgtgttttcaaaggagaatcagcccggccaagaatgtcataaaactcaagctgcagaaaagaagacatagagttacaatcataatgattgcacatattgctaaattattatataaagaaaacttgcctcagtaccaagaccgtacatagattgttctagccctccttcaacaaacagtttgatcgcatagtcagacaacagataaaccttacagcaaaaataagcgaagtcagagcaaatagatgaagtaattaggaatagtgaagaacttttctgcgacggtattctaaaagagacaataaactcacagggttgctgccagttccaactggaagcttttcatcttcggtaaccaacggcaagttgtggaaagtacatacttcctctaggcatcgcaaccatttctcagcatttaaagcaatgcatgctccctaacatggaaaccaaagcgaaagttctaagaattgatgattttgagagatacttataaagctataaacaaaagagtacagattcaaatagtaggattcaccttccatattagttctctcatctcaggcttcagaacccaaagcttggatagccaggctctcatttctcgttggcctacagagttccccattgaccatgggaaattgtaatgatctctttctttatcaagaaatgaagcgaggaaatcgatatcatatgaaaatccattcttccacatattatatctcttcgatactccattcacatcctcttcgcggttttcagtctctccacctccattcatccgtgtcctcttctctttcctggtaaggtctgaatagctcaaagtattatcttcttcatcgtgtgtttcttcttccaaatcttcagaattttcatcatcaagagcaagaagcccagcacggcaaactcctttgtgatggtaaccaggcgccatatccaagcacacgaacccaaagttttctttgttcacaaaattctgggtaacagccactgttggttcaagattaaggatacagtgccaccaaccacttggaacataaatcgtttcgccaggtagtagtgtgcactcaatcggtttgtcttcgtccgcaagaaggggataatagtctagccaccactgtacagggattgaaaacattaagagggatacagtaaagacgaatcaaaatggcagtgcttaaacagtttagcaatatacctgcagagatgagggtgtatcaatgctgacatcaccctcatcttcattgacatggactgtaacacctagaggcacttttccagggggatacaatgcccacctatttaaaacattatgacatcatcatcagaatgagaataatattgcaggaaaggaagaaaaattatttgtatttttgtccataaaggtgtctaccttttccgaccgcaaagcagggtgttccaggcgctggtaagagctgggtcaacatgccaagatgcaccagacctctccggaccaactataagccatctgtatggaggacgactttccttgtctaagatctcaaaccaatcttcttgaaacaaatggggcacactatagtctttcaataattctggagcagcttctccaaactacatgaaatgttgaatccttcaaatattctcaccacaaagtttcggtactactacaactctatcactgacgtgaatgaagtctaatataaatgacaaaactgtttctcgtaccttgtcatcgaaaacgtatagaggatcttcatcccgctgagttttcatatatgcgatgtaatccttgaacttcatggaaattttgttggggctcctctgagatattctaaacgggacttcaccatatttctctgagagttggtcgatagtccacgtattactggctggccaagaatcagcaaggccagaaagcaaaacctaaatcatagacaggaacaacatcacatatctgaaaatgttttaacagatcaaaatctcatgtactagcaaagattggaactttacaggtttcttggcgtcgtattccttagaaaactcatccaaggagatatttctcctacgttccacattcccattatcaaaagagaacccgtcaagagatgtattacacctatagaatcgtttatacaagtacaacgacatgaatcctgtaaaagcgcagagtaagtgagcaaaaaaaaaaaacgatcatatcataagagtatggaataaaccaagtatctaccatcaaaatgaaaacattttctgtatgcgtcattttcttgagtaactccttctctgtatatcagaaaaccaatcagtcattacaatttaaagataagcaaagcaaaagtcacatatctaaagacaatttgtatgtatcattgaacatggtaatttcaaagtacttacagatgcaatgttgtttttttccaagaacctttgtattcaagaggaccttttgctcttctgagacacaaactcatccacaatggttcttcattacatagaatatacatcacactgtacatcaaacatatacacataacagattaatcacaaacaatgcctcaacaaaatcctcatctgttcataataagaccaaaatcctgacttgctaagaattcgaattgatctagttagactctagttttgatcaattctttgatgttaattcgatcaataagttaatcttaggaagagaattatagaaaacctgctgacacaagcgaggtgagcaatatctcggggagcaaggtattcgagaagaacacagatggtctcatctggtagaacactgagactaccgagagcatctggtcggcgatctctttgtcctaacgtcgtcattggctataagcttcaatggaatttcgatttctctctctgcgatctgattgcttttttactacctggaattttgaaaactcaagctttttctccacgcggtggcgcgtgatgatccgagtcctcgtttcgtcaccgagtgcgcgtaaatgctttggcgcacgttgtacgcgttaacgatatcgaattaagttacggcgtcgtttcaacgatagaatctgataagaacctcgcgtttagcttacgcaaatcgtttctaaaaggataaaaagaggaaacgcaaaactcgggaacctcaataaataaaacgacgacgttctaaattatgggccttacgacgcagataactaaaacgacacgtagtctttcaattatgggccttaaggcggcaattttttttttttttttttgaaacgagccttatggcggctattatataatcacaaaccgacaagtattcttcctcctcatccaaaactataccaagaggttccaaagtatcactctctcttcttccactatcaattatgggacgatacactcaagttgagtgactcaacgttgcggaatccatcatcatcatcatcgtcatcgtcaaaaggatggaacaacatggcggttctagctcacagaaacctcacgcaatgtgcataccttatccagcacaaggccacatcaacccaatgctgaaactagccaagctcctccacgctagaggcttccacgtcactttcgtcaacaccgactacaaccaccgccgtatcctccaatcacgtggccctcacgctctcaacggtctcccctcgtttcgcttcgagactatccccgacggtcttccttggacagacgtcgacgctaagcaagacatgctcaagcttattgactccacaataaacaactgtttagctccattcaaagacctcatcctccggttaaactccggttctgatataccaccggttagctgtatcatctccgacgcttcaatgagcttcacaattgacgcagcggaggagcttaaaattccggtagttctcctctggaccaacagtgctactgctttaatcttgtatctccattaccaaaaactcatcgagaaagagataattcccctcaaaggtacgaatcgattgaagatcatcaactgaaaaattctcaattaacaatttcgaattccatcagattcgagtgacttgaagaagcatttagagacggagattgattggataccgtcgatgaagaagattaagcttaaggattttccagatttcgtcaccacgacgaatcctcaagatccgatgattagtttcatccttcatgtaaccggaagaatcaaaagagcttctgcgatcttcatcaacactttcgaaaaactcgagcataacgttctcttatctctgcgatctcttctccctcagatctactccgttggaccgttccagattctggagaatcgcgaaatcgataagaacagcgaaatcagaaagctaggattgaatctctgggaagaagagacggagtctttggattggctagatactaaagctgagaaagctgtgatttacgtcaacttcgggagtctaacggttttgactagtgagcagatcttagagttcgcttggggtttagcgaggagcgggaaagagtttctctgggtggtgagatctggtatggtcgacggagatgattcgattcttccggcggagtttttatcggagacgaagaatcgaggaatgttaattaaaggatggtgttctcaggagaaggtactttcgcatccggcgattggaggatttttgactcactgtggatggaattcgacgttggagagtttgtacgccggtgttccgatgatctgttggccattttttgctgatcagttgacgaatcgaaagttctgttgcgaggattgggggattgggatggagatcggcgaggaggtgaagagggagagagtggagacggtggttaaagagctcatggacggagagaagggaaagaggttaagagagaaggtggtggagtggcggcgcttggcggaagaagcttcggcgccaccgttgggatcatcgtacgtgaattttgaaacggtggttaataaagtccttacatgtcacacgattagatcgacctaattgggctttccgtatccaaataggcccattagaaaaggcctgtttgtttccactatcatttgggctggctttaatgacaattttaaaagatgtacttacaagttgcaataatctatagtgttcttctcacttggatcttataaattatgagtacatatccatattgaaactcccaagaaaaaaagtggatataaaggagaaaaaagatatatgaaaaagcttgaatacgaatcatgtagcaaaaaattgaaattattagaaataaaataaatgagtaaaaaagaatatgaatagctcaaatttttatatatattccgtcagaaaaagagcaaaatatgacaagagatttatcttgagccgtctttttaagtttgacagtgttgagtctgtcttcttggggctcaagtcattgctctggttgagaaataaatgaattagctgttttctttttttcagagagagagaggtaaaaatgtgaagattgtacaaattgggaaatgagagagagatcaagaagaaataggttctttggtgttgcttgttgtgatttcaggagcagtcgttgttgcttcgccttctgcagctggtacttgttgtggtactgcttcagattctggaggaaacaaaacaaaaaacatataaaatcagacaatatatagtgtattcctactaatgttgcaaattattctgatttaagtagatgaataatttatgcaatgatcaatatatgatcaatagtgtccaaaacgaatatgcaaatatagacacataaatatatcgttttgggtagaagttgtcagtgtatggtggcttcactggcatgacgattggcgaccaaattgacagatgatagaagagacacatataccaatgtaattgaaacagacagctcactccacatgctatcctttattcactgttctctccaatcattcactctccttttcttttccatttcaatcccttctttttttttttgcttagagtgcatcaaatatatgtttctttttcgagtttaagacagcaaaacggatagatcacgtgcatgaatgatcaatgcaatcacacgtggtgatgaacggtgtcgtttgaataagagggacaacaaatattatagagataaaacactgaactatgtaagttgttaggaattttaactcaaaactatttatattaagagatttgatgatttctgtctattgcattagattacattttattttagatgtgagatttctaaaaaacgtattttcgataaggtggttcttctagtcatcatgagatgatactttttggatcaagaacacactctatttggattaacaatctagggttatgatatcgtgatcaatgaatgcacttttttaaaaaatatatagaggttttgatatcatgttaagttatatgggtttctaaattaaaactaattagtatgagtagacaactagaaatatatccaaagaaatatgaaaaaaaaaaaggaatttattaagtacgtaccggtggaagaagatagtactccttggagaggaggggcaaaagaggaattggatgggtaaacgaggaaagaaggagaagaaaaccgttgatgatgatgttgttgaggattatatggttgaggaagatgatgatggtgttggtatggtactctaggagcttgaagagaatagccataatagtatggagaaggcatgatggttgctcctgatgatgatggtgatgttgctcctcctccataaagctgttgctgctgctgatagtattgtgcttgttgcaactgtgtgttgtacaatgcctgtggcaagtatatgatcatcatcatcatcatcatagtcgatgtctatgtttgcaacaaacatgcatgtgctagtgtttttcatgcattatgtaagtggtcgacatgtgcaagatatgttgtacgtaaaatctattattaatttcacatcttgcactcatgattaaatacgattttgctttatgttcatctttcgtatatgtgtatgtcagtgagagaaaaagggacttacttggtggtacccaaattgatcagggttataggtgtacctgaaaaaacgaaaaattgaatgattctctatcaagaaaaaaagtgtataattttacaaattccggttctacttattaaaatttaaaacatgttattaaaaaagaatagaaataagaacttccatctagtattacattcttgcacgttaatggtttctcaacttccgtatcggactataatgcattgcatgattttttatctacatgactacatattaatgttatcatatttacagcctgacagcaagtggctcaattgacgcattaaattgtctcctaccatatctatcgcaatggaccatctccttatgagaaaaatgcatttataaggattttagatttttagaaattttctaaaaatcgatatataagattttacccgtacgacggatacatgagctggggagctgcagccggtggcagtggtgcagccatcccggtataggttgatggtcctccactttggtactgactcggacttcctgtttgtcctcgacctatatagtaaacaaaaggattgaaaaagatagtacattgctaaacaaaacaaaacaaaattgtcgccgagtacattgctcatttaggtctcaaaaactagtaattcaacgatattaagaaaaatgtttgtattcctttgacccaaaaaaaaaaatgttcatattctcaaaattggatttgattggttatatttatgttgtacactacgcacataattaacaatgtacttattttaatcccaacgagtacaactaatctcgtttatgttatacacgatcaagtatctttagaaaagaaaaagacaattcttgataacgtaccaaaccattaatatatcgtgatcatatagaaactcatcaaataaactaatcctcccgacataaagaaagattttacggaattactcaagtataataaataaacctcgaggcggcgatggtcgaggccgtccaaaagatgcaatattacaattggcttttcttccgtcgatcaccggatttggatcagcgacggctctcgtggctgagtccgactcccgaaacgtcacctaaattaacgatcggagtaacccttaagcataccaaaagagataaaaacattgtgtgaattaagaaaatataacttacgaatccgtagcctttagacttgccggtgtttttatcggtgatgatgacggcttcaagaatctctccgaactgttcgaagtaacgacgcatttcgtcggtaggagtttcccacgctaatcctccgacgaacactttggtgtaagtcgtgtctccgaacggtgatcggtagtagcttgtttgagacattagttaaattaatatcacgattaacaaatatggcagtctccaatgatgatgatatatgtaacccaaaaacagataaaaattgaataaataaataattatggaaaattgtgtttgtctaaaacattagggaaacaaaaaaaaaagagagaattgggatggacaaagttggctgatctttatatcatcaaaggttgtttttggttgggcaaagagaagagagaccaatcaaaaggttgcaaattgcaacccttgaaacggtgtcgttcttgtcttcgaccctacacatatgaagagaagagagaagagggaagagagaagatagagaataagatagttttgggacattttagaattgagattggagggttttgtaacaaggaaacggagagagagagagagagtgtgacaaggcagcacttgagtatgtcttcgctgtctaatttgccaggttttaacattatagctcctccacaactttttattcagaaatcttctttttaattataacgacgttcttctgatgtatatatatttaatatttttatgtaatatgcagatttaattctttcttaactatatatcttaaatactaaaggtacataatttaccagatgtcacgtagtttttgttatttttgaattagtataaccaacggtagattttgaaaatactcatttttggatgttattagaaacaaacttataatgttaatactgattcttacattcttcaatcaaagattggagaataatgtatgctataatgtgtcattattagaaagttattgaatattttgatgtttctaattgtgtagaatttttaggggtgatttaaggaaaaatatcttaaatccttgtagtaagtagtatttaataatatgcagattttgtcaaaactacagttgtttgataagttctatattttgttttatcatttcccatgttcacttttgagttggtctcttgttctcttcctcctgcttgtctctgtaggtttcgtgtgatacatatagaccaataatagttatatttcttttcacatgaaattaatatatacttttctatattagtttagaagcatatgtatatttttttgtattgaataatggaacttattccctattctcacatgctaacatgtacttaaccttcctttaatcattagcttactggaaagctagctatgaacggacgaaaaaagaacagtctggattttagaattacattcttttagttatctctattttcaatacagttataattctaaatttaaatatttattttagaataattattggcataatttcgtgatcccataatctgatttgggtatattatcataaagaaggacatgtatagctaactgacaacccgatcttcatattataaaaaataattaatatatatatgcactcaatcatattgttaaaacgatgtaaagtgtgtgtgtgtcaaatatcaaatatttatttaatgattaagccaaacagattttgtgatgagttttcatgattagtggaagtccattattcttcctaccaaaccatataggaaaataaatcaaaataatattgagtattgacgaagaggctcttgactttcggatagatccctttaaagatttctcatccttcatattttacaactctgaaacgataattatagtgatcatgtagtcatgttgaatcagccataatatttagtgtctagtgcaatattattaaatacatggtccttactccttacttattaataaaatgttttatatgtatggtttcaagccacgatagttggtgtataatccaaatttaacattcttagattataggagacgactctatctaaattaatattctctctacatgcaccctatataaactctcttaacattattaatttaaaatttaaaagtacaaatgtgaaatgtttgaccattgagttatctattttgtttgttttagtgatctaaaccttgtcgttaccatgttcgtcacacaatgaaattgctaaaagaatcatcatctgtccacgaattatttatctagaaattaacgatttcgattaacatattgacttatctaactattttgtactccaaagtagtaccattatgtacatatatatatatatatatatatatatatatatatattaatgtgtccttgccgtgcatatgtatgtgtgtctagttgcatattaagatgaaaggaatatatatacatgtaacatgttgtaaaagattacatgagatgagcttattgcaaagcagctttcatagacgcacgaccatccttattcctcatcattattttaaatccccttttccacttttctttttctcactatgcccaaccctgtataagttgtattttatgcataaagattacacaaactcaatatttataagtgtaattgtttcttatttacaaacaaaaagacattaaaaagagaaactgtagaaagaaaggcttgaaaaggctttataaactatttatgaaaaacaagctagtaatatattgtttaaatgttttaacaaatatatatatatatatatatatatgtaccaacaattatccatgcctgcttattcaaatatcgtccaagaagacaaataatttttttttggcatttgaagtccaagatatatatttgatatatccatttaaaactttgttttaaacccaaagaaaactgtttcttagctatacttaaacaaataagcccaaacaaccaacaatgcttaatcaaatagacttttgaaagtctttgaatattttttcaaaatgcaaattaaatattgttgttttgagatagtttttagtttgattaagaaaacgaaatatggagacaagtaaagcaaagtaggggccaggaaacgtggcaaagagaagagacagttggaagcaagtttagagaggagaaagagagagagagctgtaactgtaagaagaaaattgggaaatccgaaattccaatgaactgtctcaacttcttccacgtggacttcctgtgatgcttagctgctttcaaatattttgttgtctcaatacaataacgtcatcgatgaattaaactttttattacgacaataattgctttcgaccttttaggcaaattgagaattccaactggtcttaatcggcttataaaccacaaaactgcaacgttttgacatattttcagttttctttgattgaacattttccatttcaaaaccaaattcgcaaacaatcaagattcaaaactaaaaaaagaaaaaaaacactttgaaggatatataaaaaataaggttcgaattatggtatctggggtggtggcgcagttggctagcgcgtaggtctcatagctactgagtgatcctgaggtcgagagttcgagcctctctcaccccatttcgttttgtgtgttgaaacaaaaatgtttaccttcttattggagggagcccgtatctacacaatgggcccaaattattgactttttcttcgttaattgaagccaatttattaatttttcgaaattgggccactaagaagcccaccaggtccgaaggctttttttcttcataaatgaggaaatggctcatccggtcatgtcatggtcatcaatgcgtcacaacgcaattatgcaattattcgagagagataacaattaatgatcaaaaaagattaaagcatgaggatattggcacccatctatatcacttgtaaactcgacatatacatatcactcaacgatatgtctcattagtcattatctctttcttcaatactctcacatgttccctaagttttcattcgtataaatttgtccctacaaacaactacacatttaaagaaacaaccgtcacacccaaatcggttaaaaattcattcgccgatatatctatctatccaaaaacaaactattttttattcaatacaatcgttttaattaaaatctttcaattcgactcactcaaaaatttcatcttgagtgttaaagaagaaccattaatgatcggatagtgtagttagaaaggggtttgtaagttataagagatccacatgaggaacttaagagcgggtgatatattgtgatatatgacaatgccttttataatattttgacgtgaaataaagagagaagaggagccccaccaatgttaaaagaagtcacatggaatttctacgttaactaattaaatttactattcatttcataattattcctttgagaattttgcaaaagcccctttttctttgatatagtatggtccatcacattctctccaattgatcatttatgatttgtgcctttccatcgttttcctacgataatacttttctcaaagttaattctatgacttatggcagatcatattactttgtcgtctaaagcagtttctattttcgttttacaaacatgttttggaatttgtttaacttttgaaaactttatcatagtactttatgaaactaatgtcgatgtaattaccaaattagtggaatgacggaaaaactagtgttcgggtttattattattacgatttcaatcatagctacgcaggtcatctttggcgttttgagtgacaagagtcaagacacaagtctagtcttaaaatggatttatatttttaatttcaatgcaatgcggttctatatatctagtttgacaaaaaaaaaataaaaaaaaaataaaaaaaataaattcaacatgaggggacaaaagatggatagctatcaacttctggaaaacgaaatgtcgacttggaattacaaaacttggattcgagtggataataatgaagcctttgttctggccgctgtagattctaatcttattctatacatcgaatagttttactaatgataagtctgatcttgtcgccactaataaaataaataaaaaaattcttttccaatgaaatatctcgacggtaatgtgtttatttaatttgctgcgttttttacatatttgatttttgtgtgaaattctctcatgaatgaaacatgtacagtattgatggtaagtgcggaattccacttatttaacatatcgtaacagaaattttgatgtataacccccctatatatagtataatatagagagtggtggatttggtagctcttaagaccaagttagttgaggaaattaggtgcaaggttctatcaaagatgtttacatatattaagaaatgcgaaattccttttgttccatgcaattgggagtttttttttttgtttgctgatatccaatattcatatgtatatttttttggatttacagaacatagattgaagtacccgaaccttatcaatcttaatatatcatattaaaaatataaaaagaatccctcactgtctttgagtaaacattttcatttttttcacttcacatttttttttttttttttttttttttttacacttcactttgttaatatgtctgggcttggactacgcgtgatggactcatgagtttggaagtgcgttgtcatgcaatgatttctataatcatattgatacagtgtgggtttgtgttgataacaaaaacggattttcttgctgtaaattaagaaaaataaaagaccgagggggctttcatatgaacatcagaacatgtatctttttacgaggtattgtcacgtaataataaacctgggacatgcatgtaattgtcataactcggaaaagtgatggaagccaagacaaaatgacccataccatattgtcgtctagatctaccgtcacacacaagacgaatatctatgtaattatgtatattatatagtacacaagaactagttcgtataaatatctcgtactgcaaaaaggtaaaagcagttactaagagacgtatgtctctagtcatgtacgatatcttcttgtaatgatttttgtttttggcttataaacaaaatgtcattaatcagtttaagtatatatcattggtacagtaaaatttataagataaacaaaaacgcgttaaaagcaccatttttatgcttacgtttgtgatttagtccattgacgagtaaagaaaagttcatctgaaaaatgccgacagatattatataataatggaggaaaaaccaaaataaacaagagtataatataacgacaaaattcgaaaactttttgaaaaaaaaatacacaaaataagaaaaagtttcgtataatttattcggacagcttatatgaattggcaatatacataacgtagtgaaatcgtttgacttttgtcccagctacggttttagacttctagttacgaattatgatcgccttttgttggtacttcaatatcaaaagcatacaaatattgaaccaggtccacttgtgctataataaaacaaaattacttggtgttaaaatgtaggaaatacagtgctgctaatatcgagtaagaaagagcgtagtgaggttaggaaatagggcactgacattaatggaaagacaacgactccacattatttacctataaataagttctagatccactgtatatcgaattacaactaattaattataaattgtttcaagtcaaatgttgggttgagatccacgacacatggttatgtaatgtggaacaatttgacttatcgtttgtcattggtcttaataagagcagataatcaactaccaaattgcttagtgtgaaacagaactatctatattcttaattgttccatccgtattttatcatttatcttgtggtaatttttagtggtaattcatttatttatgtaattactaaaaaaagtcaacgaaatttggaggggatgcacacgagtagagagtagttgtaaattattattaactgtgattagtattattactcacaaatcacaattaataatactatattctaatcacagttaataataatttaaatatatatatatacttattatatatatatatatatattttttttttaaagaagtaaattttaattaagaaaaaactatattctatatatactcttttacgcaaaaccgtacaaaattagaatattgcgggtaaagggcaattatattctccgttaaaatccaaaaatgtataactaactaatcgagtaacatctttgaccaaaaaaaacttacacagtaaaatctggaccagaaaaagtctttttcgttactactattattttaaactcaatatatgattttcattcaattgcaaattattaggcttatgaacctcaacagtggactgtagaaaagtcgatgtaacgtaagagatgatggaatggaaggttgtgaaaaagtaactttatatgcttatcttttgtacataacttttgtatttgtaacgttcggaccgttttgtctctaatatatatatatttgttttattctctgagttgtcatctgtacatctcttcatctaattacatcttcataaaacttcacaaaattattctgcaaattagtaacaaagatattttttaatacacactatatctaaaaactatgaaagaggttttccttcatgtaatacacctttttaaaaaaaaattggtttattatgcatatatagtagacaacggtttactaaaacttcaaactatgtcggtgtctgtcctcataaattttctaagcacagaaaaataagtcgcatgtgacgacttgaatcaaaaataatctttaatttcttcctttgttagaaaggaatagacttcatagaaaataagattcagtaacaattatcttgccggtggaccggtggttaaatgtagctctaaatcaatcagcaccacacatttttttcctaattttgatagctatgattttcattgttgggtttgttcagtctcactctttttcctcaacaatgaatcacctttttacgacccattgtctatttttgattgctgttttacaatatcaaacgtcggcataatgatatatatatgtaacgttatctatacagtcagcttagattaatcacctatccaacgtccctgttccattctttgacctatggacaaaagtgtacatgtagattccaaaattaaattttctatcacacgatcatcacgtgttttagaaccagaaatccaaatcccaaatgtgtgtctgtataccatacactcaaaacaaaattccgattagaataaagaaaacctaaaagatactttgagaataaaaactgcaaatcattttcatgtatcgcacgtcgaatgaaaatcatatagtcatataagtaaatgcattttaactaccattttgattttttttttttttgtgtgcataaatataaattgaatgttatgatttttttgaaaatgtgaaatagtaaaaagcacatgtgatccaaaaattaacacgatccgtgaagttttctttgtcacggtccgccacacacaagaactcgaataccgtgcacttaacttacttatccacgttttactattatccttttacccaaacatcctccgtttcgatgtaagaaagtaacggtctatcggatgtacgagtgtagacagtcagacaccgtcacatatgccacgtcagaactatggagccaccgacatgtaaccgcgtttcaaaatgggacccactttccccgttttatcttaccttttttccttcaaagtatgttgttatttatatggagctgatccaataaattctattcagacattagaatgcaaaaacgaattgttattttggaatcttgaaataatcaccaatcatattttaaggacatatacctgtatctgtatgtgtgtgtttacaaataaatacgtacacactacgatggcataggatgcggctatgagagccgacgattgtgtaattaattaacttctgatttttttggctgattaattaagaaacctacttgtttattttgcatttatttagctaaaagtggttatatatatcggtgtaacccgtttgaataaactaccagttcagttttgaatgatgacatatatgacattttacgcaaaaataccacggtattattagttttgtttaagtttgaagttttataggttaactgtatgtttcgttatctcttcgtttgtttgttttgtgattaatcatacatttcccaaaacacaatatattataaatgctgaatggtaccttgtgtctgtttgcatattggaaatttctggagcaacctgatcccttctctatcaaagaatttaattgataattaatcgttggcgatagcacttttacaaacattttccctttacttgtcaaaaataattatcaagcagaaaaaaaggaaataatgaatcaatttcgagaatcattgaaacagatagtaacaatgttttggagttgttttgtttttaatttctcttcaaagtgaaggctaaggacaaacgctatgcggaatagttttctattgcgtatatatagtcgataataacaatataacatggctaattttgtgttacatcaatcatccaatcttcatatattgtggcttattctatattacattattacaataacatatattttacgtggcttttatgttcgtacgttgtttttatgtgatgatgctatgtcaaatcatccgtagtatcttttttatttgatgagtacaaacatataaaacaaaattgcaaatatttcaccaccctcttacactttatatatttaggtacatgcagatttataaatccactaaataaatatgcatgagctgtgaaacaaaacaactcagtgactcactcgacttatatcatacggaatataagaaaaaatcaaatgaaatttaccaaatttaccataaaatacagattttgaagatcaaataaaagtagaaaatcttatcgtgagtgggatatttaaaagtacaaaatttgcctcgtattgacacaattttaaccttatcgtggttggcgtgtacaagtgggcaactggtctcctaataatgcgtttggtaataaatgatcgtgattcttagaaatatctttttcgcaaaaacattagtctatggataagaagataaattaaccaaatcgatgagtgtaaaaaaaacaaaaccaaatcgaggacatttgtgaagaaactcgtcttattccaattaggggacgatcactcgttttcttgcgagaggaacttggcctaaaccgaccatttttttctcatggaatttgatcatgtgttttttgtcctcctttaaacagttcaaaatttgatgaataaactacaaagtcaacatttttacacattcagatctgcatccaaaacacccatattgtaccttctatattcatgattcttttggtcataatcatgatgttttgtttccactaaactttatgatgtttatataaattccattgacgctataaaacaagctcgatacatctaccttaaaaaagatcattaacttttctacataaaaaaaaaacagtccccgtaaaaaaaaatcatttactatcgacaaaataacctttaggaaatctcatgtttgacctaacacattttttcaaccggttcattaattctataaatgtcaaaatactattattgaacatcttctaatatttttggtcaactactactataaagcatcttctaatttttcagtcgaccaattagtgaacttaattaaaagaaataaatgtttgtttttatgcaccgccaagatttcatatatttttttatgggaagaagaaagagacagaaagagaggtaaaaaacattaaaaagtagaaagaaaacagagcgtgaagttaatacgattatagtactagtaattagcagtagatagtactaattagacatgtacccatgggaagcttctcttcgttctccccccttaaatacgcttaggcatctcaactaatttactctctttcttttgtttatataccaaagccaacggaagtgtttcttaattcattttttgtttgttttggtttaaataattcagtgtctcacgagctgtgtcgagattggatccatacaaaatctgcacgacgcctgcttcttcactctctcccactgttccagcttcaactctcttgatatacagagagagatagagataaagagagagagagtgagagtgatagctctcggagaaattgaagaagacacaatctgattagtattctccaatattccatcaactttttgctgagggaaatctccagatttataatcgtttgtatatatatatatacagagcagcgtagaaaagtacgatttttgcttcttttcctcactcttattcatcttcttgattttgattcgatttggtgtttattcgcttgattaatttaagggttgttggggttttttgtccaatttttctgggttttcgttcgatttcgatttccacgagtttaccaatttcgtctctcctcagaatttgtggatctgcttatgtaaaaattgagtctttttacttgttttgttcgaatttgtttacaaacgcgtgatctcgagtttcagagatctcaaagcttaaatttttataatctgatggacttgttttttatttacagggatcttagatttatagcagcaacaaaaaaatgtcaatgccactacaacgtggcatctctggagtacgagtttctgatagcagtgatgatttgagagactctcaaatgaaagacaaaactgaaagagctcgttctactgagaacaacaacttaaccttaaggtttccttttggtttcctctttagtaatcaatcttcttccaaacacggtggtggtggcgaaaacggtttttctgctgatccatatagtgcaagaagcaggcatagattgatgttgttgtttctcaagatcagtttggttcttattgtggttattgctcttgctggttctttctggtggactatttccatttcgacttcttccagaggtcatgtatatcacaattataggaggttacaggagcagcttgtttcagacttatgggatattggggagatttctcttggtcctaataggtggaaggagcttgaatattgtaatatagaatctgagaattttgtcccttgctttaatgtttctgagaatcttgctctgggttactccaatggtgatgaaaatgatcggttttgtgggcctggatcaaagcaagaatgtttagagttgccaccggtgaaatatcgagtccctcttaggtggccgactggtaaagatataatctggcattctaatgttaagattactgctcaagaagttgtgtcttctggtagcataaccaagaggtgatgaatcgttgcttctctcttgctaaagttgactggttccattgctaatgatgcatttttttccaggatgatgatgatggaagatgatcagatatctttcaggtcagcatctcctatgtctgatgaggttgaagactattcccatcagatcgctgaaatgatcgggattaagaaggataacttcatagaagctggtgtaagtcacacacacattcgaaagagtcaatctttatctatctcattagttcagtttcttatttgctattttccttttaatactgtttcaggtgagaactatcttggatattggatgtggttatggtagctttggggcacatctattgtccaaacagattttaactatgtgcatagcaaactacgaagcttcgggtagccaagttcagctaacactcgaaaggggtcttcctgcaatgattggctcttttatatcaaagcaattgccatatccttctctttcctttgatatgttgcattgcttaagatgtggcattgattgggaccagaaaggtaacagtttaatgacaccccagaatgatttttttcatgtccttaacccgatggaagatccaactttactgtttcaatctgctgtgtagatgggcttctccttgtagaaattgacagggttctcaagcccggtggttactttgtatggacatctccgctcacaaaccctcgtaacaaggatcatcttaaaagatggaactttgttcatgattttgctgaaagcatctgttggactcttttaaatcagcaagatgagacagttgtctggaaaaagactatcaacaccaaatgttatagttcccggtcagtgattcacacacaccactgttgtattacagaatctgcatatggatacatttatggttatttatcaagtcctctaaaaatggatgctttgcctataaacaggaaacctggagtgggcccttctgtgtgtaccaaagggcacgatgttgagtctccttattacaggccgcttcagatgtgtataggtggaacacgtagccggaggtggattcccattgaaggcaggacaagatggcctagccggtctaacatgaacaagactgaactttcattatatggttagtctccgtagtaacaaattgcttctgaatccatatgtctgcagtttttgttatctcattttgattcctggggttggtttaggtcttcaccccgaggtgcttggagaggatgctgagaactggaagataacagtgagagaatactggtctctcttgtctcctctgatattctctgatcatccaaaaagacccggcgatgaagatccatcaccgccttataacatgctcagaaacgtactggatatgaatgctcaattcggtggtctcaattccgccttgttggaagcaagaaaatcagtctgggtcatgaatgtggtccctacagctggacctaaccacctccccatgatacttgaccgtggctttgtcggagttttgcacaactggtcagttcaaaagccttattggattttcattttagccatagaagtgtttctgaacatctctttttcttcaggtgtgaaccattcccgacttacccgagaacatatgacctggtacatgcagacaatctcttgtcgcttcagacaagtcagccccgaaaaacatgtctacttattgatatattcacagagattgaccgattgcttcgtccagaggtacacatttgtttactttgtaaagaacattattgtttcttgtattctggtagctataataaacaaaactttgtacagggatgggtgataatccgtgacacggcacagctggtggaaaaggcgagagagacgataacgcagttgaagtgggaagctcgagtaatagaggttgaaagcagcagtgaacaaagacttctcatctgccaaaaaccattcaccaagcgacaatcaatctgaagaagaagaagaacatagacacaggtttttctccacttttttaatttttttgttccaatgcctcacattttggaatcaaatcatccaacttgtgttggcgatacggggaagaaaggaggaagagatgaaatatatatcccgccggggacgtaagaccgccggtgaaatttctttatctggttccgtgagttcccattttacagaatctagattttttttttctttacaactttggttctataacaactcttattatacagcgaaaaaagaatatgattcaatatttgtgaagatgtttatgaaataagttcaaagctttttagtaaattttcactgagtttctctgtttgttcaccgaatccgagatacttacccaacattgtaccgtaccggaattaacccgagattagttacgattctttttgaaattgattatatgaaaaatctccaaaattgagttaaaccggaaagtgttattcggttttacatgtttccgagaaccggatcaactaaaaagtaaaaagacagtaaaccagaattgaaaccgaaccggaaacataagcgttagaaaagatgctgaattataaaatcaaagaatggagatggctttgcaatttgcattggccaattcatgagattcaaacaaaaagaacaattcaatgtgatggcgtccctgcagctgaagtttttcttagttgacgttggcttctgtttttggatccacgtccttttgcaatgtggcctcggtggtgaacgctaggggaggctgatccaacaacactcttggtggatgttcttttgcgcctgtggtgcaaagaatctccaccaccaaacgcagctctcgctacactatctttgagaacttccctggctcgttgtggcttaatgagctgcttgttatggtaaactagcttagggagaaggctggaaacggtcttgcgtagctggtcctcgcctacattgttctggatcgggtttccgaggatgttcaaagcaacgagagagttgtagttggctacaagctggcctattgctttggtggtggcgatcttgttgaaactaagatcaagaacaataagtttcagcaatctgtgtaagccttctacattgctgatcttgttcccagctaggtatagttctttgatcagtgtacagtttgataaacctgataaatagcttttgattaagacagggaaacaaacaagcattgtatgttttctacttaatgactgcaatcttaccttgtccaatgcgagaaattcggttgtaacttagatcgagtactcttaggcgtgtcaaatctcttagtccttcgataacactgatcttgttcttggaaaggttcaacgcgtggaggcccttaggaagcgatgcaggagtaatttgaactgcagtaaacagaacaatgtccagtaagcaacacacactttagaaaacagaacaatgtgtagtatccaagagtgtgtacctatgaagttgtttgatagatcaatcgacttgaggctggtaaaatgtgagatgctcgggatagctttcaagccgatgctcgagatgtgagccacgctcgatgatttgctcagcgattgaataaggctatttgcgtgcactatagcctctgagacgtttccggactgaaccacatttcctaagggtgatctctcagtattaggagaggttgggaagatggccaagacatccttatcctcgttcactggaaccacggtttcgacatccagtcctcttacccactcgtccactcgcttcattgacgaggactcggcagagaacgcgacccactgattatgatgaggccacaagtttgatgactggttggtgaaatcagcgcaatagtttgtagattcttcttcatggctggattggttgtgctcagcaaagtcagaggtgtatccagactgctggttcttgtttaaaggctgtgactttagcgagacacggtgtttgtgaaggttcctatggctccataggaacaacttccaccagagccgccggctcccagagggaagtatctgcatcgacgaatgtttcttgagcatcactctatctgcacttctatgagacctcactgattcattactaactggaacggtctctttcaggtcatggagatcagaaccatggaaccggccattaaacttgctgagagtggagcaagatcgtttaagcttaggagacgtcacccaagccgtagttttgcctaatccaggatcactgacgtgacctccttcatcctcgtcattgtcatcgccgttttcagaagtatctgtgacttcctccttgcttttcacagattcaacggctcgttcgtgaacgtggaatttagaaaactcacggttcgttgaatccttatcgtcacgttcatcttcgccgtcatatgactcgtgcttgataggactgtccttgttgttaggctcatcattctccaaaggcttcactggctcttcaagtctgatctgaagtattctctgcgttttctgaggtttttgtattcg

SEQ ID NO: 40 - DNA, 90149 bp, Arabidopsis thaliana
gaattcctcacctgtttgtatggagaagttatgcaccgccttaacatctgaaccattagaattgggaggtcgcatattagcactcgcgctccctgtttgatcaggcataaatggttgaggaacagtctcgtttctataaccaggttccatggaatgctgaaaaagctgttgatgtctagctttatccatcacaaaacaaaacagcccttcaaattactctaattcaaacacatgtatgacgaatctaaccaaaactagtactccttcaagatgctggtgatgccgttaaacattaagctgcaatgaaaagtataaggatattagttttaagtcccatggcaagaacaaaagatgacaacgcagcgaaacgcagacatcgaaaggaaaagggaaaatttcacatgcttcgatttcttcagatagcggaatctcttatgtgaatgatcgtgagcataaaattctcagcgagaattggattcaaactaacccaaccatttttcaactaatccaaaaataccaaatacactcaattaaaagctaccaacagcacaaaaaacccaaaaccctaaataagcagccgatacaacgattccgtcattttagaatgtaaaatcaaaatcaatgatcttaaagcttcaggaaattctaacgactcaaaataagatacaacagtgaaacattcttcccaaacctttagcgagtaagcttacgaagaattgatcgaaccactggaagatatcgtctcttagctgatggttgatcagtacacagccaaggaagaacagattaccaaaaaataaaaccctaaatctttttttttgccctcaattttctctcgttttccaggcctgcctttctgagagcttactaaaattttggaaaatctttcaatcacaattaaataataataataaaatgcaattttgtcggctagctaaagaacaaaaaaaaaaaaaactcaagaagcgtataaatatatatagtttaattaacaaaaggagaaaatccaaatctggtcaaaatgattgaaatttcgaaaagtagcctcaaaagtttcagaaattactcttttgttcatattgttgaccttagccaagatgcctagattcgttatgcggtgatcagctcagtgtttcagtcacatgttacgcagtgagaacgacatcaaccgttgattttgagagaatggcctaataggtgagacttgaacggtcgagatagattcttatatttgtgaaaaaaagattgagtgggcatgtgaatagagatatgatatatatatatatctcccaattcaccggatcttaatgaatattaacagaaccggtgttaataatgaataagaaagaacatgtcgatgatttcaaaatcgttatcataagaggttgactttttgataccttaaaacacaataacaaaagtaacatattcagatatatatcctgcttaactctttttttttttttttcgttcagaggtaaatttctcaagtggcttcttaatgtattaaaagaaaacagtgctttgttttttaactcttgagggaactaatcacgtacctgatacagttagctaggaggggaaaacaaaacagttgattaagaaatgattggcaactagctagtctagaattcttggagtagatgactttgatgagtttgttgactgactaaaattaatgaagataatgtatcttatgatatactagcaaatctaaatctttcacataaacagattgtttatgtagttgtaaaaaatagtagatgtttacatatataatataaagaaaaacatattcgttcataatcgaagatcgttcaatttttatgtttttgtcaatcaaacaatttaaaacctccaaaaaatgcatctgctggaagtaaacatagttcttggtcaagaaaaaacgaaggtgttaataaactctagatgactagatggtggtatgttgtttgttttgtggtcaaggctgcaacttcaaaagccccaacgccaatggggcggcaatgattggccccacaatatgtaaaacaaactatggtcggtacttttggatatcgaaaaagtttatatacagaagaagtctttcgttgaatatacaaatgtttgtttccccgacctcaagccaggatgacattgacataccacgatttattgtacatgaactcgattgtaatggaattttcaagaaaatataactattacaagtgttttgaagtttatggattggtataagagtaataaataagtatagcaagcaagataacttccattgttatataatttgatcttgctttctttccaagtgaactgtttggaccagctaaatacggtatagactatacaaacgtgaaacgtacatgctcaccgtcaataaatttataatcgcttgttttgtcaacgcaaaccgtcaggacatttatatacacaatttaaatgtcaaaaatattttccattttttctcttttgctgttccttatctttgacatcacatctccttatatatagttgtatatattgatgataatttgacagggaaataatattgatgaaaacaaaacgacgtcgttcatttggaagaattataatggtttagcgaagacgttaatttttttggaaacggtcgagagaaggaaattggcgctcttttcttctatctccttatgagtcccaccaaaacatcgccaccatgttatttctgtagcatggtttcgaggttaacctcaaacttctcttctcattcaatcattaagtacgtaaatgtgtgtgggatgattttaatctatacatggacatcaatctatatttcgagtttggatcaacgatgctttccacgccgaccaatcgatgctttccgctccgatatcaatctaactcttacggatcatgttgcagagatgatcatcatcggcttttcacgtcttcaatgtctactaattggatcatcatcgaattagagagttttggttttatttcactcaaagaagaaagaattagaagaagctgcgtgagagcgttttttttttttaatctagaaagcaaaagtgttaattaggtctaatcccaatcgatggatccatgttgtatagagagattacaataaagccgttggagtcggttatatttctttattttaagacaaaaagattcaatagaaaaaacgaaatttcattttctttcaattgggctttaattatgaaaccaaagttatactagttgcttcttcttctactttaaagtgtgtgattcttcttctatctttttaatcaaaagtatttctttttctatcgtccaccacattattctatggcatcttctaggcatgaatatttattttcacttattcgaaatccagattaattatgttcgcttcagatcggtttatctgaattgaacactagtttgtgagattttgctgaacaaaaattatattctgaagtgcaaaatgatggtggaaacgaaattgaaccttcaagcacctttgtgatgatgaggtattagtcttcggagaaacagaacagaatatcgtaaatgtaagacagaattataaaaaacaaaaaaacaaacagattcctcgaactgtgagttggttgctgtgtcaagttcgcacagctaaaaaagagagagaataaaatcgaaaaacatgagattcaacaaatccgattgatctactttgggaacttgagaagattagcgtcgtttcccaagtagtgaaacggaaacctttgattaactggagatgaagaagaaccaccattgttgttacccaaatgatcagcctgatcgttattatcgttgttactcaagtcaccaaaacattttgcttgatggttctgcacttgctgctgctgttgctgattcatgttgcctgtagtgagaagcttgtccagaaacgaccagtctccaccatagttgttgttagaagtcaacctcagtagattctgtgaacattcaatgtccgtagtgttgattggcgacacaaatggttgggctgatgctgctgcggcagccgccgctgcagctgagtcagggctaaagagctgaggtagatgcattgagccatggctcagagtgtttgcaaactcatgtaatggcatgtggatttgtcgtccaatgtgatgatggtggtgatgatgatccagaggatgtaggatcaaaggagaatgattgtttgaattggagtcaatgtgatgatggtgatcatgatcattgttggtgcttatgtattggtgatgatgatgatgatcttgctcttgttcttggtgaaatcctctgaaatgattcttcttcttgaacactctgcatacaacccacccatcttcctgcaaattacacattaatgataaatccactttaagcattatgattagagatttcgagagttaaacattaattgtgatatgttgtacctgaatttcgttttcgctatcgtccaagcgatattcgtgcatgatccattcggttttttggccatgaggagcacgaccagtgtagaagacaagagtcttacgaagtccaatcttcttggagctgttgagatgtatggatttgtctctaccagtagctttccagaacccggctgctgtcgcccggttcgttcgggtcccagtcggatatttcttgtccttgtggctaaagaaataccactcgttttgaggacccgacccgattctgcatttctctacatacacacaacaacaaaatttgttataaatataattgaaaaaatacaattgttaattatagtcttaagtatatatatatatatatttaaacacacatttcaaataaatatatttacggcttacggcgatgggttgttatatgtcttcattgtgaaaaaccattgacttattttgagggtagtacaaaataatattacaaaatatacattcgtagtcatatactacaagacattacactttggtcttctgtacataagtgaatagacaacttgtctctttcttggtgtataacgcgcacacacacgtataaggtttcatgtttccataaaaactggaaaataatttatcagcatatatgagaagaactgttcaaacttaaaaagacacaagtagatgcatgtttccatagagatcacagacaaactccctagacaatattaccacaatctatgtatataattgtcctttgacatctaacttgtaatcttgtgcaggccaacgacataattccccagattttatctaatcttacagcactcgctctatatataattaaaatctatatgacgttgattgtgatagtctatatactaatatactgatcaagaaataattaatagtcattcattaaatgtgtggattaggtgatggtaattatagttaaagaagagttaactataaggggattataaattttacctttaagttcccaaggttccagcttgttgagatcaacttctctaattacatctaaatcaattggttcataagaaaccttcttcttgaggtaatagtaaagaagctcctcctccgttggatgaaaccggaatcccggaggcaccgaaagctgtcctccgccagccaccgtggatgacgaccctatctccattatccttactcttctttaagcaaactttgacgctttcttttcgacctttgccctaatgaaatattaattaaccccaaagaaagaaacacacattatattgaaggttttaagttttaacaaattgagaaatgaatgggtttgaccatgcaagtatgtatccaataatctcaaggtgttaattggggtttgggttatattagatctaaaaatcaaaaccctaggtttaccaaatgcatgcatatagtcacgaagaacaaaggctccaacttattaacctttaattttaaaacaaaagatgaatcttctattacatatacccacataagtaaaacctgaatgtccaagagaaacatgaaggtgctgcaaactgaacgatctttgtctgcttcttaaacaagagaggtttaatgatagagacttagtcatgttcttaagtaatcaaagaaaagaaatgaaaatagagagatgtttaagacgaaaagtacacatgatatatatgaggaagtgtgagggagtgcgtgtgtgtatatatatgtagatgcagatgatgatgacgacaatgaaagatataagatggatgaggaaagaaacgaaccttggaggccggaaagtattgcttctgttagaggcaagaggtagaagacaatgaaagagagagagcgcaatgaagtaagcaaaatgaatttctacaaagctgaagatatcttagcttcaagggcacgatgtttagggtttctatctctctctctctctctttcttcttctttgagatagaaagaaagtgtggaaagagaaagatagagaagcttggcttctatggatcagtgccactattattttgtattaaatttaataaaccaaagctggtcacagaaatatatgagaaatactttaatatgtataggcagtttccattaaataatttttcttgccacatatataaacctattcatattggtataaacatcagctaagatgatcagatcattcctatctagactatatatatgtatctctcttacatggtgatctgcaaataattttgaagattcaccgttccatgtccaatgttgtgcctagctagggcttagaaggtctatagcgaatgaagattgtgcatgatgttgtgccgaaaataatctttttcttcgacactatgtttcgttttttgtttctaattaatatcaagttcttcgatttacatatttgtacaaatcatcgagtataaatacctagatatacatctaaagaattgtgtatactatctttgacaaaaaaaaagaagaagagaattgtgtatatattacgtattagatagctacaatattattattttctactgtgacgtaagtatgattatgaggattaactatactaatcagtaatcactatggattacagctgttatatagtaaggctgactaatttgctttgaaaacaagtaggaatcgattaatgagaatgaacttcgaatactatatagtacatggtaaatataatataatacaagatctggtttatgtatcccaaggacaaaacaaaacaggaattgaagcttctatgccctcaaaattgcagtcaaatgttgggaagaaaaatgatgtatcgtaccttgaattatgctcccacttacttttttaatgcatcaatttcagtgcagtttcgttggaaatttagaaataagattttctacaaatgatcttaatccttaaagttccatatttgctccttacttaccatattagttatatgaataacgttagagtgttcatcaaaaaaaaaaaaaacgttagagaaactatgggatttaaatgaacagctaattatactatatgattgaacgtgcaagtaatattggcgcatttccactagcgtttttttttcttaacattttgtaagacaattttcatgtaattttcttctgctaatttttttttagtttaaactttaaagttgaaatattaatacataataacgtacgttcagttcacagacgttcttaaggttctgcaaatagcaggattactattaatgtttccctataatgtgtatacacatgatttatctgcagttgcgtcaaacaatcataactgaatttgtatatataaaaaggcatgggggatcgatcttcaaaactgtggatatgatttcctgaaatataactcttacaagtttatgaaataatccatttgatataaataaaaaagttcactaaacgaacaaatagatatagagactttagagcctttgacaaaaagaataagaagaagaattggaatgcaaagaagaaaaaagcaataatggaaaccggtacgtaggaggaggagtgtggcacgtgcggtagaagaagcaaaatcctgaaaggccgtggaggagagcacgtgatggtccaacaccaaatccacaattcaaggtccctcgtttgacttcactctctcttcttgagattcgcctcaaaatttatcttcttctcacttttttccccaaacgaattacataaaactattaaagataaaaacgaatatgatatgaatggtaacttttaatttcctaaattccatgtaagatacacgaaacacataaaaacattggattctcacggtaaataatctcttcgtaaaacaatttatgaaacttacaagtttctgttggcccaatattatcttattgagatgtgccgttgccttcacgaagacgtcatgcattaaaccccttattaatgagcgtttaatcatatagagataccaacatgttctgaaacttataatcttattttagaatccccattatggctaattaagtgtacgtataaaattcaaagtgatacgcaattacctttagtatacaatatatatatatgtgttgtacaccgtttggttcaggtgaattactgaatcacctggctattttataacaaggagggaaattaaatactaccatttttcgggtatttattatataaaacattttatgaaaatttatattagccaaacaatctaagagatttcatttaaattaattacaagtgttcattgttgatggataaattgcatattgaggatgaataccaaaaaggtaggtagatgccaactagaccaatcttgtgcacggcgtcgtttcatgagtatattaaatgggccttaaaagtattaccctttttatgacgacccatttaatttaggaagcccaaagatgaataaacctattattattgtttatgtgtttatacttttgaacccataatttatttctgttatgtcatctcaaccctaactttatataatcagtattaaatccaggcatcttcaacgagccgtcaacaaagataggaaaacgtagtcgtttgatacagctggtataaaatctgaattcattcttcaaataaattaaaatcttcgttggcgttgttgttggttgcgttacagattttggactaatcattattttcgtgcctgcaaagtcagcacgacgatcgcgtttcgatcttcaaagtagaagaagacccgccacaatcacaaatcgcggtgcatatagtctaaagggtaagcttttcgattcctttcaccatgtaaatttaggtcaattccgtcgcttctttgatttggggtgtttttcctggcgcgaaatctttccgattttccctgattatgaatttataaataatgggtatcgcagattttgggtctcagtggctgattcttttcgactctagtttctgcttccgccgtctcatttttttttctacgcaacagtaaagtttttatttttccacctgaattttcggatgatggccgaagattttgtgtctatgctgatacctaatttttccatctgaaattgattttattcactgctattttcattttgttttcatatcattgtgactcgctactaaaagcttctaaatttgttgcctttttgtgaaaagctctttacacggtctatggtaattgtgttaagattcttgttcatcatgtacgagattttcattgggtcacaagagtttcgttgttgaagctactagtttttttcatgatcaaatacttctttgagctacttgtgattctctttacatgatctttatgtagaagataagtattgctgtgttttaattagttaggtacttgttttcaggtcaatggcctcttcttcggatccatggatgagagagtacaatgaggctttgaaactctctgaggatattaatggcatgatgtctgaaaggaatgcctccgggttaaccgggcctgatgctcaacgtcgtgcctctgcaattcgaagaaagatcaccattttggggactcgattagacagtctgcaatcccttcttgtcaaggttcctggcaagcagcatgtgtaagccattctgattctggttgcctgttcaaactcctcatgttagacaacgctaagtttcatgttggtcttgaactatgtaattatggtttatgtgtatgcaatttgctgataaacagttcggagaaagagatgaatcgtcgcaaggatatggttgggaatttgagatcaaaaacaaatcaggtggcctctgctttgaatatgtcaaactttgcaaacagagacagcttgtttggaacagatttaaagccggatgatgcgataaatagagtctctggcatggacaaccaaggaattgttgtatttcaacggcaagttatgagaggtaagatgtggtatgtaacactgttctaggaccatagtaatgatcttggcgtctgtattaatttctctttgattgtattttatttccatgagtagaacaagacgagggacttgagaagttggaggaaacagtcatgagtaccaaacacattgctctcgctgttaacgaggagctcaccctgcagacaaggcttattgtatgtctccgctgttgttcattgcttttcttgttgattttgatttcttattctaacgaaatgggactttcttccatgcaggatgacttagattacgatgtggatatcactgactctcgcttacgggtaagtatatgcttcgaacaaattagtctcattagtcactagcttaagctggtccattgataagctaaagaacaataggaaggcaagcaagtgattttaacaatatactggtctattatgtctaagaatctctcggtcgttgctttttttttttatcataaaaagcaataattttttagtttaatgtgattcacatctcgtcttggatttgatgtagcctgtttgtgtttcttgatgattgcagcgtgttcaaaagagccttgccttgatgaacaagagcatgaaaagtggttgctcatgcatgtctatgctcttgtctgtgcttggaatcgttggtcttgctcttgtaatttggctgctggttaagtacctgtaatgccaatgtggtggcaacttgtgaaagctcatccttttctctcagcctatcctctgtgcttaatggttgttttctattccttctatcgattgattcgtgtctgtgaggcaaagaagaataccactgcgtgtaagaaaccctcagaagtacataatctgtattaccttcgtatcaaccacgaattgtaaactaagttgacatttgtctatatatggtatggctcctacttggttcaataaagagaactagtggcttggacaatgcagagacataatggtcaagatggcaatcatttttttataaagtgaccatcaatttttttattgtgtggaaaaattgatctcagtcacattctgtaaggttagccacttggccttttagctctgtaggcgctgcttatgatggggagcattggcaatcacctcctttggggtgatttcattgtttgattccggattagaatatgaattaaacatctctaattgtttcaaaatcaatttaactagaaattttttcttaacaaaagtaatagaaacttttttgctttgttgtatttcacaactcgaaattgttataaccaaataaatagattcatattttcttaaaaagacctataggtttgggtcgaagttaaagattaaataaagttttctggtaacattatttcaatactgtcaaataaaaagttgtaaacaaaagtcgcgcgtcatgattctcaatatattggttcatttgatgtttataaatttttaatgtttttgtatacggaaaaataacgtattgtgacaaaaatagcgtatacgaaataaccaggttaattgtttatgggcttgttattttatcataaaaatttaaccacagataaaacagacatgggctccataaaataggcccgaaagacttaacttctttttcttcaaagtgaaaatacccatcacgcgccccagtttatttattttagcgaaaacagcaattttcgtatagtccagggatttcggggaggtggcgtcgacgcgctcattgtgagagtgggtaaaaaacttagatttcacagctgcacaacaacgcgcgtcacatctgggcagactttatactgcccattgggctagaagaagcttagttttcagatacttataggcccacaaaatgtccaacagcataaataagccttcgatggcatgctgatcataaatttatcaattttaattcttattcattggctgctatctcctctgattttgttgtgctcgatgtcattgtaactgaagatgcggtgtagaagcagtttttcgtattatctggataaatgtaaatttgtatgcatttgctttttcattgttttcctaatggagtaatcatgttgattctggattatgtcttcaagtgaaagtaggttctctagcatgaaggttttaagagagaactaggagctcaacaagttgcgttgtttttgcttctcttgatgaacaataaaagggacaagctcgagctcgaagcagcgaatcagaaacgagaaacttacatagagcccttccctccagcattaaaaaggatgagcacttgagtttttggactgtacattgctcaactgtgtatcaaactgttaaatcccacaattttgcaaattaaatgcctattttttggaggtatttctcattggttatactttggtcctttttcactagtacaatacaaagagaaagaatgatactatattactgtaacatgaaacaattctgtggtttgcgagtgtctcgccttaatatacaatttaccatttcactgagaagaaaagaggacctatggggatggtgcagaagatggtgttgtggctcgaagaagttgttgcagaaaccgagctgcaagacgttggcctacaccgcctgcaacacgtcctccaagtcttcgtgcctctggttgttgtaacacctgattttaaaaatataagagtttagctcatcaatcaattttatgttatgtaccagtctcagtgcacaagatcaatgaagtcacctgtagtattggttgcaaaatagcaggatcaaagctttctgaagattgaagaaggccccagattctggagacctgatcccgaagctcaagcgtactttgaagttccgcggtactcattgtaagagggccattcccatttccattgaagacaagagatctcagaaactcaggaagggaattgtatgtatcaacaacagtgcccagcgcaattgcttcactgactcgtacagcttctttaattactaacaatcgaagttcttcgccatttggatccagcaaaagcttcaaaactggttgtagagcatcctttgctgagaagtctctatctttacttccctgttgtagaaggttctcgagtctattccacctaaattttccgtctttgaatagtagctcgataagggcatctcttagatacgggtttggatcagtgagaagccttttggcaaaatatgggtatgaagcagctagtactttgaaattaggatctgcgtagagtgccaaaccttcaagcacagtaagcgacctcaaaatcaaagcatagtagggcgggacattaaatggatactggtagaagacagcacctagaccatcaaccaaagttttgaaattgagctcgctcacggtataattaagtgcatcgtcaaagaagtctctgagagctggtatgataggagtaacatccacatcaggggacaagaacttcagagcatagtaatctcgtgccatggcttcataatctcggttcactaaatggacaacatggcctatgatagcaaatctagcttcctctggtgtctcactcatcatgccaaagtctagaaaggcaagttttccatcaggtgttgccaagagattaccaggatgagggtcagcatggaaaaagccatactccaagagttgccttaggctacactggattcctgtattcacgagatccagaaccttcaatccctgactctcaatggcaagttgctcattcagtttagttccctcaacccattccattgttagcaccttgcggctcgtgtaatcccagaatatatcaggcacaagaacatctgctttatctgcatacaattttttaaaccttctggcattttgggcctcctggacatagtttagctcctgataaactctgcaggcgaactcatcgataagggtaaggacatcggtagtgatgaagtctacatacttgttaatgagtttcccaactcctctaataaggtaaaaatcaaggccaatggcttcttcgatcccagggcgttgaactttgacagcaacaacctgacctgaatacctcagctgagctttgtaaacctggccaagactagctgctgcgattggctcaggagatacagacgagaaaatggtctctagcgacaaatccaactctctctcaatgcaagcaaatgcctctgcatcagggaaggttggcaaagcatcctacttagacactcaagcacataatatagagaaagttagagatgttctctttacctattttcaaacagaagattcttaattacatatacgtaaagcagagagaggaaagaggagaacctgaagctctgcaagttcttcaaggtaatcgggtggacagaggtcgggtcgggtggacaaaccttgacccaatttaacaaaagtaggtccgagacgagtgaagatccgccggagctcgattgctctcttcttcatgttcttctctaagttgccctgcttctggtcaatccccaatttcaaagcgaaaccacccaaagctcccaatatctccaaacttctccgcaaagcctaagtcccaaattgagctgcatctctcagtaacttacaaaacttgaaactccaaaaagtgaccaagtagctaaccttgaaaggctgagagccatgtttcctggcgatgagctccggagagtaaatagaagcatcaatagcacgacccaaagctcgtgcctcggcttgaagatcatccgcgagatcagctcgtcggtactgcacaactgacgccggtctcgacgatggggaaggacttgccgccgctccgtcttccttaggcctagcttgtaccagggccgcacgcgccaatctcctccgatttaccgagaaaaactttgattttccgacatttattttggaattgcgtaacgaaagaccatcaccgactagagttaaacccagagactgaccaaccaccagactcatcgtgtaacaacaagagcccccaaaactcggcgaaaatcagagagacaaggaggaagaaagaattcagattgtgattgcccagccagtaacagccatgaaagaagatgaagaagaagaaagagagagcgagagagagcgagagagagagagatatttgttgtaaacgaaagattagaagcgtttttggttacttacttccggcgaataaacaaggtccacacttttggcgtgccgtgacgttctctattttttttttaattcaaaccaaacacgactacaagacaaaaaaggcattatagcattttccctaagagtttaaaactaacaaaattcgtggttcagtataaaccagccatggccttcttcaagtttttttctttctttgtgtgaatgtaattagtttcaacctaacaatatccattcaggtttacaccaacaacacagtaccatattatagagaaacctagcttagaacaaatcctttgtcactacctcctcccatacatccagtttgttttatgtacatatatatgccgctgaaaaaacactattagatttctcatctcggaaacttagccgcggttatttagatttcctcttctagtaaatgggattcgttcttctgcaataaccccaattgtaaatttcatggttttgggtgcggaataacaacaaaaataatagtgaaacaagagatcagagaattatgttgttaccatggtgttgctccatgttaccctcatcatcataatctccgttgttacttgtgaagaacggtgttaggtaattcctatctagttctgtgaatgatgccgcactgcatacaaacaaaacaataaacaaatgggattcttgtgtttattaaaagagacttgaatgcatctgtttgaatgccgacaaaatgttgagaggcatgagttaatgcgtcatttacctcttatggaactctcttagttttgtcctgaatccacttcctggcggtgtatcttcatcatcataactagtcatataacgactgttcaccacctcaaatccctgacaaaaacatatcaatcatttcgttttccacaccaagaaaccgagattcacgttataataggagggatcatctaggacatgaagtctacgtaaatggccatttatattcagttgacttacatcacctaaggatgtatcgtggctatcacctacaacctctagggcttctagcattgtaccagtcgatcctccaatcagcaacacctgcaatcatttccagtagcgtcaaggatcacattgcaagcaatatagtttggctcagctatcagcaacataaacctttgatcggaacactcagtttaaagcaaattctagttcctaaagaaggatggattaccgtcagaacaacaatggctgtagttgcagtgaatatagtttgaccatgtccttctggaagatcgtgaacagattgcagagcaagagcaaatgccatagcacctcgaagtcctatgcaaaatccacatatctttgtatttattactgatgaatagaaacaataactactcaagggaacacagagcagtatcttaccactgtaccaaagtgctttttgatgtgtcattggtattttcctatgagcaggtcgtgccagattgaccaaatatccacaaccaaacacattagctgccctgagtaagacaaatatgccaaagagtaaacactatcagacagcataaaacaaaattctattcggaaatgaatatatgtacttatacaggtcatgaaagtgaaacaaaaagcataccttgcaattacgataaataactgaggttcgtcaccaaggatgaaaagaaagttaaggaacaacatataaactaaggaaataattcaactccaatccagtaaaacttgagtaagaggatacaatagaaaaaaatatgaatcccaagtgtgaccaactatgcttttccatggcaatatcaaaacccatgtagatgaacctgcaaatttgatcatttgaaattagaaggtcacgtcattgacgcatattacagaaaccaactattaatatgcatgagaaaataagaatcaaatacatacacaaatgtctctgccagtgaagatatcagatggaaaaatgcagacacaaatcgctgagaatttgcagacaagtttgagtaggtataatgtttcatgacctggaaggcacaggcagtttccattatactactttactttcggctgaaaatcattgcacatagaactcatgtaattgaatgacaactcacaatccctgtaaatagaatcgatacgatgccagatagactgagaccttcagcaagcatgtaactggcacaaagaaaaaaagttaacaaactgcacaatttctatgagagtgaaatatattgacacatagctagtatagaagagaagagttttattacgagaaatatggaaaaagtacgaagagacagcactccaagttctgtagactgaaagaaggagagagtacatcagaataaaatatttcattgctgaccattagaacccgaaataaagaaattcaaacacagactacagtcactcacttgtcaacatccagtcctgcatacttgaataggtgctttacattaaggctaacaactcgtctatgtgtatggaatgaagtgaaatgtttcagaagaatctaaaagcacaaaaaggatatgagagcagaggtgaatccaactccaacgcctgcagatgcacattttttttttaataatgcacagagcacaaatctaagaatacataatgacataagaaaatcttgcgaagcttgaaaagtcaaatttagttaaacttgttcataagaatcataacgtcgaattttatcagcagcattctcaaactcaaatactaccatgccatttcaagttgaaagagccaaactatgcatgaaatattaggaacaaataaaaagtaaggcagatgattaaagcaaacctgcagacattgaaccgacaaacgtttcgagaaacctgactatcaccataaagaaattctgtccagaggaatgacttctcaccaaggacattgtcctgcatcccagtttatagccttgttaaaataccttaccatctgactatcgtgtttcaaaccctattttgaattactaacagacctgtacagagatatcgccatctgccaaaagcaacataggaaagagaaagacctgataagtaatgtgacaatttcatcctaatatatacatataaggaaccagaattcacttagcaaaaactacttacagcatcatttaaaactgattctccaaacaccagggcatacaaatttacatctgaaccaagttcctgtaaaaaaacacagtagtaagaagcggttgaaaactactactattcaaaaatagtggatatccccgtaaagcagtgaaagaaagtacctgaaatatcgacaatacagtgacaggatcagtggctgagataagagagccaaacatgagacactcgacgaatggaagtctgtacatgagaaacatcacaccgccaaggtaccttcagaagaaaaaagaaattatgaataatggaaaggcaaccttttccgtcaacaaacattagccattcacagtaaagagatacttacacaagcaatccagtaaccatggaagctacaaaagttccaagcactgaaaaagtgacaatggctccaaagtttgagaagaaaggtttctgcataaaacccaacaacaacgtaagcatcatcaagaacttaaaagcgaggatgcgatctttgatggtaaaacaagaaaagcaataaagacatgagggtctctgcacttacaggttgtaaactgaagcctgactgggtgcaaacaagtacgtcaaggaaaacaacatattttgttgcctagttgagattcattgaaaagattatgttacacagaggcgtaagtaaaactaaaggcagatacaaactcgattttaaggatataatatgatgggaggcagcagaaacagaaagaagaactcatcgtggaaattgaaccatgtcctgcagaagaaacaaaatagattagcattgaagaacacttacacacatataaacatgtattcgtgtatgtaatcagtgagtaatttacaatcgtttgagtttccaggtcaatggaggaaaggacataaaaatagtaataaataattgagaaaatactaaaaaaactgatgagaaaaagttcaacgaaccttatgctagtctccgtgttcgagatgttcgctaaaccaccaacgatcagccctacaattccacaaatttcacaaggaatcaaacaaaacaatcgatggaaaacgaaaaggacgatcgcaatgcaaaggaggagtaagaagaagacaaaccaattagaagagaagcactagcttcaggtagataatagaacttatgacggcgaaggacatgaccgagtacaaaagagaggacaagcatcatgatctgaagcaaaatcccgactccggcggcttgctgctgcttctcttgaccttgcgggtcgtgaatcgccggcgaaatctgcagctccgacgacattacgcctcgacggatttaaaaaaaaaactagggtttctatcagtgttacttcgtcttcttcgtctttgttcacacagagagagagaaattcacgaaacgggaactcgtgagatagacttcttcttcttcttcctttccgaggacgcattttgctttttataggaatctgcgtccccactgcttctcaggtggctttccgttttgggcttttatgggcctaataatatcaactactctgatttacttgagcccaattactaataaacacgattactaaaaacatgggctaaatgtgtatatgtccagtggcagtggtggctcatgttaatacgctaccgtttttgggctgaaaaggcaaatgacgtctatacatggacagtttacagttctaatttatttggcccaactactaagattttcttttagtaatcacgatttactaatgggcctagcctcacagtgtttcaggtcaacaatactcgcacaagttttcatcaatatgacttttccattcattcatacaaaaagtaacgacaaataatctcacaagagatgttgatatttacttgggctcaattttggtcggaacagagtagccaccactataatcaaacgctccgcctccatctccgtctcttgcttctttcttcttcaaagtacctccgtacaaaagcttctcaccaaaatctgtagcggatgacgacgcagatgcagaggagctactactcgccccactattctggatgataatctcaatctccttgaccacttcactcatcgttggcctctcatctgccgtctcatctacgcatttcagggctagttccatataccggccgagctctggcagagttccgacgtctcttaacgaacgatccatcttatctctcagtccgtagaagtcatcgtcgctcttgttcattacaagcttgatctctctaacaatgtacttgcctttctctatcggctgtttcgctgtgatcagctccatcattacaacaccgaagctgtacacatcactcttctctgtaagtttctgtgttgtgtagtactctgggtccaaatatccctgccattgaatcatcagaaacaaaagttcctaaaaattgaaagcaatatgactcgttgatttatctaaaacttaccaatgttcctttaacttgtgttgaaacatggcctttggtgcagtctgaaaccagcttggacaaaccaaaatcagcaaccttggctgtcagattctcatccaaaagaatgttagttgatttcacgtccctgtggatgatcggaggatccgccagttcatggaggtatgcgagtcctcttgccgatcctagagccactctcagccttcttttccaatccagcgtaattccggatcgccctaaaaacaatacgtaatggtcaagttttgtgtttgtgatttattgagcacctaaaggccagatttttcagtaccggttaagctatcttttagtgatccgttggacatgtattcgtagactagaatctgctcgccttgctcgaagcagaacccgacaagcccaactaggttcttgtgatgaactcgagaaagcaactcaatctctgttttgaactcgagccctccttgtgttgatccttgttgtgctcttttgatcgccaccatgtgcccatcttgaagcattcctttatacacctgcggagattacagagagaaacagaggagcgttacttgtcaaaccctgaaagtgaagccctagatagtttcaagatcgatctttcaaaaacccacctttccataacctccataacccagctcactgctcacagagaaattgttcgtgatcttcttgagttcttcgtaggagaaccatcgtgcccctttcagctgcggtgcgccaccgctgtcttttccacttgatgcccatgaaactgagtgaatcaaaatatcattgtcagtcttctacttaacagtaaatctatcatgtaagttaatgtagagtttcttttttttcaggtgaacctcagagaatctaaaatggtagtgtttctaagataacttcacctgttagaacatcggacttaccaaatggtctactcaaaccgatagcttgctctgcacgtctcttctgccacattgcgtatattcctaacgcaacaaggcacaggaccaaagcactgcaaccagttattatcccagtgaccatccgagagctcaaggaatgtccgttaccatcagctgccaaaaattattcgattgttagacgatgtgtttaactccaaaaaggtgtataagcttcgtatgtaatgttacctgggaatgtgtagggagatgcaatgaagtagtaaggtccaaacaaaggaggaggtttatatgtttggttactcaagtcaaatccaattctctgaacttcagttctgttaaaatacttgcccataggtgggaaaagtgccaactgtatctgaagataatcatcattgttgaagaaagggttttgtagagagaccgagcctggagtgagtcctaatttcacccacaagctcatctccaaagaatggtatgtgttcacattggacaggtctctgaacataggccctcggaagtagagtgtgccttcataagggtaggcgcattcacagctctgagggctgaccttttggtctaatggacaagactttcctccacagttagcaagactggtcgagtatattcgtttgacttgttgctgctgaatctgacagtagtttgtgttggagagagctgttgtgcatacaggatttccttcgagtctgcaacaagagagagcttctttaataggttgatatagacagtttgattgaacatttaagaagaaagaagctatgtacattaatgtattggtatatccagagcttagtgttacagaggatatgtcgttgtcttgtagatcaacaagttggagctctggacctactgtgtctcccaagctcagtgttccattgaatgcgttcttcttcagtctcctgtgcaaatccaattcagcaattagatgatgtctaaagctgtaaccaaatttcagtggagactaaaagctgaaacttacacttgttgaagctgtgggaacccaaagagcttattaggtagtggtccttgaagagatccatattccatcacactaaatacaagaaaatagtaacatatttagagagctcccatatgtgaatgttctgatttgtaaactgtagcagagcagcacttacagtgtggtcagtgaaggtaaggttgagaaccagagaggagactctgatggatcaaatgagttattgctgagatctctgtaacagacatcacatttaatcagagaacacaaacgcataaatgtagataaagacgttctctgttggtgagaaatttacacgtagttcatggacttcatgtctgacaaatctggtaatgatccaacgagcttgttgtgagctaagttcctgagagacagaaaaaaagatgtatacattcataagtgatgtctaatatgatctatatagtaatatcataactctggcaacacttacagttcaatgatgtttgtgagattactgagattctctggaacttttccggtcaaagtgtttctgtcaagccgactgttgcaaatacaagagttatatctttttgaagatagggaagatacatgaaactaaggacatagtgatgatatgttactcacagaacctctagtgtctgaatgagtcctaaagtggaaggtatgcttcctgtgaatcgatttccatcgaataatctaatattgaaataaatctgttgcgatgagttaccgtaagcttgacaaatatgtaatattattagaagtgtatttgacttacacatggatcagtatcatctcagagctgaaaagttttggtggaatggtcccagagagctgattcttgttgaaatgactgcagtttttataacatttgcatcagaagaaaggtacttgaagctgaagaagatgtctgcagagaaaataaaattactcacaagtgtttggctttcaaaagaagatcaagaccaggacttgagcctgatgaaattggaatgggtcctgtcaactgattatccgcaagatccagccaataaaccttagtgagatttcctagagacgccgggattttacccgtgaagttgttcgagttcaaggccctgagaaaacatggtggaaccaaagtggcaagtctcatcaaacatgagttggtttgaggacaatatcaaacactgcaaaatgctattttcttacaagaaagatagatctttgagatagccaagctcatttgggatggtaccagtgaagccacaaccagcaagaatactgaaaagaccaatacaactgtttagatatgtacacaaggaagagaaagaacaagaactacgagatcacttttagcttgtttgcgcgggagagattcttacaggatatttagcttttgcaggtctcctaaccgagaagtaagtgaacctgttagtcctcgattaaaggaaagatccctgaaacaacacaaagtcgccaattcaggtcagaaaaaaaagaagatgtttttctcttgtattcatcgatgattcatctaaagagactgacaatgatcttagttcagctagttctccaatatctccactaagtcttcctttgagacccattgttgacaaacccctgaacacaaaagacttgcttgctcagtacgttaccaaaattagtaagagaagtgctctaattttttgttctttttcacacatgtgtacagaaacacgagtgaatgattaaggaacactcacaaagcagtgattctggagttattgcaagatacaccttcccaaggagttccacaaggatcatcagaacctccccaactaggcggcgtattgtcccattgatccatcaaagaacgcagagccgccgctaataaaaggcaacaaaacaagtaaattacaatcatttccacgaacgtattcaacgcaaggaaaaaacataagtcatcacataccatcacgaggatcagtcactgatgaaatcattgagaagacagtgaatgagtaagcaaaacagatcaagagcaaccgcgatgtagcggttacggtgttggaacccaccatattgttcctcaagagacatgagttcttgaagtttgatatttaagtgaaatcatagagaaagaagaaacagattaaagtagcttccttatgagacaagattcataattgtctcatcaaaaaaaatgtgtactgagaattgtgccaataggaacacgagtgacaccaagaaaagttggtttcaatcaattttccttctcttcgaagtcaatttaacggttcatgtgtctttttttcaaagcactttagttattaaagcacttgagtgttacatctccaaataaggagaaaataatttctttcaaatagccactacaaaattaatgatgtaaacttaggttaccgttaagctctgttttgtaatcaaagcaaccttctttgatcattatgctgagaatagacagagaatatagtggaacccataaaaaaaaaagttcccaaaaacccaaccatctccaaaaacaaaaataaataattaaaacgtaaaagccacttccttcaatttccaagtgtctaacatgtagtaataagagttaattaaatataaagacagagagtatccaagaaaagatccaattcactatgatctttatctacagctaacatgaccaatctctcacatgtctgaaagactaatttaaacaagaaagattatatatctgcaaatcacttccaagagaagaagaaaaaaagttggaacatcgtgatatgaagtgtttttgtcggcattaacttagaatcacttaagtcaaaaaaaagtcacaaccattttctccaactagttgatctgagctcaccagataaaaaccttggaatgctcaagagactgttaaccctcgtcaatccttccaaagcagaccactcttcatcatcttgtgcaaccgagatacattccgcaagtgtcattgtcatcattttcgactcaatcccgcaactctcagggattttctcgtctttaacggggacaatctcatcctcctccttgcttgtgctgttagtgacactctctatagactcttctttgggtgaatccttctttacattggttgagacttccatggctactgatgaatcttgtagaaagagacagactactgtacagtcatcgttcttggaagttgggtacttgattctccatgatcgtaccgctgtgtccactagagctcgagccgctgtgcttctactaggagctgaggcaacgatatcaacagcttctttgttcgacaacacatcccatacctttaatacaattcagaaaacacaacatttttcagctctaaagatttggaaaatgtttgcaatttagtggctagtaactgaagatttaatttaccccgtcgctagcaagaataatgaattggtctcgttccgttaggcggcgatagttgatatctggaacagagattaatccgtaatctttgagacaaaagtctccaaaagctcgagccattgctaaaccaggtgaatcactgtttggtaaccatacacgagctacctcaggctcgtcttgcaatgcaaagactcttcctttacatttctggattctcgctgattcacctgacagtacacatagaaagcgaaagttgagaaacttttgcctctggcttctctcagagtttaatatcatggtttgtaataaagtacctggcaaatccggttttaagtctatagttaattgtacagcgagcaaagcattgtcttcgtctcttgtggcaagaacggctctcgagtcaccaatatttccaaccaccaaatcctcaccctaaaagaaatcattatgaacaattacagcaattaatatacaatcgatgatggtcttttggttacaagcagatctaagctgagaacctgcttgatcaaagtgactgaagttgttccgctgcagaagcaatcaatagttggatgcattttcagctctttatctatctgctgacaagacttgagcatcgcatgtttaagaggcagatacatctccggaagttcatcgttgttcacatttggatttaactcacaccattgctcatccatagtagtaacagactcagttttctgcacttgttcagactcagttgtctgcacttcttcttcctctgtacatttgatctgaaaaccattggcaccaactaagctgctttgatctgactctgaggtcattttcaactgggttaagagtgtgaagggcaatgtatctcggactttcttggcaaccatatgaccaaatggtccatgtccatcgaatacaccacaaaacactgtatcgtctctcgaacaaaagttctggaaagtgaagtagttttcataagttagaaacttgtcttgatatgtgaatgtaacacaaaaggaagtaagcagaaatagaatctaagtgtcaagtaactagtggtccctgtagaaacaggtcaaagactcaagacagcacaagaacaacacaaatggcaaaacaaagccacctcaatcttcaaagcactaagctttgtaatggtcccagaaaagtgatgaatcattccaagtttctctctctcttactaagcactagcaacaaaagattaatgcaatcatgttctgaagatccatttgatctgtaacaaaacacatccaaacaaatcaagtagcttcctcatacattgaacaacatttctccaccaaaataccctgaaattgtcctcttgagtattgataaaatccaaatgggttgcaaaaaagatgaatttttggaaagataaaagaaacgaacctcaaagacgagcatggcgtcttggttagtccctttcttgccttgctgtgtgtaaagacatgcaatcttacttgaaccattcgaaaccaaacgacccaaaacctgtggaatcccttcgatatcgccgccaccctttaaatctctcggccgccgccatcttccggagcctgatctctcctccacagtctccgccgtagtggcggtggagcttgcttctccaggttccttcccagtagtcctatctactgaataacacagacccattttgaaaataatccgaagaaaaaagagctcaaagcttttaaagaaaaagttcaaattttttaaatcgccgattgaagaaatctacgatttttctgggggttgtcggcaatgattacttgctcggcgaagaatagagcgaaacgagaaaaacgaaatccagaaaagagcttaaaaggctcaaaaaacgaaacttggcatctagaaaatccacactactttagcttttagttttagctttagctttagggacctctggtttattttctcgggaaaactgctattttctcgggtaaaaagactcatacttttgcatattgcgagaattaaaaggaaaaaagagaaagaaaacagaacatcacaatctgttcaaatcagattcttgtgaactgatttaggattacttggaaacagcgacgctaatactttcagacccacaacaaagaccaacgtttactactaactccacttctggatagagagaattaccaaaaaaagttcatagaacaattgagagagagagagaaacgcaatggtcagacaaaggtcatagtttggttccgcacgtgagatctttcatttgagtgttttttcttttcttttctgaacaataataattgtgggaaaatttggttcttggctgcatcgtatcatccatttcacccgaaaataacccaattacgttttgccacgtgtcaaagttgtcgtctgtctgtgtgtaatggttcgaatttgattgttaattaatggttagttaagtattcacaattgatcagccacaagtccttttctgcctttattaaacctaaattctgatttctgaagccagccaagttttggaaaaaaatataataactccgttttgtctttcttccaaaaaatgatataattgaagtatccacttgtgttaacctttaacaaattttaaaatcaaataaatgttgataatatctaatgtgttgtttacttgatttggccttttgggaagtacataattactaaccaattggggttttcaattttggtatgaattaaatcgttttaatttatacagattgaacaacctatgttaatcacatcttcatatatatggtataagcatctaatctataacacaaaatataaataaagatgtacacatatgagcagcattaaaagagaagcaattatgactgtaatagaattcacggattgtgtgctggccaatgcgacacgacgacaagttttagttgtcccactgacttgttgagagagagagatgcattcattcacacgcatccaaaaacacatacaccccattagtttatcaagatgctatgtttttaatcaccatctcacgaaaatgtttctcaataacgctttttgtatcatcaatattacacaaatccttatgtaaccatggttataaatagctaccatggtacataatacatattccttaaacaaacctaaaaaactaaaaaaaaaaaaaaaaaagataacacagaatgatagtagggactagggagtgatgtattttatgaatcaaatgacaaaacatctgaaagcaaatcttaccttcattagatgtattatcttattaaaaatacttattgttgatgatgaaatcaaacttctttacttaagcacatatcttctcaggcttcttaggaaatcaaacctggaattttaacaggcaagtgatgagttttactgatctttgacatatagtggaattgaaaagattgcatataagaacgattgtgtttagttactcatacttacttgggcgtgttcggttttgtatttctgaagctcttcttctgcacaaatgagcctatgaacacacacaaaaacaagtgagaatgatggattttaatctaaactatacaaggagatggtttcgatagttacctccattgcaggtcggttatgtcatggagcagttctttctctctttcgtgtgctgcttcaagctatgattcaacagaagaacagttccattaagctcaaaagtctgaaggaatgtgattcaatacatttttttcttgcaaacaattgcataccatggatttctcagttgggggcacagtaggttgttgtatacttccttgttcaactgcacgtccatctacatcaaagaaataaaggaaatttcaatccagtggcaaggaaaaatgtaatcaaaagggaaaattgagatggaaaaggagtgaagttgcacgaaataaacctgtcaactctctgttggtgagtactttcatcatatgcaaaatgttatcctgtttaagggacaatttcaattatgcaatgaactttcatattgttatgagatatataaagaaaggaagtagcgtctaagaagcaaaagccataccctttccaaaatattagtttgcagaactggatacaccagcgggtaaacatatgagctggttaggtttggcaatgtgacatcagagtgaggtagagaagcagaggaatgttggcagagcacctacataaccgcaagtaaaaatattatttgttttcattaagaaaacttgagatgaatagttgtggtaaaacacatttgattgttcgtctgcagctgatcaagttgaactcaaaacaattacaaacctgcatgctgtgactcttttgcagtattggcgaaggcgccaccacctgataaagagatagcgaatacaaaggaaaacctcacaaacgtgattgatacaagaaagctcttttttcctcttaaaaccaaaaaaaaaaaaaaaaaagttaccttctcgatgtcgagattttcagaagttactttaaaacgccctctttgctgcacaactggcggctttgatttgtcatcagattcatctaggcttgctgataccgggacaaatttatttaatcagaaatgcattgatccacatggatgtttagaatggatttcaagtataaagaaatttctgtaaatgcttacatgctgctttgggtggtttaacagccatctccgttggtacgtcatctcctcccactgtaggatgtgtcccattgcagtttgacccgttttgaagctgttcttgagttttatcactgggaaatccacaggttgatttaaaattcaatgtcgcatgtagagtatatgtatagtcagtgaatacgagctttgaagtcaattttgagtctagagttctttttttacttcaagtttttaaagacttcaagaggcaggtattggttaaataataatactggaaatctgaaccaaaaaaaggctcttaaaataaccgtgcttaaaggactaacctctctcctttattgggagcaccatttccatctgccaaaacagagctccctgctataatctctgttggttgattggttgggattgatgtggcatccgttggtttcccattgtttgcatgcgtactaccaacatgtgtattgtttaaagataaatcctcatgacggggggaggaatatacgtagctatcataactggggctggcaagacttgaatcatcatcagatttatccctgaccaaccaaaatattagttgctcagtttattcatctgtagcagttccagataagtacataacgatatgaaaattccaaatagacaatcacagagtttaaaattaggagatcaacctcgcgatacttagacttcggtgaatcagaggttggagatacttattagttatttgaccagtatcctcctgcagagatggttacaaagaatttaaacctcgactaaataacaaacgaagatgaaaacaaggaagcatttctgatactggaaatttccagaacatctagaaacatgttctctagaagttgagaaagattctacaagaggacacctgaatctccgattgtgtatcctgtgaatctagagcctgcaacgaagttgcacttcccgataaactgtccgaaaagccacagtccatgtcctggatctgatggaaataagagcatcataatatgaagcactgtgagctttacagttgactaccttttatgggtcagaagagacaaaacataccaatgaagcctgggctttcatatcatcaagattgaaattccacccgctgatacctctcttatattcattctgcatggtactatgacaagcgtttaaaggctaaatactttgcagaacaagttaaactaaaaaccaaaagctagagactcaaaacaaagataaataaagctaaaagtggaaactggaaacacaaacctgggacaattcttccttttctccatctgccattttctcttgtgcaagcatatcttcttcctttctctgcatgcagaaagaatattcccatcagatttccccatgagatgctgattgataatattcaacattatagctactggctatctacttagatctacatatctaacctttattgcctgaacacgattaacaagatctggtaacccatccagaagttttcgtgcaatgtaatcgcttgatcttgcttgcttgaaaaaggagtgctttaacaacttttttgcagacgggcgtttggaagggtctttaactagacaactggcgatcatctgcttgaaagactgaaaataccaggaagaaaggcaaaattgagatgacaatagccaaacattctgaccataatatatagttttaaaaccgagaatataccctggaaaacttcttatctctttcgtaatccagccctggtggtgcattttgcaacgtcataagcagaacctgaaaacatatttggtttagatagaagcaaaacttttggagatgaaatccaggtatcacaggctatgaaccttcattggtggatatttagagaaaggagcgtgaccatgagcaagctctagcccagttataccaaacgaccaaatatcagccctgaaggagatgctccaaataagatatactatatattcatccaataagcgaataaatagaatgatataactttgtataaggctaaactaacttgaagtcataaccatgtagctgctccatgacttcaggtgccatcctgtgacaagaagaaatagtagtaggtcatgcacatgagaactaacctcaaacactgttaatgtcctccacacaaaaaaaatataagaaggtattgggggcagtagttagcaactagcgtgggtacttaccagcaaggtgttccaacaaatgtgttccttgtccgttgcctatcacctgaatcaaagagacaggcagatacaccaaagtctcccaacttgactgcacctcgagcaccaagcaatatattcccagcctgaaatgaaaacataaagatatagtcacaacgtgtaaagttgacagagtcatttgatgataaacacaattcaaaaccacaagattacaaagtaagatgagctaaaagaattgccaagtgaagtgaaatccagacaggtggaataactgactttgacatcgcgatgaatgtggccatgctgatggagatagtctaatcccttcaaagcttcacgcaatatagtagctataatagcttcttcaaaaccatcaggatatgcagcttttagaatgtgaagacaagaaccaccagacatgtatggcatgatgacccacaaattgtgatcactaacaaaggaacaatgtgacttcaacacattgggatgatcaacaagcatcatcgtctgcgcttcacgagagatgttgttctgcccccaaatcaataaaaaaaacgtaatcactttagatacaatgcaaattacaaaaacacaaaaaaaaatccagattcagagtcagagaacaagagaatatatataatcaccagatcgcagttatcgcgttcaaaatcaagaatcttaatagcaacgacttcatcaaacggaatgcacaaagcacgatgcactagagcactaacaccttgtccaataaactcgtagagagtataatgctctggtccaattggatacttcttcttctccattgtctagatcctttggtttcactgaaaccacaattcagaaaactcaatatcttgtttcaaattccaaatctcttcagcaacaaaattaggggagaatcaaagattacctggaattgagaggcggaaacaaaaacgcagctggttacagtggagtaaatctacagaataaattcaaaaaaaaaaagggaaacaaataagattcataaaaaacctaaatctcgtcgcaataactattcgcgtaacggtgggaagcgaaattaaaaacaatattagtaccgggaaaattacgacacccatgtaaaataatcaagaaacaaattaatgagaagagtgagagaaaaggaaagagacagatatcgtgctgatgaagatattgaacgatgatgatgatgatgatcttcttattaagtttttttgtctactttctatcaaaattttctggagaaagaaaacgagaaaaaacgagagagaatgagaaagagagagtcacaatcggatcgccgctcaaatggggagaagctttttgggctctgttaaatttggaatcccgccactttaggtctctttctgcttttttgcccttttctcccttcaaatttcctttttttattgctatttattttcttttgttaaaaaaaaaaactgaccgtctacgtctcattaattgtttaacctagaatggataaggaacacttaatcaatttgattaattttctggtgaaataaccgattccggtttatgagctttaccaatgcaagaaaattcaaaatcgtaatttatcaatcaaatttctgaatttgcaccaaaccaaccggtagaaaccagatgaaaccggagacgctacctaattaacccaaaatgtatgatatcagcacaacacttcatttctggtaacgaaattgagaaattcgggatttgggctaataccagagaagccatcggttttcctgaaccaaataaaaccggtctccacctagtgtatcttacttatcaccggaaaatccgtgttttggcaattaatcacaacaacataggaacatgttggttaggataaatatctatcgattacactttatgtttatccctcgagaattatgtgatcacacttttgtatctctctgcttcaatatctatcacaaacgtaacaaccgcccccatcgcaaacggagaaaataatattcaaaacaaaaaaaggacaaactaagtcacagagagagagagatcaaatcccacacattaattcacggaagatatgtaattcaacgtaagaaaagagccaaaactttttcgaagaagagataacgttttgtgaactcagtcttcaaagtcacctgagttctccaatagatagttagctgccaattcttcatttcggtcacatgcgaggaacgcttctattactaaggctctatcaaatcccattgcctcgagctgttagataggccagaggccagggatatagttaataagggttgcaaagaaaaaagtgtggaaacagagtgttactattaatggtgttttacccgttgaatcgcttcttgttctgctggggtaacgttaatggcatgtggcatttcttgctcgggttgatcgaacatgtccccctccctgatgagttatgtttttaaactttgtgaatcaaattatttagtttaatgaaatatcaataagaagcatataattacatctgacagaaccttagattacaataaacagattggaggactcacccgtcagaaccctcatagggctcatttactaactgaagaaactctgcctggttttcttgaattagcctcagaagttgagggttttgctttccaagttcctgaagcatgggctggtaacaaaagcagttgttccaacataagaggttcggaatcagtgagaagtcttacaaactactggaccaggataacgaaaactagacgagtcttacctgaagaatttgagggttggaatggaccatggtgcgtaattgttggaactaatgtaatagcaaatacaagagaatgagtatatggagtaaatttacaaaagttagaacgaacagtcaaagcatgttaatatcatctcggttaatcatcccttgatagaatggctataccagacaaacaatctccacataagttgatcaaatgtggttctaaccaatctagatgccttttcatattcacaatcggtcaagaatgatgaggagagatccaaatagttaaaagataagaacttcgcaatttagggaaaatgcagatatagttagaatagcaacctggtcattgtttctaagaaattcaagtgtcccaagatctccagagccagcagcagcaactgtttcctggggaaattaagccacagagtgagatggtaactaaatatacctttcaattctattggatacacaattaatacaaaagtacctgaggaaataaatccaaaggagatgagttaggtcctccagatgcaggtgcaacaggggctgcaccggatcctgcaatctgagcctcaggtactggcacagctacttcagcagtttgaggaattccctaatataagaaaaaaattgtcaataatttcatcctttgaacctttagcgaataatgttacagagagagcccatacagagtacaaataatccactgctctctcagggttgttataagctgcacgaagtgcacgagtaactgtttctttgtcccaacttccacctcccatttccattatctgttggaccatttgctcaagactactaccactaactaatgttgacgcagcttgtccataggtgtcagtctgtgccctgccacaccattcaattgtggagactataatgtattaatgaatccacaacaactaagttataaaacttatactagaggtcaaacatggaaacttttggaaaaccatataaggggcaaaaggcaagccctgcaaaagaaaagacgaaagcatagacactagaaagagagagagagaggtagagagaaaagagctctaaataatctcattttccaattataaacttacgccggttgttcttgagcaggaataggtgaagcaggaacaggtgaagactgggttgtagatggagctgcaggctggttttccaagacgtgtttgtattaaaacaaccagtataacaagctgctcatcgcatatttcaacaaataaaatatatgcaagaaagttaccttagtcgaagatgtggtagcggaaacaggctgtgaaacagaagaagtctgacacactaagaatcatcagaataagccaatgatgtgaaaatatgagaaataaataaattacctgaaccgaagcctgaccagctgaacctccagatttgctctacaattcatcaataaccaaaggaaaagacaatgtcagtgccattacaagataaatgatgtttcataggtaggaaacaatcatgaaagagacatctaggaacatatgcctaaagacacttattcatcagcttttatccttgtttaaggtaaataagaagactgatttgttgaagataaaagaagtatgatctttgcagtagccagatttgaactgttaccttgctaagcataacgacgagaaatccttcctccgtaactttgttctccaccaggctagtttcatctttcaaaacttttccattgtgaatcaacaattgctgcccacatggataattgtcttttccttgtgaatcttctatattcttcttcaccgccattatcttaaaaacaagcacatcatgcccagatttaatgatttgaagactaacataatcaacttgaccaaaccagattggattcgcgagtcataattttagcagttaataaagctattaaacacttatagaataaaaaaatttgatcaccaaacattcaaaattgtggatctgagtctcttctatgtgagattcctacttctctctactatactaggcgaaaattacgtaaacgcatggacgaagaaagtagaactaaccgtatcggagggtaaaaccctaatttcaaaatgactgcccttgagagttttaacggtgagcttcatatcgtcggaaaaattgaaatcgacggcgagatacgacggcggagagagtgtacagagagagacagacctaagaaaagctcaaatcaagagatcgaggccccgacgctagagaaaagctgaccgtagctaaaacagtctctctctctagcaacagagcgttttggatttcaaacgcggcaagagatcgccatgtgcaatccacgtgacacatgcatctccaattcggcccagctggtcacaattctacatgcaccaaagaaatattaatagcccagtaaggccctatgttagtgggctacgccctttaaatgacattaaattagactaacacaaaacagttctggttagtatgagtaataataattaagttttgttgtcggtatttagcaatcaattttctaaggatatactttgacatttaaatcaatagagagtcatgtaatgtcggtcgaggacttaaaagccagctagaataataacaaccccacatgggacatttataaaaaggtcacacaaagtaagtaagtggaaaataactcaattccagaccaacccaacacgcaatttaattctctctaatcaatttagttcctaaatatccggtttttgagaagaaacccgcgtttaccggcgaatcggctctttactctctagccggagacgagatctacaattttgacgactctgcctaagatatagcaattattgggagctgcacgaagaagattttatttggtcgacggagctggaatcagctattctttcttcttctccctaatcgtttcttttagcagctctttctctctcacccgaaggttcgttatctcttttcctgattcgatccgtttctttttatttattttgcgtcatgttttgagttttcttctgttggatcgtctaattcgttttagtttcgaataaaatggatgatccagatttactaagcttgtttataatcccacatgaaagattaatctcgtcttaaaattcgtcgacaaatcgtttgttttgaaatttggcaatgttacatgttttacatcccattgtttatctcgtatctgcaattttattttttgaagaagcttttggtttatgaactcaaaacttgtgtgtcatttttcaggttggtgttaagctggaaaggttggtcttttagaagatatggttcttgatgggattgtatcatcaccattacggaggccacatgctcttaagaagcaatgggatgacttgggtagctgctctactgttgtccagaggcatcgtttccttttgactgctatgcttcttttggcattcctctgcaccatttatatctactttgccgtcacactaggcgctaggcacttgttgtgctcagggatgactggaaaagacaaggcaatgtgtcaaatggaacacatccaagccagtttctccaacggaaaactgaaattcttctagagtgtcagcctaagctgattgcattatataaacatttgtctctctgttgaaatgtgtgtgtaatcgcctaaagaatggcttgtaaacccatcagaatctacacgtaccttattctactttgattatgtcccaagattcacagttattgtacaaatatgaatcttctgtaatcgaatatatatgctaaaagttttggagaatacaagtttttttctttgacatcatcaaattttttattaataaagaatggaacattgagagaatttgttatcacagcactttgtacatttgcagtgttttaggttccatcatcaccatgttcgttgaggaaccagcggttcaacgtctaacttgggcgataaatcaaagagggaagctggagcagtcatgtcgacgctccaagaatcatccatgttgatttccatggcgcattcttcttcgtcctcctcttcaatatgtaactccaaatcttcgggtgatgaacggatcctctcaagctcaactgaaacctctctcatatttggtcgtttcttcccttttagacttaaacaccttctggcaagtttcgccacagccaacacttgttccaacgtgcaaccttctttgatccgagaatcaacaatatcaagaactctgttctgtttcatagcctcattgaaatgagacacaagtcctctgttttcttcgggccgcattacagaaaacggcttttctccagttatgagctcaaccaagacgaccccaaaactataaacatcacttttatccgtaaactggctagtttgaaagtactctggatccaagtatccaaaagtacctgcaactagagtagtcaagtgagtttgatctacgtttatggatctcgaggtcccgaaatccgataccttggctctatacttctcatccaaaagtatgtttgtggtcttgacatctctatgatagaccggagttgatgcagccgagtgcaagtaagcaagtgctcctgcaatctcaacagagatgcgcaatcgcacatcccaagtcatagtgtaatcatcagaatcatggtgaagccgcttgaataggtctccatttggaatatgttcataaaccaagataggaacctctgtctcgagacaacaccccatgagtttgacaatatttctatggttaatctgcgagagaacaccaacttcattgataaactcctcaactttatcttcatctaaaactttagatcttttcacagcaacaattcgcccatctaccaacattcctttgtagacagtgccttgacctccttgcccaagaaccctgttcatattgaagttatccgtcgctttctccagctctttcgaactgaatatcttcgatgactgcacattacctcctcttgtagttaactgttgtttcaacaacaagcctccattacgtttaaagaacattctctttcggataatcttccttctcttcttaacgaacttgatcaatccccatatcccaagtaccaagaacaacagtggaaaacctagaacaagacctgcacaaggacgaaagaaaactataaagatcatcactcttttttgctctgtgatatgactttggaatctggaaaagaactccattgattcacctggaaacagaggcttgatcttccctactccattcagctcgcacctccacgatccaggaacattcacacaagttagttctccacagctgcttagtccttttccttcctcacattcgtcaatgtcttaaaaacaaaatgaacaaaaaaggctgaatcaacacatccgtaatcacttaattaaaaccccattgaagccaaatagacgaagaaacacataaatcttaccaatgcatccaccaggaagataaggattccctctgtaaccaatctgattgcagtaacagttactgtaaccaaagccagagaagttaccatactcacaaacacagctcggtgcgctcgtgtaaatccctgtttccgtcaaattcacacaacccacaggattcgttaaccgagaatctgatgtatcaaagtaccaaccaagctcaatcaccgtaaacccattagtataaaattgttccggctctgtaacattcgccggagagtaagtctcattcgtcaagaaagcaactttacagtttcctccttgagttgtgttaccaccggagctttcaaggtcaacgccgattacttgcggtctatccgccggaatcttcgcctgacaacatgtgtaaccaccgcagatcttgtctaaacgactcttatctccgtcgcagctcgattcgcatcctgtgatctgagattcgatgtctgtaatcaatgctctgttgtcacaaccaactgagacgagacgattcgagtcggtgatgaaaaagggacttcctttaccggtgaggtttaaaggaagaggctttacgggtcgttgagaacagccggaggaagtcaccggagatttaatgtgaacaactccgtaggaactgtcgatgctgcttcgaagagtgatgctaactaattctctgttgatcttatagaggaacggagctaaggatttaccggaggtggtgctgttacagacaacctcgtaccagtcgttgagaaaacagtctcttcgtccgattccaaaaggaaaaggaatctcgattcctccacagatacggttacatgaagttgaagaagaaggtggagattgagctgtcgttatcaaaggaccattgatgaacagagttaggatagagagtagaacagagaaaaaaagtctccttctcttcattttttttttctctaatgacttttatgtatgaaagttctattttagaaattattgagccgtctcgttggaatttggaagttctattttgtcaacggtcaagggatcaattatcattacaagtttacacaacttattgtccaaatcaattttgtaatttttcataattagaatcttaattttagttatacgattttactatcattttttttcccagatgatataacaaagttgattattcacatagattattaatatcaggaaattgactattcaccaacgcaaatcattcatatgtgtgcaatggaaaagttgactatcttaattcttaaactaaaggatccttttcatcagtcgaaatttctaaattatgttggttaaggttccatcacattgtcaattaacataatttctgttaaaccgaaatgaattggtcattgagtcgaatcggattaaggttcaacatgatccatgatctgaccggattcacaaaattctcatataattgtagtataaatttttttttaaaaacagtctcaacggttttatgttttggacatgtataattatgtaagagagcccatgtccagataacaaatacttgagtaaattctgtaataattattgccaaaatatttaaagaagtaaactatgaaattattcttatgtattgggaagtgtatagtacaaagtacaaactacaaagtggttacaaacagatctgtatggttaataacacaaattgacgagtgacgacatttatagaaataacttcacacgtaaagaccaaaacagaacgtaaatgcaaagatatgaggtagtaataaatttgtttgcatgcatggttaatatattaccgaggaaacaatggttcaacatctgaccgcgacgaagatgttgtagcaatgctgtattgagatgatgcggcggtaacactcacgtagtttctcgactctacgttaacgtccactaatgtttcttttttttcttcttcgttttcgctagcatactcatacggctgcatatcttcagaatatgaacgaatcttctccaattccatcgatacttgtctcatacttggtcgtttccttcccttcatattcaaacatttccttgcaatttttgcggctgctgtcacttgattcaacttacaaccatctcttattcgagcatcaataatgtcggagagtctgttctctttcattgcaagagtgaaataagttgccaatgtcctatattcctgagatcgcagaaaagagactgatttttctccagtgattagctccgctagcacgactccaaagctataaacatcacttttgtctgtgaattggctcgactggaaatactctggatccatatatcccaccgtgcctgaaactactgtagtgaggtgggtatgatccacggtcaccgttcttgaagtaccaaaatcggacactttggctcgatgtttctcatctaacattatgtttgtagacttgatgtctctgtgatagattggagatgatgcagccgagtgcaaatatgaaagcgctcctgcaatatctacagcaatacgaagacgcacttcccaagtagtcatcgtataatcatcggaatcatcatgaagatgctcaaaaaggttaccattaggaatgaattcgtagactagaatagggacatctgtctctaggcaacaccccaagagttttacgatgttcctatggttgatttgtgagagaatgacgacttcgttgatgaactcttctagcttgtcttcgtctacgactttggacttctttactgctactattctaccgtctacaagcattcccttgtacactgtaccttgacctccttcgcctagtattctggttaagctaaagttttcggtggctttctccaactctcttgagttgaacactcttgtactgtccacgttgccttcagttgtagtcaattgttgttgcaacaataaacccccattacgcttaaagaatttcttcttttggtttaacctcctttgtcttctaataaatttgtataaccagtatattccaccaatgaataccaatgtgctgaaactagtgctaagccctacaaacccacaaaagaaaaatgaaaagcaaaatacattttctatatggctcaacactatttgtacacaatcttatatatgtatatataaaagaaaactttagatagatgtgagtgtacttgagatgaaaattttcatgacttacctataacaagtggtcgatgatttgtgtactcacacgtataaccgcccagcaaattgacacacttgcctgccgtacagactgggtttccatcaatgcctcttacgcattcattaatatctgattttattaaaattaacatgttatcaaacaatgatctcgttggaatatttttatcatgcatggtcatagaaaactaggataattagcgcaattacttatatacctttgcattcgccaggaatatatgggttgccttcgaaaccactagcgcatgaacatgttgcatagcctgtagttgtagagttatagtcgcaaaggcaacctattccgtattcacgattgtctcttcttagaattgtgtactcgtctatacttttgcatcctagagagcctatgaaggaatgattcgccgtatggatgaaccatcttaggtcaaccgtatcatatccattagcatgaagcctctccgggtcagatccatttgacaaaaagtattcctcgtctgttatgaaggcaactttgcatcccttggattctgtgttactatcatctatttccacaccaataatctgttgatacctagcgggcaaacttgccttgcagcatccaataccgttgcagcttgtatcattcataatggaaatatttttacaatactcggaatcgccatacctagcattacagtagagtaccccgagataatcatttataggtatatcttgatttgtgctgcaagtagactcgcatcccacaatacttggctcgacatttgtcaacgacgccgtgttgttgcagccaaccgctatgagcatattgttgtcgccaaggtaaaaagggtaacctgtcatatttaaaagtgatccaaactcttgtccgccacttgagcatccctttgaagctattgggtttcttatgcgaattgacccgtagcctacgttaaagaaccggcgatacatatccgaaaaagagatactcacaacttccctgttaatgatggaaagaaaaggaacagagttgttgacacaaataatctcgtaccatttctcgagatagcaacccgttccgattccaaacgggtacgggatgtcgattcctccacatgtcttaggacaagagctagcaacggtgagatcaatgatcagaaggagagagaagagactcaaaagagaacaactacaattagagctcatattaatgttttctgtttatgatctgctcaagaaaagctaaaagcagagacgggttttgtaaggatgagcgaaggaaaaatcttgtgtttagtttgacccagcaatgaatcataagtcttcatctttgaatttcgctttcatattttcttctctggtcagtctttgtttctctagtcctcctagtgaaagcttttcttgctttcagtgagcctccttgtttgaatttcaatattttatattcctccatttatttacgagaaaaaagaaaaatatcaaaacgtgactggtttaggtcgcgaggagaaatttccactgtaactatcacaatccgactctagattaaaacgtggctaattaaatatcaaaaagagaacaagtatctgtagagctcatgcatgtttattatgtgttatgatctgctgaaacattagtcagagttgcgttttttggattttcttttgtaaggtcacacgcatgaacgcaagaaacatagagaagtgaatctagctcagcttattgttttaggcttattagaatagtagacactttttaaaaagtaatttgagaagtaggtagtttttttagaaatttgtgaaatagacactttttttactttttttgtgaaatagaggttatgtgtaataagctaaaagacaaaaaatatgtcaaataccattttaccttttactttatatgaaaaaatatgggtcaaactttttatattatttaactatttagaactatttttattatattatagttattttttttttcatattcatctttttgaattttataaaaataaattatttttaaaaaataatttcttcttccaaaaacaagatgatttatatgtttttaattataattctcgtacaccagcattaaaacatagttttgtacactaacacttatacaccaaatcattttatacatatcttctaaaatatttctatttatctcatatttataaaataaaataataattgttcataaattaataaaaatataatggtgtacaccatcatgtatactattaaattaaccataatggtgtataccattaaatgaaagtaatgattatacatttttacttatgtacactaacatttgtacacttttatgtacactaatctcatattattattatttaaactttgttttgtatattatcacttgacaaaaatggttttatcttttgaatatgaggtgtacacaataggtgaaggtgtacgatattatatacggtgtacaaggtgatttatggtttgatttattatctcattattgcatgtatactattaatatcatgtacaccatattttacattttcgtacaccatcttattatgtagttatacatcattgtatattatcgtttgtacatcactttgtacactgtctataccgtataccacttcttagatcattaagaaacaaaagttatttttgactttatttgactatatgacaaaacaacagaaggctataaaggtcattcactaaaatctctattagatagaaaattgtattagaaaggaaagagaaaagtgtctattctccctatttctaaaaaaactacttactttgcaaattatttgtgaaaaaagtgtctagtttccaacttatctctattgttttctgctacaatatttaataaatcgtactttctcctatacctaaatcaacacggcctttatttgttagagtatctccatgggatagatacccttgctagtttctcaacaaaagaaaaaattattattttaattatataatatattttgtttcaattataatacttaaactaatatttgattgacatgccgcgatttaggctgagaatcgtttctccttgattctcaagtgagaaactcttcttccactctctcttacttttttacttttgggttattattttattattaagtttctcattcagaaatgatgaagatggccttacgtttacattttaaaacaaagaagcatgtagtacttttgaatattgtttctcaccattattgtacttgtggaaaacacaaaagtagttgttgttactttcatcactctatgagcaataaaaatgcagtcctcgatgaaaatgtggctaagaaatgttagggaaatgatccaaaaacctttttgactaactcgttttgacctgtcattactattattacatagttatctcatttttggtctctattgcaagaatcatgaaatcttcttataagagactttggtattacccacaaaacaacttaataattttaccttttgatattatataatccacacaactaacatgaactaactgctgacataatcgtcttaacattaaaaaaaaatgaaatgaatgcatgcattgcatataaatgtacaaatgttggcttgatctcttgacccctacctaagacgtaagaaggtattttagagctgtgaaatgtgtcaagctgagtctcggagtgaaaagggtccggtttagtgaagccaagtaagcaaagccccttgtttttgacggacattatatctcctcctcttctcttctataaattgggcacctttttccaattttacgcacagtcacggagatagatagtaagagagagctatggcggaggagcacttcgacgttctgactaaatccggtgagaagaccggtgtgtccaaacccaggcatgtttattgttcatgtgttttcccttttcttgtttgatgaaaagtactcggaaatcgaattcgtacgctgagatgtttgcacattgaaattttacgtctttgttggaaaaagtcatccttttcttaggtttggggtttgatttgatgcttcgttgaccctatcaactacacaacaaactcgaccaaagagttttaggtcaatcggagaaatttcaattcgattttggttttaaaaaaagtttaagctgaaaaatttgggatttttttcttcatgatcagctcttctttggagttgtttttccagtgaattaacctcaattcgtctctgtttggaaccatgtcattgtaggggagaggttcacagagatggagattaccatcgtgctgttcatgtctggatttttgtggagactactcaacagctacttctccaacttcgatctgatgataaagattcttggcctggtcaatgggacatctctagtgctggccatatatcagctggtgatacatcgcttctatctgcacagtaagtcaatcccattctgctttcgttacttcttctttccgtttactaaagatttcaggatactttctgtaggcgggagcttgaggaagagcttggcgtaaaactcccaaaggatgcatttgaaaagatcttcgtttttctgcaggaatggtttgtctcttggcctatatgatacatgttctctgattctttcaagagacattatttgtagcttagtttgattggtatatcttgaagctaacttgctttcgcttatttaaataagcattgtaatttattactctcaacttgagaggtattcttaaagacagtgtgctgcttttcttttgtgtactttgacagtgtcacaaacgatggcaaattcataaataatgagttcaatgatgtgtatcttgttactattctgcatccaatcccattagaagcctttactcttcaagtgagtttttttccttcacgaagctgtaagtttaagtagtataaatcacttggattcttaagtaacatttttttatgtatgtattagaaagaggaagtctctgctgtaaagtacgtaccttacgaagaatacagaaactttctgtctaaggaagatcctgcttatgtgccatatgatgttaatggagagtatggaaaactatttgacataatcagacagaggtacagtatctctatttcggtttttctcctagctattcctttttttttcttgttcatatctaatatcttccatggtaccaaatgaaaacttttatgagtcaactattgctgaggtacatattttatatagatatgttttcttacatagagtgtttcttctgaatttgttgaaggtgccaagtgaacactgaggcccgtagtttatctctgcagaagcaactccagagatattctccagtcaccctcgaagccaaggtattaatttgttacatcttttcttgtgatttctttgtttcatatgcaccaaataaatcttattttgcaccgttccataaaagacattttgagacacctttcatttatatgcagttgacagaactttctgaagcagatcagaaagcgttgggtctaattgtgaaggctgcaaaaattatggacgatatattctatgagcaggttctgtggagtccgaaatttcttctttttttgaccgtgaacatgaaatctcagatcttaaactaaattagaaagttatcctttatcaggtttggaacagcaatccagccctaagagattggctgaaggatcatgccaatgcatcaaaactggacaaactaaaatgggattacttcacgatcaacaaaagtccatggtgattatcatcaaagttactttgttctaacatttatgttctacggaaagggttaggattcatcaacggagctgttgcagaatttaattaaagttgcaaaagatttttgtcttgaatataattcgttaacatattggtgtgtcaatctcatgacgattaggagagatgatccaagagattgacgttcgtattttatttgcaggtcgtctcttgatgaaaatgaagcattcttgagtactgcggattcagctgtaaagttgcttcctggagcaacaaaagccatagctggctggaagggtcttgaatatagagcagcctttccagtgactaaaccacctggtgccaatttctatcctcccgatatggataaaatggtattcacacatgtttgatgtgtctttaccaattccttttctgttcccattactcgtagtaagaaatgtgtatctaaaattataggagttcaccttatggctcaatggccttacggaagagcaaaagcatgctgcaacaggatttttcagtgttataaaaaggcgaagtgaagctaatttagatgcttctgatcatcttgccagcagcacaaagaagttaccagactctaattccgatctgtatagtattccttattcagagatatatcgacctttcctcaagaaagcttctgaattcttgcagaaagctggggacttggtcagttcgccaaggtatatatttcaaacagtttcttacccttaccatataaaatgtattcacccattcgattggcttagtatattgaagtattcacccacaatgctttctcatagtttgaagaagctactgcacagcaaagctgaagccttcctttcaaatgagtattatgagtcagacatcgcatggatggacttggtaactcttctctgttcatacatggtcttctagtcttctgtaattttccttccttataaaagaggatagctcttgtaagacgagctctggctattttaatggtccgtaattttctgtcacatatcagtcatgcattatagttttgagtaacttttgctttgtcttatcatcttttgtaggattcaaagttagatattaccattggtccatatgagacgtacgaggatgaaatctttgggtataaggtaagactttacataagcatgtgctttcgcaatgatttgcttatgctgatgctcatcctcgtcttcacataaccttcataaattgcaactccctttaaccattactctctaatctgtatttgttttccgtctaaggctacatttgaaaccttcatcggtattcgagatgataaagccacagctgatctgaaactctttggtgacaatctaaaggtactgctctcttcgtagctgctgtcaatcaaagttgcatttctttacgttttcaattttcttttctctaagatcatttttcattttctactttccggtagctattggaagataatctcccgcttgagagtgtatacaaatcgacagatgtatctgctgctcctattcgggtcatccagttaatttacaattccggggtaagttcccctcggcatccatctgagataggaaaaggaagaaaatgtattgccgttattcatggttcacttgtttcttgattgtgacaggatgtgaagggtcctcagactgttgcttacaatttgccaaacgatgaaaaaatcgtgaaggatagaggaacatcaatggttatgctcaagaacgtccaagaggcaaagtaatgtcccttcttcctccatatttcatcaataaacggtgtcataattacatctaactaatgcttttttcttttctaggtttgaacatattttaaagcctatagctgaaatcaccatcagcaaggaacagagaggattagttgattttgattctttcttcactcacaccatttgccatgaatgttgccatggcattggtccccataccataacccttcctggtggtcaaacctcaacagtgagaaaggttatactgcttattggaagaatgcagacatctaattaaggattgtttgcgctgtgactagtaatttacctttgttttctcggtatttcctttgatctaggaactacaagaagtccattctgcaatggaagaagcaaaggcagatatagttggtctttgggcactgaagtttctcatcactaaggttaatgatcatatttgctagttattgaaactttgttcatataagtctaattttcagacaatgtaaatcaacaggggttgctttcaaagagtatggtggagagtatgtatgtttcgttcctagctggttgctttagatcgatccggtttggtctcacagaagctcatgggtaatgaatgatctagagaattatataatccgcactcctatatgtatagttcctgacattattgtctattttggcctcaggaaagggcaagccttgcaattcaactatttatatgaaaaaggagccttcgtgttccacgaggactctacattctcggttgatttcgctaaggtatcagtccaagtttacatgaaaaactttctgattagtcatatatcgaaacacctcctgaatcttgttattccggcatgtaaagatcgaaggtgcagttgagagcctgagccatgagatactaactattcaaggaaaaggtgacaaaaacgcagcaacattgcttctaaataagtactgcactatcaccggaccattgaaaaccgctctggagaatctcgaacgcgttaaggtacagtttctttacaggataacaagacctaaattgagttgagaattgagatatccatgcagatagaatgatctgcgttcatggttttgtttgtgtgtttaggtaccggtggatatatctccgacatttccattagcagaagcattgatgaactgaggaaagtttcagtttcagcaagactctggttttaacttttaataaataaataaaactcagatgatccatcatcataaaccaaatttgggatttaaaagagttatctgaatggtgttgtgttcttatcataataaagttgctacctttacatctttattccatagaagaaatttttgagagctttaagatagaatgttatcatcatcactaagaaataatatttgatgtattgtgtagataatcaaaacaaaacttgtagaaaatacgattaaggtccataatcaaactcgttatagaagccaggatttatataagaattgaaacaatcgaatattacgtcttcctcagtcgctaacttgccggaatcttgacacccaaaatacgtctggatatcgtcggggaagctccggcgagttggaatcacttccggcgatgtagatggttcgattacttcctctgatttcggagatttgttatcatccgacgattcgggctcgcgactagggcttcgaatgggcttagaatcggaatcggctttatccgcggcggcgttagggtttagataacggctgacgtcgaaattggtaacggcgttaagtccacggtactctattgccgcgatgtcgtaggcgattgctgcttcttcttgcgtggctgcacgtgcacagggtttaaaatgttacaaacaaaaaaactttggtactataccatattttcatagaactttcatcccatttgtataaatatggatttttctttttttcctttttcttagaacaactttcccaatttgtataaagtggatttctatcacgtatttgcctaatatagtatgcatattgcatgttcatgtgatcaatacagaaatatgcatgtcatctgatctatttataaataaacattgtctttgcatgtataatctttttcaaagatcaggatacatgacctaataatttgtattaatatcatcgtcgtatcaataattcggatttaattttgctaacgtgtttaattttatgtgtgagatacataagacaaaaatagtaataattgggagagatataatatgtaaagggaatgaatttgtcaataaaagttggatgagtaacttaaaaagttgaaaacaatatagtaataaatagcttgagtaagtagatgggattggtgatctagttcccaaccaacaagatttgattaccctcttaaaggttcataaacactactaataagtccatatatcaagcatatagtataattattgataaatagtacaaattattttgaattttctatgagatctatcatgtgtgtgacttaaattttcttggagttgttgtcaagaaaaaaaaaacttaaagagttgttcgtttgactacattcatgcataacgtgaccttctttgttccctaccatttttaatatcatttctattttatatgtgtagtataagatatgataccatgtcatcgtctactagagtcccacttaacaggagaacagagaataactcccattttatactaatcccaaatttcaagatttggatttgctaggaactggattgtactaaagtatgaatttacacatttcataaaaatattactataaagtaaggataatggaatgaaataccgtatgttccaagatatagatatttattaccaaacacccttccaattctagcttcccatctcccattatggtgatgcctgcaaattcatcatgattcaacaacttatgtatattagagtagttctacgtatcatattgaaattctatctaccttgcaacgcctctgtattttgatacaccgcgagaaaatccactactttttctacaccgatatattgtaagttaattataaaactatgattaatcaatttggtataattgattgcttaattagttaatttttaccttctcaatgatccaatatactcttccttggattggccttccatttctttgacgtcttcgtcataactcggcaactaaaagattcaccaaacaacacgaaattatctttaatgaataaattattgcaagtatacgcatgtattttgtttttgttcttttgttctaaaaactagtaggcgagaaccgagaagattgtgtagctaattacaaagatcatgagagaagtagttcattaaaaattaagttttaccaaaagtaatactccctctgtttctatgtaaatatagtttaagggttttattttttttttcaatttaagtgttgttttcaactttttatgcaaataataaatgtatttaatattctttaactaattatatttaattatttatttttttattagttaaattggttataataaatgatattattatataaaagagatagattaaatgagatttttatgattttttaatttatgtttaaaacccttaaactacaactaatatgaaacagagagagagtaatatggattgggagaaacattacagggaagttcaagagtgtgtctcgtccccagtacttcaatgctgctaagtcgtaggcacgtgctgctgcttcttcttcgtcgtaagccccttatccataaaaccatatattaatttaataagaattatacaatattgtttgaattatatttatataagtcgaaaaggacatatacgaattgcattggatttggacccaaaaaagaacagctaataataaacaggttctaccaatttcggtggaattcattctttaatttacagccatatcacacatgtatatatggacttttttcatcactttgtcgaagagtatttaaaagaaaaagtgacaggaaaaaaaaaagaaaaagaaggaaaagtacaatactttatcaaaatgtgtatttttttgcaacttatataaaaaaataggatattggcaagaaaaaaaaaaaactcacctagataaactgcacttgatgagtcagcattcatcatccattgcacatcaccatcatcaaaaataccaaattaaaaaaatatatgaaaaagatcaagaatcaaatcaagaacagtcgaaggacaaagtctggtccgaagaaaaaggagtctccgagttcatcggaatccaatctaagaccaaaaagatctaacaaattcttgttagttgttaccaacatatacgtgttaagtgtagacaaaccttgacgtcctttcttggtctgtgtatcgttccagctgttcttatcccacaaatgcgcttcgtatctcccagtccatctatgcctattattattcaacaatcggaacaattaaattacctgataaagaacgatgtcgtttatggtattatgagaggagagagaccttgtgacgcctctgtaaggggagctgcgttgaagaggagcgtttcgaggcggcgacttacgtttgcgtttggatgttaaggcaatggacgcagactcagacgcagacgctgttttatcgctgatttcatcgtcaacgattgttttcttgctcctcccagagacttttgccattaccggtgaatgagaagaataaaagattgagagacaatcctgaaaatggaattatgaaaatgagagacagatagttggaaatggttgagtatatttatattaaatccgtcacatcttttttttcgtttatatatatatatatatatatgttaaaattttagaacaattttttggtttaaatacagattctcagccgaatattttaaattgtactgatcatatgataaagtcactaagattatggcactaattatcttgtatttttttttaatagattttatttccggtgatataaccgtgtctagtccactgtcacgttttcttaattagattcatatatgctaccatttttgcacttttcttagtcagattgattattaaacaccacggttaagaatttctcaaatcagaattaatgaaccattttctaaattgattatgactagcaaaaaagatccatatctgtattattgtttttatctgctcatttttgtcgaagaacctaattagccaaagaaaaaaatggagtgcctcaagttttatcgattcttggttgatctacttcttggtcggcccatgagagatgtgatgccgaactagcaagaaactttgttatattttttcattttttttgtacatatttacctgttctcccaataatttagcacttggtaaacaaatatgacgttttgatcataacagcacacacacacacacacaaacaggagaaattttatcacacaataaatttcataacttccaaaccattatctgttttattaatgtttgtatgaataaaagtcataatttattaaatataatgtgtctactacctgccctcatttttatgcaggtggaaggagttgtcaacaattatggtaaaagtttgccaattagagtccaataagcacccttcaaatcaaatgtatttggtagtgacaggtgaggaatctatgtgattgtgaaatttggccatctgaaatcataagtaagcatttaaataaatactttgtttattttcgcatgaaattattaggtattaacattgattctagaatgacaaagatgaacctatgacaaagtatcaacattaaagaccctcttactaagacagaggctttgcctagtttggaacagacaggacatgagccaaatgaagcccacaagacgtctacagaaacaatgggcccaaataagcctaccgaacgactaaagaactaatgggccacaaaaagcccatctactctaatgttctatatctttagaataagtaatttgaaaagattggaaccaaagtcccattgatcttgagtttgaaattccaagacatttttgtgtgcgtgcgtgatttcgtcatccgtgacgtcttcaaacattggttatttaacaagattctctgatttttgattcgtgtgctttctatatagttgggtaccaattcattagtcagatcgcttgttcgtcaacttctctctctaatggccaatcgatcggaggaagcagagtacgagaacgattctcggcgaaatcatcaagacaagaagaaagaaggagttttagatctggtactgaaacgacctttacggtggctaagaatgctcatcgaagagcttcactggagcttcttcttcggtgtgattatcgtctatggagttagccaaggacttggtaaaggtctcagcaaagtcagcacacagtactacttcaaagacgagcagaagatacaaccctctcaagctcagatttacgttggtttgattcagattccttggattattaaacctctctggggattgttgactgatgttgtcccagttttgggttacaggagacgaccctatttcatattagccggtaaattcactgaaagttagtttctttgcttcttaatgaatgaaagatgtaatttttttttgttcgattcgattttaggttttcttgctatgatctccatgatggtgttatggcttcacacgaatctgcatcttgcactggctttgtcctgtcttgtggcaggaagtgctggagttgctatagcagatgtaactattgatgcttgtgtgacacaatgtagcataagccatcctacacttgctgcagatatgcaaagtttgtgtggtttgtgttcttcgattggttccttggttggtttctcccttagcggcgttttggtgcacttggttgggtccaaagtaggctctttaaagatctctttgaatgcatagagtcgaaatgcttcaagtgttttccactcattttgtcttctttttttggtggcagggtgtgtacggtttactcggtgtgacggcaggattgcttgttgtggttgggatggttctgaaagaatctccttctcgcagtctaggtcgcaagcatgtaagtgttttgctaccctttggtccaaccagattctttaagctagtaatgtaatcgagtaactgtgctttcaggttaacgacaagtttctggatgctggaagtgcaatatggaaaacctttcaatatggtgaggtgtggcgaccatgcttgttcatgctattgtcagctgcagtgagcttgcacattcacgaaggcatgttctattggtacacggattcaaaggatggcccttccttttcaaaggtgctttcaccttttgcataagctctagagctgtaattcaccttccatggccttgcttaaaacatttgggaactctctgtgatgtttttggctaaggtagttattttctgttgcttaggaagccgttggatccattatgtcgtttggtgcaattggctctcttgtgggaatacttctctatcagaactttctgaagaacttccctttcaggaatgtcgtcttctgggcactttccctatctgtcctgtcaggatttctggatttaatcctggtgctgcgcataaatctgaagcttggtctccctgattacttctttattgtggtagatgagtttgtttcacatatgataagtagaatcaagtggttacccttacttgttctcagctccaagctctgccctgccggtatggaaggcactttctttgctttgctcatgtctattgaacatataggacatctagtgtcgtcatggggcggaggagtactactccatgccctgaaagttacgcgtactcagtttgataatctctggttggttattgtgatcaggagtttattgagggtaatcccaattggattggtctttttgataccaaatgttgattcaaactcaaccattctccctgctgagatgttaacaagtagaataagtgaaggtgttgataccgagaagatagagatgaccgctctgatcagtgatgaagcttgagttatatcagttctgtttttaggtacaggaacatcagattcttgagatgaccgttcattgtttgttgttcttatggtttagataattttccttcctcgcagaagatcatcgaacatttttgcttacaattcatcatttgctataccgatacagaaatatatttatttataagattagtgggagaattcaaattggctttgccaaaagagatgattggctttcatgatatgaagggagcacacaaatggatattaagttatggtgtaggcatcagactctgcagttttctccgacaattcctagcctctcttgtgtggtatcatatattactctctggtttttctgctgataatttccgatgatcccgacttcattttcatatgacagacttgctaaggccaagcagactagagatgcgtcaggcttgacaaagtagaacacaccagtgacatccacttcgagctcagcgttaccttggaagatcattttgataatgggaatgcttatgtcttcataacttgtgaggttaaagcaagtgtctaagattgaataaccaggagcagtaggaaacccggaaaactgtttcagaaactctatcttcacagctttgtaaatggaaggtggcaatcttgtgataaccgttcctgaatcgattagaatccctctgccaaagcttgaagatttcagttccacgccaccaatgctagcaccagtgagattcagaatgtaaaaggaacgaagctgagggttttgtactaacggcgtgtaggaaactgaagttgaattcgtgtaaacagaggaatcgttaccaaaggacaatgagccagaagctccatcctcaagagaaggtaaacagtatgagaaaactccgttgaaagttttcaaagtttgggagactaaagagactgaacttcttcccaaacccattaaaccagaggatcccccaaacagacctttgttgtttcggccacaaccaaagacaaagttttcaagttttgtgtcgcccaataggatgctttcacttgccaagtctcctcgagtgtatgatccatctccatagctgacaacgtactcacaaggtgtctttacaacaccattgttacctccacaagggccggaattgctggtagctgccacaaggtcctgacaagtggatgagttacagaacaccgtcttgtaagaagatgagactgatgggtcatacaaaggaccttgttggttgtaacaggatctgcaaggctggcattggacccaagtcaggtcacttccagtgtcaacgatcaaactcatgtttttccctcctaattcaactgtaacgatgtagttcaaagactcaagttttatccctgaggttaacggaatctgagtttcggaaacagattgttcagtggtgcttgaggtcattgctttgattttgagttgaagtgactgaactcgaatgttatccaaaactaaggctcttctcatcttcttacccaaatctatagtctttcctgagcaaagttctctatgtttcatctccaatgtagtggattctcttccttttcctaagtttttcaaagcagaatcatcagttctcataaagatcaacaaatcttgtctctttgtaaaaagtaactatactaatcccaaatcaatacaaggaaaaaggataatataaagtagtgtaaaagctaatgactttaactaagagtttaaccttaaattacgccattaaatattaaactaaagcaaaagaaacagtatctctacggttggtgagcctttgatgaaaatagaactgaccaagactgcgagaaaaacatgaagttgaagcttcgtatgatttcttgggagaccagatgttgttatgtacactgagaatcttcttctcatcgacgccatgaacaacacacgagagaaggaaaagaaaaacaagtagcaaaggagcaagtgaaagattcaatgttgctttcttgaacattttcgtaaggaggattctcttcagaggaaattaaagaagaggcgagagagaagagaggagagaaagagagattcttgggaagtttggaggtagtgaagagaacaaaagaggagaggctggcgagaagtggcaaatgaacaaaaaagattggaccccactatgtgtgcatgagatcaaattattggggattcacgtgaattactgcaattttgttaccaaattactaaaaacttgcaatgtcttttggttgtttttttagtatatgttaattttcttttgttacaaaaataaaattcaacgtgagatggtggtgctactgatgttaagtgttggccgctagtgctaaaattctcaccattttattttaatctttgatgttattatacagattttttaaaatctataaacgtttgaaattgatagcagtgattaaggaaatttgtatgtatcaacaatagcttgaataatgattagatttaagcataactaaaaacaaggcattgtctcttttttttttttttctgtttttatattttttttcagccaatcacaaatcaacacaactgattttagcaattaacattttaaaacttaataaaatttccatatcaagatatttataagagaaaaaaattaatagacatacaaagagaaaatgtaattttaaaagaaaaaaaaaatcatatgaaaagaagaaaaatgcaaaattttgttattaaaatatatattattatccatattattaggaaaggaaaatattaaatctatattcgaagtccacatgtgattggtcatttcagtaattgacattttaaatttttataaaatctctacattaagatacttataaaaagcaaataactaaataaataaataataaatgaaacaataagaatgtaaacttgtttaaaaataatgtaaaaaacatatcgaaagaagaaagttgtaaataaaatatattcacattgcagagcttcccagtcaaacaaatcacaaataaaacgttacattatttagtcaaaaacggttgcttttttcctcaatagaaaactccctcacgcgcccaattttttaattttaccaaaaacagccaaaaacggtccacagattttgaggaggtggcgtcgacgcgctaattgtgcgagtgggtaagaatttgaatttcgcagttatgttttgggctgatttttatactgcccactgggctacacaagaggaaacccagtttcatataataataggcccacctaatagaaaaagcccttcgtaaaagaaaacatagtggaccataataatttcatttgtacaagaaattttgaaaatgtcatattttcgggaacctgtaaaataaccacaattgcaacactgggatctactacagtacaagatttgctctaatccatcctaattaattactggtagtagaacctgtataatattattacagattctaatcagctctggtagaaagacagtgtaagtaagtatctaagaaggcttctctgtacaaggaattctctcagggatgtgttctcatgaacatagccactgaagatgaacggagctgccacattagataggatcaaagtcgtaaatggccaattcattaattatggacgtgtacatgtaaaatcgtttttcaacttcgccagctatccaaatcaaaatttctttacttgccaaactacaaagctgtggtggaggccatattacgcttttaaattagcctacaatagccttgcaggaaaaccattgcaaaaccgattcaatagtttgaggtacacgaaacgttcattcagaataatcatcctcattaccatcactatattgattggcatcttgttccggctcgtgtttccaagatctaccaaggccgccttcgtcctctaatcttctcatcttggagctcgaagcaccaaccctagaagagtaaacctacatccaaagccccaaagtccaaaggaattggtaagagaactagaactttccacgtgttactcttttaaaggctaaatgtatggatttactatacccctgaatctttatgttctatcactgatacagttgatctccgccttacagttacccttgaaggtactggaaagtgttcaatctcatcagaagatcttccttccctggcccttttcttcctcaagttcaacctcatgggtaggggctgccaaattctcaacggtcatcccaaagtattatagacagaagaaaaaaaagatacacaactggaatatgtaacaaaaaccgatgcaataccagatagctagcggtcccattgtcaaatgataccaggtatgtgccaggatcgtttgcattgggttgtacctgttataacatcaggtgacatatttatttcaatctgcaactcaaacaatcaaaatttcacttaaaccacattggctatagtacatacatcccagaggtattcgcgaacccaagtgtaagagatttcttcgttttcatcatggatatccttagacaactggcacagcaacataaattgataacacatcaatcaaactgaacttttcttgacttgtcaaaatttgtgtaaaagagagatcagtttatggagaggcatgtctacctcatccaaggaaggaaccatgtacgccagaaatttttctggattggcagtgtctgatccagccaccacatagcttttcaaaatggcctgtggagtatgaggtcagagctcgtcatcaatatgaaaataaggcaatcaaccatagttaagattcagccccatatatcatatatcctatcctcattcaagtacacttatgtaagcaacaaaaacgatatagttgatacagtcatcttttctctcaggaacaaagtatccctatgatagagaccagagataattggaccatactcatggatatcggtaactcataactcacccgtgactcatgtgcatcacgaattgaagggtccaacttgccaaagaattcagaatcagctataggagcaccatcaaaattcgctaccacaaactgctcatcgtacctgtgtcaaaaaaggaaggggagagtcaaatgtaatagcatagtatgctacaggttcagtgaaaattattagtggatgtttcatccaaaaggcaatacactaaaaccctagcaaagaaacatttgaacaagagttggagcagagaaaagggaaaaattaaagacccaacatctctcttaagtgttgtatagttagaccttaacaaggctgcctattttcccacccgattgattacactatcctataggaaaactattcgtgcatgtttccgaccacaggagatccttcagagagagccaacataaagataatctgtaaagtgtcagctttcaagctgtgtctacatgtaggactattatgagaaaattttgcctgattcggtatttcagatttaagattgtctgcaaggggaaataaagagcatccaacctatcaaaatatggcaacagtggtagaacttcaaccggctgcaagtttttattggtggcatgaactggtcgagacttgcatgcctcaaaggatgcttcaatatccttgatttgtctctctctagagaccaaagaaaaataaaccattagacctttttttttctcactttccttagaaatacacatatttgagaaacaacacacctattgttaagattgtgcaagatgttgatgcctcctttcatctctcgcagttcctttgcttgcttctccgttagcgactacacaaggtaaacataggaaattggaaactgtctctagaagctatacatggcaaaacaaatttccaacaagcgagatggatagatacctgtcttgccgattcgttattaatagaagaaatgtattgtgttttgacgagccaagacatgcctttatcagtaggtctttctttcctccggatgccatctttcttaataggtgtaacagcgtcatcatcacgcaagagttcttcatcttcaggggcaagaggtgccttgactttgggagggctgaaaagagctacaacagtaagtatccccagtagatgaggtcgctggcattaaagacactaagactttattgagagcacatacttgtacacacttaggtcaagcagatccaagggtattccaagatcaggctcgacaaagatttttggtttccataatttctccagggatgtgatggtatactttgtaaatctagtgggatcaaaatagctggcaagtaaggacagtagaataacacagaaataaaatttggcaataatagagaaacatactgatctttatcccgtttaatggtcataagcttaagctgtgcactagggtcagggagctcattccggaaccttgaagaagaagatgaatatcagagtctaacaataatatgtaaaaaagatttaggtagtcgtttgaagaatactgacttgagcttgcagatgaaggtggttggtttctttaacctattctcgaccctgtcggtggtgagtaggggcgtcggcttcttctcctcggtgtgtcccttgggcatctgagacttgtgagaatttttcatctgctgtctatgtttttcgtcttgcctttgtttctctaactccctcttcttcctaagcctcctctcttcttcggtctcgattttcttagaatgaggaagatgagacctgtggtggtgcttcgatggatccggtttagcacgctcccgccttccaacctgcttggaggcccctttctcgtggtcattgggaccctggtgtcgaggaggatcgggaacgagcggaggaggagctgagggaggtggcggaggaggaggagcttggagctggttgaattgaggatagtggggcccctgctgatagtaagcatgcggaggaggaggcggcggcggaggatatgagtacggttgatgcgacggtggtgggggaggaacaggagggggtaacgacggcgggggaggcggaggggccaaagaattttgagatggtggctgaggaagaggaggatacggcggccggtacgacgccattctcggtgtactttgtgatctgaatcacctaaaccaactaaaacgagtcttcttgatatatattaattatatagctccggtcagactgatttttcctttttactttaatttgggcctcactagcggcccaataaccgctactatcatatgggttctgataattacggcttcaatacaaacaaaaacaatcttaagctcaccgttttatgaatcccaaatatgaacgaaacatgctttgtaccaccaagctcatcgacgtgtgactgtgtgaggaacacaaaatatttattttctacattgataattactcaaacattatgtacagtatagcgaaccgaggtgtgtggttaaacactcaacacgctggaccaacttatgaaaacctcttaccaggacttcacaagccgaagatgttatggtcgttggcactgaaaatagcaccgccaaactgcctggtgttcaagtcgcctccatcaagggcggtcccaaaacggtcaagccactgggcaggactgggattctctgcctcttccacccactccgacatcatgtcaatgtcctccagggcaattgggtctgtctccaaggttatcatcctccctaactttagattctgattcacgtacgccaacttgttcaatatttctctgtcaatcttgtttcgcctttcccagtgcatctgctggaatgtgctccattggcgttccaagttgtaaccgctgcaaacttggcttagtattctgatggccacccgctgcaaaacaggtgctgagtcaccaaactgctcccaccagagacctgcattactaagcaaaccattattagacatcaacttctagtcttctagtgcttcgttaccaattctaaagatcccagaccatacccctaatagcctggtgaggggaagatatctactagttttgcaattcggtttactacgtgccaggctatatcaacctggacttatttagttgtgtaataagaccatagctttaattgcggtcatagataagtggattatttttctcccgactcagactacctatacatctctgttcactagtcatgacttaaagaaaatataaatgtatttattgtccatacctggtgaaactgaatccctcgcctccatggccaggttacagccgaacattccctttgccctagtgaaagtgaatatctgatttgtaatatcacgccgtagatcgctagtaggaagaagtttctccaacactttgaaaaaatcttctttcaaggaagtgaggaactttatctctgggttatactgaatactggggttcaagaatgctgctgctgcatgaagaggtgaatgcaaatgctcacaccagttagtatcaactatgtcagaaaagaccttatgcttattctcatccatgatgtagtatgtccgtattgactccttggccttggacattaactcgtatatagaacctacagcgggctttccagtagaaacttccctcaacactttcaggataggctcggaaatagccacactttcttccacagctctccagaaatcattatcctctaggatattcacgcatgaaatgctctgtggtttgttagtatttgtggtatactctgggcaattgaacatgtgttttagccttgccttttgtttcatcattgactgtaatgatagaaaattggagacagaccttgtgacaccgcttcggataatatcttgcccgcctgttaactttctcaataaatctagcacggggctattgttgtagacaaacttagatatgacctgcgcttgcgatatacattgattgacccaatcaaccttggagaattcttctaagatgatgttcaaacactgagatgcacagggggagacgaaaatggttgcatagttttgcaagagatggtttgagataccagtgtagcagaagctgttgtccataatgatttgcacaatatgctcctgaccaatatcttggatgacagaatcaaagagatcagcaaggcattttgagttcttgaaatatgaggaggcgtcgacagacttgtgaaaaaagattctggaaggtgaagagacggagaagttaatcagtgctcgtgatttgttgtcggtccatgcctcagcgatgatagtacagccggtggtgacccactccttttcagtgtctttcagttgtaagctaatatctgacttaaccctgtccagccattcagtcttgggagaaggagcaacaaatccaggaccacacttggcaacggcgtcgagcatatggtgataagagggtgagcgggcaacagcgaagtcaatcttgttctcaaagaagaagagagaaatactcctctctgcaatgtcctgcgcattaggaggagaactaggaaagactagtttggacgcaggagcatcaaacggaggagataaaggtggtggaggcttgtacttgttggtaatggggggatcatccttggcagataaaatggaacgaactctatcagtaacatcgtccctaaccttggcacatggattaacccctttactgggaaggcgagagagatgatgcttcaatctactaatgccgccattaagaactctagagcaaaacttgcatttaaccttgttaccatctagtttctctgcgtattcccagcagatatctttttctcgtaccactgtctcacacaacaacaatcgaatttttcatctcaatcataggaaagaaaataaatagagctgctactttactttacattacttacttggtgaatgatatatgatgttgttcttcgtcagcttccacctgccaacacacacaaaaccctagtaaggaaataagaaatgtatggaggattctagatttcctcttgaggattgccggaatatgagaaagacacatgacgtagccaccggttcccggagaggagagaaacagattcgaagatctaatcggagaagaccaagtagcaagaaatcaaagagaatttgggataaagaagagtaattgggataagctgctttaccgagagagaaagagattcacttcttctcgccggaaccaacacttctgagaagttaatttttcgcgatattttgctctccttctttcttatgtcgtcgtcctagttttactttcccttccttcctctaattgtcgtcgtcatttcactcttaattacattttcaatgaaatcgatactagtttccaccactttcaattcactatcatccttaatttggttcactgcactaaacgattacactcaacaatcaagatattggctcatcattaccacgcactagaatgttttagctatcgatgatttgcagtatacgatgaccatacttgaagtatttaagtaagaagaagaaaaaaacaacaaagctagctagcagtcacaataaaattgatgatcctgaatatttcctaaaaggaaagcacaccatatgcaatcacatgttgctaccaagagactactagcatacacgagtatatggcccagagaaacaatttccataggaggattattacggacttaaaaagaaacaacaagggaaacagtgattacaacacaagattttaaagatgctgacaaacaaacaaacaaaaatctcacgggaagtggaaggtgaacgaataggagaggagagaaatggccataagagtcgtatgagacataacaaattagattaagcttatcctcagcggtagcttcgatacgaagggctgtacatgctgctctcagcacactgctccagctccttgggctgaggcaacctcgtggccagtcctatatatataaggaagtgtaatgttgtcattcacactttaaaaaagaaacaccacacacacacattacattactagtgcgattcacacttgaaacacattacatcaggcaacacaactacttacccagttcgtaggccttggcagccaccttagctgcaatacgagctgagatttttctgatattcctgaagggagggtatatcatccccttctcatagtgttcctccatcagttcctcagccaaagcttctgatgctgccagaagcatgtcatcatggacacggatcgtccctgacattattagcccgagtccaaacccagggaagatgtatgcgttgtttgcctgtccacataaacgtcagaatcaactctcttaaattacttgtcaaatcctattctacagctgtggtcacaacctgtccaggcacaaacgtctttccctcatactctactggcgcaaatgggcttccacttgcaaagatcgcccgtccctgtaaaaatagtttgactttgtaagtcaacgacaatactccacttctctctgatcatgagaaatcacaatcttaactcgtttacctgactccacgtataggcctcttctgccgtacattctgactgagaagttgggttcgaaagagaaagaatgatgggtttctgtatgcaccaaatttgactttatggtcaggactatgtgctcctagaaaaaatgaatatgccaaaatgcttctttctttttcatgcaagtccatgcggaaaaagtatacctcatttagctttgccatggtttccaccacgtcttgagtgaatgtttgacctacacctgatgttccgatcagaactgtcggcttgattgcctgatgaaaaaaaagaaaaaaagaaaaagggttcagttgactaaaaaaggcttcttccgcagagatatcttctgcagcagaacaacagccaacacaccttgacggcatcaacaagttcccttattggttcatggtcatgagcccagggctttttgaaatgttgaatggattctttccgggaactgacaatcaatccctacatagataaaaaggtgtacttagatttaagtacatgcaaaacaaagatgaatccgcatctcataagttacctttgaatccacgagccaaatattcttccgagcctcttccaatggaatatgggactacagtcaaaagaaaataaaagatactccatctaagaaaacaagaagcttaacagagaaaattaacacaaacatattacttaccttctttgaaatctcaagagcaattagttcagctattccagtgccagcctgcatcacaaaaaaaaaaagtggaagtaaaaccatataacaatcctgcagattgtcccatccccatccaaggaatagataaacataatgacggaatgttcagtgaaatcccaacccttacctctccagccccgaggaagaggaatctgtggtctgacaaggatccccccacaaatctaagagcagcgataagtccagcaagcacaactgatgctgtgccctatatatgaaattacagtttcacaagttggtaaatatgtaatccaagccgaaatcacctcctgtctcacaacttaaacaggatatagttatacctgaatatcgtcattgaaaacaagatgtgttgtaccatacttagctaacagatcaaaagcattatggttggcaaagtcttcaaactgcaaatcatcaaaagaaacatatctggttacaagacagcagattcatgttggtggagtacacttatcccacttatccatgtctcaagctaacctgaataacgactttctccccatagttctgcttgactgctgtcatgaattcatgcataagttcggagtattcctgtagaaagaagaggattaagggttcagtttcaccataattttcacaggaccgtctaactgaaaggtgaaaggtgccaattacctctcctgtagctctcctttggcggagccctatgtagaactcatcgttcaatagcttttcgttgtttgtcccaacatcgattgttacgggcagacactggcaaccaatatacagagagaaaaagatgagtggatatggttgaatgcaataaagctgattagcataaaactatacttacggcagatggccggacacctccaagggctgtgtagagagaaagtttcccaacaggtattcccattccctgaagacattaatgatggcatgtaatgtgcaaattagtaagaggataaaccctgactcaccactctcatgaaagcagaaaagaatcaaacaacttgcctgacatccaagatctcctaaccctaaaatgcgctccccatcagtgacaacaatgacctggatgttcttctcaggccagttcctcagcacttcatgaatcttacctctattattgaaaattgtatcctcacttaaaagatgagaacaagaatagtgaaagtggtagttgatttccgtataaaaaggctcacttttctttcaagctgataaaaagcccctgtggacgcaggaaaatgctaccatacttctggcaggcttccccaaccgttggagtgtagataacgggtagcaactcctcgacgtgatcaatgagaagtttgtaaaacagcctctcgttggtctcctgaaatacaaaagcattgtgaaagaagttgggtaacaaaggaaggcacttggtgtagttgagatagcgagacttcctaatgagttagtttacctggagatccatcatagccatatacttctgcaagggaacttgatactgacgaagagtgtgcataatttttttaacctgtagacaaagcgtgcagtaaaaggatcaaaagtccaaatctccagttgcatatatatatatagaaagggtaagtgaaacctgacaagacgggaaacctgaagatcttgtgagataacagtgggggggaggaggccgcgtagatagtgagcgtcacgctctctgtggctaaaggcaaggcctttgttgtgatgtggatcacgcaacaacgtatacccactggcgacagagagagaccaaggagtgataggcatgtcctcggtggcggcatcctcgccgtagacatcctgaactccaccagatacggtggatttgggaacaatgtcggcggcggaggtctcgagagaggaggatgaagtggcagtggtctcaatcaaaacgctgccggtgggatcctggttagatccgagagaggaaaagactctcaaggaagcaggaggagtaattatagttctaggctggcgcagagagaggcgtgtggaacatccaggaacaaccgtcttgttctgagaaaccaaagcaatgagactttttcgtatataaaaaaagatgagacatggacgatggatggagaaggaatgatgtaaataataccagaaacaacgagggagtgagagagatcatggcgtctggggatgccttgtctcttagacggaggaggagaagggaggagacggagagagtcttcttcttcagagcggccgtggtcgtggatttcagcgcggccgtggtcgtggatttcagcgcggccgtgatcgtctctcgctcactttctctcttcctatctccctcacacgctctaaatctgctgggagagagtcttcttcttcagaacctccattgttgacgtgtcttcttccttttctatctcttcccaaattgcgtctccactccttggcttctccctttatttaccaatttgccattgctcaccggtccctgtattggtacgcttttgtcaattttagcccacaaaatctaaattataacttttcgttgactctgacctctctctcttatttcttttcaattgaaaattgtgactcaaactagcaaaaggacagacaatttcaagcgaaaatgcaactaccatcaatgtactggtactaagtagatttagttggtttggaattggtatgagagagattcaccacttgccctctctacttgacatttatttttttatttatgtgacagaaaaggactcttccaacttggacttgtgtcacactcgatgcccatcctgtgaggatccacgtcaattgggtaaacaaaaggccgcttaaggcccaacttgggtccatccataatatgatgaatagtgtcatcctctctggtttttggaaaaggaaaagttgcaatgaataaaagcaaacaagagaattgcatctcatcattatgctctcgctttatttaacaaaaactttttctttggccaatgatcgatccttgctctacatatatacaagtattatcacgagtaagaccccaaacaaaaatgggagtttcctctcccgacttccgagcccctcctccgtccccggtagcatccagccgccgtgcctccttcacggccaacgaagacgtcctctcggagttcctggacaagtgtggtcgagtcccaaatcttgtattgcccgataaagtcttccccaagcacacattccttctcaaccctcccaccttcgatttccaccggttggactccctctcggctctgcttgatgccatcgccaccatcggttgttttcagctcgttaaccacggtgttccagaggctatggtgaaagccgccatggacaaaaccattttccacgatgagacggaggagttcgtgtttaataaagatattaatgctgatgatcacacggcttgttattcagatttgaggtaaggcagcaaaatttactatatatagtaattgattaggaatatatattgtttaaaataaagtagtaagtaatgatttgaagatgcagggagttgatgggtgaggcagagaggatagggaaggcggtgagagaaaagctaggagcaggaggaagaagccaaaaggaaggggtaggggtttgctacgtgaagaggcataatattaaaaacgaatcaaaggaagaagccataaggatgctgctaagaggctatgacgaaagacattctctatgtctcaacttctgccatgcagagttccacgtctactccaaaagaggttgggtctccttctccccacgtcccgatgcggtgatcgtcacaatcggagatcaaggctggagcggaagattcaagggcgttgtggggaggccccttctttacaaatcagatcttcatcacaatctgatttccatatcctttctctacactagtactaccactctccacaacacaagcagaaaaattaccaaaaggacgaagaagaagaccatttccctcttccaacagctcctctttgctctctttctcacactcctcttcccttttttacttccttgatcattacatacttgttgccttgttgctccttttttcctttttttctttggaaactaaaatacaagtgggtaatgtgtatctcaatcttgtttaattttagcctttttcccaagcaatgcatggcccaatcattcagtttaaaatcccgctatatccaaataacgatatttgacccctcacccattcggttatcaatctcatgcccaatccacttgacactgcgcaagaatcacatagatatatactctgaactctgaagtaattcttacataacccgagattaattaggtggtgcaagagcacatatccaccttcgagtatttcactgcaagaaacgtaacgtgtatatatatgcacagatttgatgtatagtaatgctatgcatcgttttcacactacgtatgtaatgtaagtgtaactataatgcaatatagacaacaagatatatagagttatgttgaatcagctacatataatagacaagaaatgtatgcatgcacgtgagcgtcctcccactttccaagttatcgcaaaagtgagtttaaaacaaccaatatatattttttcttcttcttctttttgttgggattgataatatttacaagtttcaacttttaacttcattacgagtggtcttcctcgagtccatgttgttcctctcttatatgtgtggttagacaaaactcccacacacgtgacctatatatcgttgtctctgcgatccatatagttccttttacttacctccacacaattcttgagggcttgcttttggtacgtaattgtttgtatcttcacttttagctcgaatagcacatttttgtatatttgcacacttgcttatctgatttccttctataattcagatttcatgctacaaaatgtatctaatttttgcaatctctaaggaaactacattaatgagaacgaaatgaacaccaagtttacagttcattaaaaaaatgacaaaagtttagttgagatcgattagtgacggcagacaaaaaataaataatgtttttgtttgtatatatccccatatatgcatgaactcaatacagagagagatataccaatttagaagagttgtattaaaggctaggatccagttgcaatgtagcacgtgaattagtggcttcattaattagtattgttgtgaaaagtaaaacaaagagtaagtaaagagctaggtcgctatagcgtgagcacgtacgtgagatggcaatgctgaaccacacaatacacatgaatatgtcaacacagacagcaccgcttataaataccaaagcttagcgcagacgctctaggtgaaaaaaagaagattggatatggcagcaaacgggagaaggaagagcgtgagcggaagcttggtgaagccgcccccgccaaaggtagggaaaaagtcactgcataggtccctgtcagacatatcgctggattatcacagagaagaagagaaaggactggggacgatagtggaggtagagaaggcaaagtgcgagtgctgcgggatgagggaggagtgcacgatggagtacatagagagggtgagggagaagttctttgggaagtggatatgcggactgtgctcagaggcggtgaaggaggagagggataagagggaagaggaagggctagaaggggccttgaaggagcacatgagcgcctgcctcaggttcaacaagctcgggagggagtatccggctctcttccaagctgatgccatgagagatatgctccggagaagcacgaggggtcagtctattatccctaagcccgccatttcccgtacttcaagctgtattcctgccatcaccagggaccttaattaatttgtctcttctaatatcttaacgtttaatttagtccctagctagctatagctactagtactctaaacactcatatatatatatatactacagtactaattaataaaactgatccagatatcctggtcaagcgtaatataagttgtatttaattcctatgtattttcgtttctttcaatccaaaggaaccagatacttttttctatagaaatgaagggatcatgaactgtctatatagatttgttttttcgctataaattttcaattcagaggaatagaatggatgtgggatgggatgatcaatgatgggtccattcttgcaaatctcttattcaggtgaactcatcatatataaccgctagtttaccacccggccgagtggacgacctattcgtatatctgttatgacgacacgtgtcaacttttctttggctgtatcccctttcctttaaattctgtctccgttgaattccggatatatagatttaagtttgtgactcctcaaatttctcttctctcagttgttgtagtattagttataacactatcacatctcaaaaatctaattaacctatcgtccacgtacatacaaatattaattgatgttataaggaggagaatgtgaaacatatgagaaagtaaatacaaatatcattcaaatcgggttctttggcatttgcgtcttaataagcagagaacatgaggcacgctgattgtacctgctcatgtacatagagatagacaagtcccccaatagagatgtttatttttccatcccattttttaaattacatataaataaatatataagaaaggaatgagctaggcttgattcacaactttcgtctttttttgttataaaagaaagaaatacaaagtcgtataaaaaaaagagagagcgaaacaggaggaagcagcaacacggaaaaggtggaggagaaaaagagagtacttgttgtggtataaagaatgaaggagtgagtttgtgtgtgagttttataaaaataaaaaagcaggagcatatcacacaaacaaacaacgtagaaagggttcgaatgacgagtaatggagaagggggagaggtggtggcgaagaggaggaggaagggaattaaggagctagtgcaggtggctctcaggggaggttgtttggctgcttcagccacggccatggcggtgatgctgaccgctactgaggagggagtggcagacatctacggcttcaagctcactctctcctccaactggtctttctctccctcctaccagtcagtcttcttcttcttcgtcttcttcttcttacgagcattataattagggacagacatagcaattagaattttctttttatctgaatgcatatatatatattataataaaagaaaagcagcaaaacagaatgtgtgtgttcggatgacagatattccggtgaacagaaacacatccgtgaaccaaacaacaacatgacattattgtgtgtcctagctagttttaaactttgtgattatatatagtgtatatttcattcatctcactaagaaagagttgtttggtgttaaggtatgtggtgggggcatgcgcagggaccgtgctctactccctgttacagctctgcctcggtgtttacagactcgtcaccggatctcccatcacgccttcccgcttccaagcttggctttgcttcacctccgatcaggttcctcgtctccttttctccattcccttttcttccgaatgtaacccatttgatttactgtgtgcacgcagctcttttgttatttgatgatgagcgctggatcagccggttccggagttaccaacctcaacaaaaccggcatcaggcacactcctctccccgacttctgcaagaccctttcttctttctgcaatcatgtcgccctgtctctcctcttagtcttcctctccttcatcttcctcgcttcctcttccttctttactgtccttgtgctctccactccctagtctcaatattttcgctgctttatataatccaacaaagactctacttgcaatcccaaaaacaatgtatttctcttttgagtatttctctgatgcaatacatttaagatgatgcgttgtgatgaaattacaatcataatttgggtacagagacgttgatccctagatctgagagatccttagcgagcgaatctgcattctcaaagcataacccacccatccctatctctatagcacacttgacgttggttggcctgcgtatcagacactccttcagatcaaaatggtttctttcttttaagttataaaggcattgagttcatgttataacctgtcatcaatgaatatacagtcgcaaggttcaactccgaggtgtcccacaacctcgaggtagaactctggatcaggctttctcttccctgaaagatataacacatgaggagctttgtatgtagtaggaatggtttggatctgacaagcaataagtagtaaaaagaggcaagagatgtgtgatgtaccagcaatacaggagcaaaacgtccatgataagtaggcagaaagctttaacttgtcttcgataatgttgtacctatggaaacacgacaagagtaaacaaagagacatgaagctccgtttcaaagagtgaaaggcaagggatggaaaccagatgggatagttagtgaaagcatgaatctcgaagtcgtcagctgccaaagtttgaaggagctcttgcatgccatctaagtaggagtaacctgacctcatgcactccttaagccctgcaataaagaggattgaaataggtacgaggaaaccctctctctgtgtatttacctatctatctatatggcaatctcaccttccaaatcaaaatccctcccatctataaagaagtttctagcaagctcctcctaaaaccaaaagtcagaggagataatatgaagaaaaaaagaaagaaagagtggtggtacctcacctcatcaatcaaacccttttcaaattcgatccagaccatcgggtgcttgcactctagtagttgcttcattggcattctgatccacaacctcagtttatcattgatgaatcgagaaataaattcgaggatttcactttctcacccgaagaaggccggaacgtcctggtaaaaggggtcacggacgatggtgtccatgacgtcgaagaggagaatcggaagcttccttttccgagagatttcatcaccactgctgctgcccagacagcaagaacccgaggcccgaacaggattcttcttccacatgttgggtttcagattgatgaattccgccgatgtgtgcatcgccgccgccgccatcagaaactacctagtttctagttccgatcatcatcatttgtaaatgacaacaggggagtcgaaacgcagcgtttagagagaaaatcgcagaggagaaggtgattggtccacgtcagtaattaggatgacgtggtgaagaagaagtggcccatgacttgcagcacgaaggagaatgaatgaattaaataaaaaccgtttcaaattcatctccacgactcctcggcctcggagagctcaaccgccactttccttctccttgtttatataaagcagagccagccaccttcatttttacacacaaccatcaaagctacgtacgaattcctctcaaacatactatatacttacaaaagaacaagaagatgatgatgatgatgatgagatctacttgtaatctaacactaatgctctgcatttgtgcccttgtggtggcttccatggcggcggaaggtcctagggatttcaaggttggagacgagttcgggtggagagtcccactccagaatgattcagcggtttacagccactgggccagcagcaaccgcttccacatcggtgattcactctgtgagctagcttgttcccaacttgtgttttcttttttttatcattcatgatcggtaataattgattggtttctaatcaaaaatatgtcagcgtttgtgtacgacaaggactcggtgatggaggtagacaaatggggtttctaccactgcaacggcagcgatcccattacagcctttgacaatggaaacagcacattcgaccttgatcgtcctggtctcttctacttcatcagcggctccaaccagcactgcaccagcggccagcgtctcatcgtagaagtcatgcatatccaccaacaccatgaccatgacgcttccatgcctccatccatgtcgcctctttctaattctgcctctccctacgcatccgcatccgcatcttctgctgcctcctccctgcctacggcttgtcttcttattcctcttttcttaaccattgctagctttcgtttcatttcttattagtcaaattgtttcccttatagttcttctcctcttttacttttcttcatctttttgtttcattcatcgaacccttatggtataatccaatttatgttcttctctgacatttattataagttttacttttcactgttcaaaacaaatcaatcaacaaactgtggaaaaaaaataaaaaatctatcaacaaactacacaagagcatcgttattaatagtttcttaaaacaattcttaagttaagagacagtcttataatagcttataattaacaaagtctcataaataagagactttaatacaattttgttagatataagacatatctcttaactaagagtaatgttaagagatcatcaataaggataattttatgtcgttagtactaatagaaccgggccctagagtttgtaacagatatgggcctttttattgctatgggcctatttttggtgatatgggtctttaataccatatgagccttttaagacaaaataataatctgataaaagtggtgaatcaagaagactaaacaattttgaaagaagaagaagaaaggaggagacatggatgaatctctgtgggtgtgagtgtgagacaaagagagaaaacaaacaacgtagctgtagattggaaaagacggtaagaccctcgtcgggcttcatcaataaacaactttgccttgttgtctatcgccggaattacaaaccctagccctgctacaccgccaatgacgccgtctacgcctgcagacgatgcttggatccgctcttaccagcgcttgcttcctgaatcgcagtctcttctcgcttcccgccgggtaggttctgtctcagggatgcttgtttgtgtcgtggcttgtttgcttattatatgtggtctttgatggcagtcagttataccggttgcaatctctagagtgaatcagttcgacgcagcacgactagatgtggaaatgtcagccatgttgaaggaacagctcgttaaggttttcactctgatgaaggtgagcagagagctaacttgatgctttccttggcattttattaagccatttactttctttggcattttattagccaggaatgctctttcaatacgaaccagagcttgatgctttccttgagtttctcatttggagattctctatttgggttgacaaacccacccccggaaacgctctcatgaatcttagatacagagatgaacgaggagtcgttgctcagcacttggggaaaggtattttttattttattttctaaacactcttcttctgtcaccctttttttctaatcactcttgtactctcgtatagtcagaacaggactggaaggacccggacttacttctccccaaaagatttggtactgcgttgcctccgttggtggtcagtacctcttctcccgtttgcagtcattttctgctttccgtagatggggtgattctgagcaggtctgtatgaggagcatggtttattctttttttctcccgtttgcagtcatcctcacgccatcgctatggttgattcttttctccttgttttgacttgtagagaccattggcaaggcgactttggaccctcgtacaacgaatcgaaggcatctacaaagctgcttcttttcttaacctattgtcatttctttatacgggaaggtacaacttggtacatggactctttcatttcctctacttatcctgataaaaccacactgcagtgcagttacttcttatgaccatttaaaatctgattcagttcattggtaacttttgagttcacagtgaaatatcgaaacaagaaccaaaatcacaaacagaaataccttgatgattctcacttccgctactcttctttttctttcttgatccaggtataggaacctcattgaaaaagctttaaaagctaggcttgtctataggagtccccatatgaaccgatctgtcagcttcgagtacatgaatcggcaacttgtgtggaatgaattttcggtaggtcttctctgtgtgttgcttaactagttcaacatcaatttaaaagtttggcaacctgtcagttctgagtagcatccttggctgatggtttctggcctatgattgatacttgctggtctcgaacattttcttgaatgatagtatctatcagcttaccttcactttttctttggaagaaacacttttgctgcttgaacttgagctgttaaaagctgaaaacatattgtgtccgtatctggaattctgaactatgtagatcctgtgactcaacagtttcattggagtacaaataccttgtctatgttcaaaacactgtatttgtcgctttttctctctttcagatccttcaatagatcaaaacattctgtttagacttgctaccagaaacgtaatgttaggatctgatttcctggttctgttttggcattcagctttaaatttgtttggtgatattcaggaaatgcttttgttgcttctcccgctgctcaactcttcagctgttaagaatattcttagtccatttgccaaggacaagtcctcaagcactaaagaggatacagtgacttgccctatttgccaagtggatcctgcaattccgtttatagctctgccttgtcagcacaggtatggtatttttctgtgcaaaagttttggatcagaataaagtagttaactctctccccagacatgtactataactgattgtactagaagcaaaaaatttcacatgattgtgtatctgactttggagaagacacagaagtgattttattgacttgttgaattcatagtatgtgctgtagttgttacatacatttaaaagaattgacttgtcgcaggtactgttactactgcataaggacccgctgcgcttcagcagcatcgttccggtgtcttagatgtaacgagcctgtggttgccatacaacgggaaggtgtttcaagtggcaaatgaatggaggtgacaaattgttgagtcatgccaccaagtcttgaagaataagcagatgcaatagtggaagtgtaaaaagccaaggcaagcagccgaaagcagagaagaatctgataggtgtttgtttgcagacagactatacaataagggaacatcatgaatgtgatgcaacaaaaaaattagataggtgcacttctgtacatgagttgagaacctaccattgttgaatgaagtttggtcttatgtttattacaaaatcagttgaaacgttggctatactcgaatgaataatatccatttccttacatgttgtttacctacttactactcactcctacttccatattaggtacacgttacttgtgtctctccaaggaaaaaaagagagccagaagaataatacgaattctcagaataaagagatcaatcactgggtggaagagagcagactgatttctatctcttgtaggctctttcctttagtctcaaccacgttcttctgcacaaagatgactgccaccacacagaagaacccaaatattgcatttagaagcaccgaacctagttgctccagcattctcagaaacagcagcccgacaaagaagtttataacctgttgtagcgtgtaattctccaagcttattattatttcaacattatcgatttcctaaaaaagtccacaaagagaaaaaaaaaaaaaaaaaaaggcatacccagtgaacggcaagacaaacagccaacgcagttgctcgaagtcgaccagggcatatctcagacaggagaagacttggaacaggacccgctccagttgcaaacgacaacacaaacctgcattcgtaatcacacccctagtttatcaaaataaaacatcccccttttccagtgctgttgttgtgatagaaaacttacagcagcattcctccaaccgagagaaacaaggttccaaagggcgaaggaagcgaagtatatgctattgcttggagacccagcgatactgcctgttaaagatgataaacatttacatctacatacatggagcgttattaaatattagctgcgtaaagtttgattcaaatagcactttttgcctcaacaattaccatgcccgcaaaactcccaataagcaacacttttctccccagcttatccatcaaaaccacagcaacagttgatcctgtacaagagtatgaatgatgctcacattcgttttaaatacagatcatcaacatgttgaaaggaaagatttcagatcatcatctttgtggtaagaggaaggttgttcacttaaaccagtgattagtttactgttcctaatgttgtgtttgtattcaggaagactgcattcacctacttgcttatctagcttatcatgaatatgatggcctttcaagccatagtagaatgtacaagaaaaagtcacatttcaatacctaagaggttgcaaactcctacacatatgtttgcagaggctgaaggtacaccagctttcttgaagacagttgatgagaaatagaacacagcatttatcccagacaactgttgtaaagcaaaaagggtagatccaatgaaaaccactgcaatcggagaaaatttaaacgtaaaaatgaaggtaattaagaggctacacatcatctatatgtatgtttttggcaaatgaaaatgtcatttttttggctatggatccagtttagccacctaacataccttccgtgcaaatgattcaactttttgatgaataaaaatctagatctaatatttccgtgatatttgacatcgaactaatgccacacattttcaccaatcttgttggttaaagatcacacatacctctaaaactgcgtccaaaaagcaactccgacaatttggctgaatcggcgtcatctcccctatccgacttcactaactctgccatagcagctttgacgtacgaccctcccaatagcttctcaaacacagcttcagcttcagctgcccttcccctctacggttaaacagaaaaagaatcaaccaaagaaatggtttataaaaatcaaaacgtctttaagagctatgcgggttaaaattagacagtaaccttaaaaagccactgaggactttccacgcagagttccatgaagacagcaagcattgcagctgggactgtggatatccaaaaacatatgcgccacctacaccaatcaagaaagagaaacctattcaactagtaattcagccaagtagaccaaagcatgtgatctgctagtagcttagaaactccaggatttctttccctacaaaggcggttctcatgtcaaaatcactaatgaatttgcagcaaaagatgaggtggttcctatagagttgcagcattttaacaaggcactagagattcacattgcatataggtgggtttggaatagacaacggggatcaaacatgccacctaaagcaagcaaaaagggtgaactaccatgcgtttggaagtcacagatggcacagagttgcaataatttcaacctcgaagagttacaggccatataagctgttaagtcatctattccttgagttcttatcaacatcttaccagcccaagttatcttttgccgggattccagcaaacagcgaacctaagagtccaatacatgttgcgatttgggtagaactcccatatgtacctctcacataagcaggtgacacctgcaaagagaaactgtgagtcttgctctaagtatgaatgtaagatgtattgacaaagcgagttagtgatatttgtgtgcccagaaccttctttttcacattaaataaatccaataatgcgaatatagctttcaagattgaagtccttattacaatgaaaattatgtgcgtcaatgaccttctgcatgttaatggttccaagttcaagtctttttatgtctgaaatagacatctatttacattgactccaaacatcttttgacataattaaaataatatacgccaagtaatattcacatcaaaagtgaggaagaaatttcatgtagcaatcctatcaaaacaagtgcagataagaaagacttcaacgtatatgtcaagtacctcagtgacatagagagctgtaacagaaggacctatgcccatcccaattccgaccaaaaaccttcccaggagcatgcccataagactctcagttgatgcactgcaaacaacacacttgtaagcacacagatttcatgattacataaatggactctggctaaaagagaaacaggatgaattaacctaactagtgagtacaccttgggataagtgaaaatcaccatggcaatgacttgagaccaaatatgttcaaatgaggccaaatatgttaaaatcaccacgctataactataaacatccaagcaggaaatcactacgagataatccaactgcataatgactagcctagaccacaggttcagcaaatcaacaggcaaagattcgaatctgaaatgttcaagtgcccacatagacattcaaccaaaaatatatatcataccataagaacctgaaacaagtacttagtcatgtgaactgaacagcctaaacccccaattaacctgaacaaaacatcacctcacagaagctccaacaatcattggtaaagcgctcaactggaaagctctacggcgcccaacaccatcagctaccaacccactgaacagagacccaataaaggcgccgcctaagcaggtgctaaccacaagaccttcatccatcagaaaaaggtttttggaatgatcagacgggagatagacacaaagactggataaacagaaaaacaagtaagttgtcttcttggataggtaaggtaccttcagctatggtgttcccactaaagccaaggtcaattgatatgctttcgagagtttcattaacaaccctgtgtccagaaaagaggcatgaatttgctattattcccagacatatacatttataaaaaactgagtcattgaggcaaatagataatgttatcgagtgctccaagaaaaacaatgcatcgagaagaaatacaacttgagcctgaaaaataagcttacgaaagaaaaagataatagcctagcatcatgagaagtaaatttccatgtttggtctataaatgcaaagatgaaaaagaaaaaaggaaaaagggagaacaaatgtcacaaggagagacccgagatgatagccgaataaaagcgaagtcagagaagcaacgagcacgtgaggcagagatcgcttccaggaaggattcccgcagtcttttcccgtcccagtaggaagacgtactggagttgagaaaagtcaagagtcagtctatgcagaagaagtttcaagatattgaggcaacaagaaaaaagtggtatatctaggtacaatgctatgtctaaaacacaaacaagcaatatagagttgatgagcaaatacaataaaaagatcagaagtggtctttaaaatatataacactgtccgtgtgcaccaaaaagtaggcaatagagtaaaatcatgactattatgagggtgggtacaaaaaacctgcagtttcagctttatccaaagcagagagaaactctttagaaggaacacgcttgtctatgtgacgacctcgcataatggtgtaagtgcgtcgaacagaatccatcccctctggaaacacgctcctgcacattcaaacaagttgagtgctgactgatgcaaggccatagaagaaaagcatacgaataatgggattcttcaacatggatggatgctcaaagacgtcaaagtcgcaatttattaaataatcaatccattaaaggaaagcttcattcaagtgctacttgttagtgtgtgtgaagtccagcgatcacttacacataatcaaaaccagccttgcgagtcaatttaaaattcaaagcacacacatgacgtaacgtgacgtgagctactaggaaaattccagaatcaacaatatatttattttaaaaataaaaagagataaaagaagaaacaaaaaagctgacgacagatgatgagaaagtgagatcgtcggatctgacggaagcaatgtaaatcagaaatataagatttggattaaaaaaggcaatggcagatctacaaggaagcaaggaaggaaggagggatgcaaacaaagagaacaaggatgatgatagtaccaacctggagaggaaatatgataacgtcgagaggaatcgtcgaatagaagaaacttttacagaggagcgacgacaactttatggctacacctacactcactccgttcacaggggatgggttttaatcacctgctctcgcctctaccgttcttttcatggaactcagcaaactatactctagtaccaatgaaataatgacatttatatatgaattc

SEQ ID NO: 41 - DNA, 87584 bp, Arabidopsis thaliana
  unsure (1)..(87584): unsure at all n locations
gaattcgtcgaccaggacggcggaatgctcgaccaggacgatgaatgggcgatgaaaatctatcgggttagaggaatggtcgaccgggtccgagaattcgtcgaccaggacgaggagtggtcgaggatttgtcgaccaggagttgaaatcgtcgaccgggtccgagaattcgtcgaccaggacggcggaaccctcgaccaggacgatgaatgggcgatgaaaatctatcgggttcgaggaatggtcgaccagaagttggaatcgtcgaccgggtccgagaattcgtcgaccaggccgaggagtggtcgaggatttgtcgaccaggagttgaaatcgtcgaccgggaccgagaattcgtcgaccaggacggcggaaccctcgaccaggacgatgaatgggcgatgaaaatctatcgggttcgaggaatggtcgaccaggggttgaaatcgtcgaccaggtccgagacttcatcgaccgggtccgaggattcgtcgaccaggacggccggatgtccgagaaaaaaaaatgttgccgaataactttcgaaaatcattggatatgatgcaatgttttgtgatcgaatctcttaaaatacatcaataaagagtttaggatgtcaagtttgcatcaaatatgcccacggagccccaactagaccatgaaaatccgttgttgtatcaggtcaaatgacctagctagaggtgtcagaaaattatgtaaatttaccagaaaataggatttagtatccttatgatgcatgctaaaaagaattttcaaattccaagtatttctttttttttggcaccggtgtctcctcagacatttcaatgtctgttggtgccaagagggaaaagggctattaagctatataggggggtgggtgttgagggagtctgggcagtccgtgggaaccccctttttcggttcggacttgggtagcgatcgagggatggtatcggatatcgacacgaggaatgaccgaccgtccggccgccgggattttcgccggaaaactttttcggcgacttttccggcgatcggttttgttgcctttttccgagttttctcagcagttctcggacaaaaactgatgaatcgtcgaggagaatgagcttgccttgcgtgggctgccattagttcttcgaggcgttagggtggcggcggtataaaagtgtcggagttttttcagcagttctcggacaaaaattgctgagtggccgagaagaatgggcgtgtcatgcgtgggctgacatggattcttcgaggcctaggggtggcggtatataacttgttcgcatgatattaccgagatgtccccacgggcatcttttcacctcgtcgccgaagagaatgggcgtgtcatgcatgggctgacatggattctcctaggccgtttgggtggcggtatagtcgtcctgcgcacgaaataccgagatgtccccatgggcatcgattccacccgcctaggttggatgggcgtgcttcgttggaaagcatggatccgcctaggctgtcccgagtgtgagcgaggtgtgagtgtcgcccatgggcatcgacaccttgcggctaggaactggaacgagatgggtggcgaagatttcgagtagcacttcatactaccgtcggttttttaaaccttccgagttttgttgatgttattccgagaattagcaaaccgtaacgaagatgttcttggcaaccatcttttgatgggagtccggctgttcgatagccggccaagggtgatgaacgaaatgtgaacccttgtctcgcctaggttggatgggcgtgcttcgttggaaagcatggatccgcctaggctgtcccgagtgtgagcgaggtgtgagtgtcgcccatgggcatcgacaccttgcggctaggaactggaacgagacgggtagcaaagatttcgagtagcacttcatactaccgtgggttttttaaaccttccgagttttgttgatgtgtttccgagaattagcaaaccgtaacgaagatgttcttggcaaccatcttttgatgggagtccggctgttcgaaagccggccaagggtgatgaacgaaatgtgaacccttgtctcgcctaggttggatgggcgtgcttcgttggaaagcatggatccgcctaggctgtcccgaaggtatctcgcgcttgtacggctttggcttggattcgtccgtcttctttcttcttagccgagtacttcggtagagtagttggaacgattgatgattttgagttaattgaacgttcggcgtatgagtggtgatcggatagctagtgttcgtaggctccatgctcgcgcatcgaactacctaccacctatccttctcagttaattcacgggcgatgttacgctcgatgatgagttccggggcctgtgtttcgtacctaatttgaaggaattgttgagtttggtttacacctttgcccgcggcttctccttcgtggggaagtcgtgggcacaaacatcggcgcttgttcacctctcgtcatcgcatttgttgccttgctcgcattggtgaatgagttgcgggttgaaatctcggatgcggaaaagttgtcgacggtgactcgaagtgattcagtcccgccaaagctcatccgtccttcgggcaaaagatgacggtcaagacctcgtcctttctctctttccattgcgtttgagaggatgtggcggggaattgccgtgatcgatgaatgctacctggttgatcctgccagtagtcatatgcttgtctcaaagattaagccatgcatgtgtaagtatgaacgaattcagactgtgaaactgcgaatggctcattaaatcagttatagtttgtttgatggtaactactactcggataaccgtagtaattctagagctaatacgtgcaacaaaccccgacttatggaagggacgcatttattagataaaaggtcgacgcgggctctgcccgttgctctgatgattcatgataactcgacggatcgcatggcctctgtgctggcgacgcatcattcaaatttctgccctatcaactttcgatggtaggatagtggcctaccatggtggtaacgggtgacggagaattagggttcgattccggagagggagcctgagaaacggctaccacatccaaggaaggcagcaggcgcgcaaattacccaatcctgacacggggaggtagtgacaataaataacaatactgggctctttcgagtctggtaattggaatgagtacaatctaaatcccttaacgaggatccattggagggcaagtctggtgccagcagccgcggtaattccagctccaatagcgtatatttaagttgttgcagttaaaaagctcgtagttgaaccttgggatgggtcggccggtccgcctttggtgtgcattggtcggcttgtcccttcggtcggcgatacgctcctggtcttaattggccgggtcgtgcctccggcgctgttactttgaagaaattagagtgctcaaagcaagcctacgctctggatacattagcatgggataacatcataggatttcgatcctattgtgttggccttcgggatcggagtaatgattaacagggacagtcgggggcattcgtatttcatagtcagaggtgaaattcttggatttatgaaagacgaacaactgcgaaagcatttgccaaggatgttttcattaatcaagaacgaaagttgggggctcgaagacgatcagataccgtcctagtctcaaccataaacgatgccgaccagggatcagcggatgttgcttataggactccgctggcaccttatgagaaatcaaagtttttgggttccggggggagtatggtcgcaaggctgaaacttaaaggaattgacggaagggcaccaccaggagtggagcctgcggcttaatttgactcaacacggggaaacttaccaggtccagacatagtaaggattgacagactgagagctctttcttgattctatgggtggtggtgcatggccgttcttagttggtggagcgatttgtctggttaattccgttaatgaacgagacctcagcctgctaactagctacgtggaggcatcccttcacggccggcttcttagagggactatggccgtttaggccaaggaagtttgaggcaataacaggtctgtgatgcccttagatgttctgggccgcacgcgcgctacactgatgtattcaacgagttcacaccttggccgacaggcccgggtaatctttgaaatttcatcgtgatggggatagatcattgcaattgttggtcttcaacgaggaattcctagtaagcgcgagtcatcagctcgcgttgactacgtccctgccctttgtacacaccgcccgtcgctcctaccgattgaatgatccggtgaagtgttcggatcgcggcgacgtgggtggttcgccgcccgcgacgtcgcgagaagtccactaaaccttatcatttagaggaaggagaagtcgtaacaaggtttccgtaggtgaacctgcggaaggatcattgtcgatacctgtccaaaacagaacgacccgcgaaccaaagatcaccactctcggtgggccggtttcttagccgattccttgcccgccggatccgtggtttcgcgtatcggcatgctcgggagcttttatctcggtcttgtcgtgcgcgttgcttccggatatcacaaaaccccagcacgaaaagtgtcaaggaacatgcaaacgaacggctggcattcgcctccccggagacggagtgtgggcggatgctgtgctgcgaactgaagtctaaaacgactctcggcaacggatatctcggctctcgcatcgatgaagaacgtagcgaaatgcgatacttggtgtgaattgcagaatcccgtgaaccatcgagtctttgaacgcaagttgcgccccaagccttctggccgagggcacgtctgcctgggtgtcacaaatcgtcgtccctcaccatcctttgctgatgcgggacggaagctggtctcccgtgtgttaccgcacgcggttggcctaaatccgagccaaggacgcctggagcgtaccgacatgcggtggtgaacttgatccattacattttatcggtcgctcttgtccggaagcagtagatgacccaaagtccatatagcgaccccaggtcaggcgggattacccgctgagtttaagcatatcaataagcggaggaaaagaaactaacaaggattcccttagtaacggcgagcgaaccgggaagagcccagcttgaaaatcggacgtcttcggcgttcgaattgtagtctggagaagcgtcctcagcgacggaccgggcctaagttccctggaaaggggcgccagagagggtgagagccccgtcgtgcccggaccctgtcgcaccacgaggcgctgtctacgagtcgggttgtttgggaatgcagccccaatcgggcggtaaattccgtccaaggctaaatacgggcgagagaccgatagcgaacaagtaccgcgaggtaaagatgaaaaggactttgaaaagagagtcaaagagtgcttgaaattgtcgggagggaagcggatgggggccggcgatgcgtcctggtcggatgcggaacggagcaatccggtccgccgatcgattcggggcgtggaccgacgcggattacggtggcggcctaagcccgggcttttgatacgcttgtggagacgtcgctgccgtgatcgtggtctgcagcacgcgcctaacggcgtgcctcggcatcagcgtgctccgggcgtcggcctgtgggctccccattcgacccgtcttgaaacacggaccaaggagtctgacatgtgtgcgagtcaacgggtgagtaaacccgtaaggcgcaaggaagctgattggcgggatccctcgcgggtgcaccgccgaccgaccttgatcttctgagaagggttcgagtgtgagcatgcctgtcgggacccgaaagatggtgaactatgcctgagcggggtaaagccagaggaaactctggtggaagcccgcagcgatactgacgtgcaaatcgttcgtctgacttgggtataggggcgaaagactaatcgaaccatctagtagctggttccccccgaagtttccctcaggatagctggagctcggacgcgagttctatcgggtaaagccaatgattagaggcattgggggcgcaacgccctcgacctattctcaaactttaaataggtaggacgtgtcggctgctttgttgagccgtcacacggaatcgagagctccaagtgggccatttttggtaagcagaactggcgatgcgggatgaaccggaagccgggttacggtgcccaactgcgcgctaacctagaacccacaaagggtgttggtcgattaagacagcaggacggtggtcatggaagtcgaaatccgctaaggagtgtgtaacaactcacctgccgaatcaactagccccgaaaatggatggcgcttaagcgcgcgacctatacccggccgtcggggcaagagccaggcctcgatgagtaggagggcgcggcagtcgctgcaaaacctagggcgcgagcccgggcagagcggccgtcggtgcagatcttggtggtagtagcaaatattcaaatgagaactttgaaggccgaagaggggaaaggttccatgtgaacggcacttgcacatgggttattcgatcctaagagtcgggggaaacccgtctgatagcgcttaagcgcgaacttcgaaaggggatttggttaaaattccggaaccgggacgtggcggttgacggcaacgttagggagtccggagacgtcggcgggggcctcgggaagagttatcttttctgtttaacagcctgcccaccctggaaacggctcagccggaggtagggtccagcggctggaagagcaccgcacgtcgcgtggtgtccggtgcgcccccggcggcccttgaaaatccggaggaccgagtgccgctcacgcccggtcgtactcataaccgcatcaggtctccaaggtgaacagcctctggtcgatggaacaatgtaggcaagggaagtcggcaaaatggatccgtaacttcgggaaaaggattggctctgagggctgggctcgggggtcccagttccgaacccgtcggctgtcagcggactgctcgagctgctttcgcggcgagagcgggtcgccgcgtgccggccgggggacggactgggaacggctctctcgggagctttacccgggcgtcgaacagtcagctcagaactggtacggacaaggggaatccgactgtttaattaaaacaaagcattgcgatggtccctgcggatgctaacgcaatgtgatttctgcccagtgctctgaatgtcaaagtgaagaaattcaaccaagcgcgggtaaacggtgggagtaactatgactctcttaaggtagccaaatgcctcgtcatctaattagtgacgcgcatgaatggattaacgagattcccactgtccctgtctactatccagcgaaaccacagccaagggaacgggcttggcagaatcagcggggaaagaagaccctgttgagcttgactctagtccgactttgtgaaatgacttgagaggtgtaggataagtgggagcttcggcgcaagtgaaataccactacttttaacgttattttacttactccgtgaatcggaggcggggtacaacccctgtttttggtcccaaggctcgcttcggcgggtcgatccgggcggaggacattgtcaggtggggagtttggctggggcggcacatctgttaaaagataacgcaggtgtcctaagatgagctcaacgagaacagaaatctcgtgtggaacaaaagggtaaaagcttgtttgattctgattttcagtacgaatacgaaccgtgaaagcgtggcctatcgatcctttagaccttcggaatttgaagctagaggtgtcagaaaagttaccacagggataactggcttgtggcagccaagcgttcatagcgacgttgctttttgatccttcgatgtcggctcttcctatcattgtgaagcagaattcaccaagtgttggattgttcacccaccaatagggaacgtgagctgggtttagaccgtcgtgagacaggttagttttaccctactgatgcccgcgtcgcgatagtaattcaacctagtacgagaggaaccgttgattcgcacaattggtcatcgcgcttggttgaaaagccagtggcgcgaagctaccgtgcgctggattatgactgaacgcctctaagtcagaatccgggctagaagcgacgcatgcgcccgccgcccgattgccgaccctcagtaggagcttaggctcccaaaggcacgtgtcgttggctaagtccgttcggcggaagcgtcgtttggaccgccttgaattataattaccaccgagcggcgggtagaatcctttgcagacgacttaaatacgcgacggggtattgtaagtggcagagtggccttgctgccacgatccactgagattcagccctttgtcgctaagattcgaccctcccctaaatcactccaaaaaaaacaatccccaattctacacaagtgtttctacactaacaaagcaacagctccttaacgaattcccaactttacacgagctcgtctctcgaggttaaatgttattacttggtaagattccggacctcgccaagtgttttgaaaacccgcaacgctcgcaaaggtgcatagtgagaagaataagtgaagagacagacttgtccaaaacgctcacgaaggtgcatagtgaaaagagtaagtcaagagacagacttgttcaaaaagaaacaaaagagaatgcttggggttacactcacgaaggtgcatagtgagaagagtaagtcaagagcagacttgttcaaaaagaaccagaagagaatgcttggggagatagaagtgtgagatagttctcaagctaagaaagttgtaaaagctaagaactagcatcaaatgatggatgaaacacaaggtagttgttgaaaagtcaaacacttggtgatatgaacacaaacgttcaatatgacaaacccatgccaagtaaagagaaaatgaaaactggtgattgttgcggaaatcgtccaggattcctcgaccaggacttgaaatcgtcgagggaaaataatcggttctgaggaatcgtcgatccggacttggaatcgtcgagaaaagtttaccgggtccgaggaatcgtcgatccggacttggaatcgtcgagaaaagtttaccgggtccgaggatttgtcgaccaggagtggaaatcgtcgagaaaaatctatcgggtccgaggaatcgtcgaccaggacgaggaatcgtcgaccgggtccgaggatttgtcgaacaggggttgaaaactgctgaatcgtcgaggagaatgggcttgccttgcgtgggctgccattagttcttcgaggcgttagggtggcggcggtataaaagtgtcggagttttttcagcagttctcggacaaaaattgctgagtggccgagaaaaattgcagttctcgttcacatatttcttagccaacaccgtcgctccatcggttttttctgatggccagaaaatgtgctgacttagtcaaacggtccacgatcacccaaatagcatctttggttcgcgacacaggcaacccaaccacaaaatccatcgtgataaaatctcacttccactcaggaatgggtaaactctgcaacaggccacctggcacctgatgctcagccttaactaactggcaaacatcgcactctgcaacccaattagctacatccctcttcatcacgacccactgatagtaccgcttgaggtctcagtacatcttagtcgctcctggatgaatggaaaacatgctcgcatgagcctcactcaagatctcttgtcgcaactcctcatccttaggcacacaaactcgctcatggacaaggatagtcccattagctacaaactgatactcagagccctctaccttagaagccgcaatcaacccctcatccttctcctgagccaaccaaactctagtcagaagatctgctcgatccacggcttccaatcctaatggctctcgtgccacagcacacaaccgcaaagcaccaatctcactcaccaaggcctcaacactctgccctggagccgcgcccacgcgcttacggctcaacgcgtctgcaaccacattagccttaccaggatggtaagctatctccagatcataatcagccaccagctccatccatcgcctctgcctcaggttcagctctcgctgagtgaagatatacttcaaactcttatgatccgtgaacacctgcactttcccgccacaaagataagacctccaaatcttcaaggcaaagattactgtagccatctccaaatcgggagtaggatagttgccctcatgcttcctcaactgtcgtgatgcataagcaataaccttcccacgctgcattagaacacaacccaaaccaactctcgaggcatcagtatacaccatgtaaggctgtccatgctctggcaatgctaacactggtgtactcgtcaacatctccttcaggctcacgaaaccctcctcgcactccggtgaccacacaaaaggaacatccttcctcgtcagcttagtcatcggctgtgccatactcgcaaaccccttgacgaacctcctgtaataccctgccaacccaagaaaactcctgatctcagtggcattcgtcggtctaggccaatctctgatagcctcaatcttctctggatccactgaaactccctctgcagaaacaatgtgacccagaaaacccatttctctctgccagaaactgcacttactcaacttagcgaacaacttctgctcccgcagcttctccatcactctccttagatgtacctcatgctcctcaggactcttagaatacaccagaatgtcatcaataaagatgatcacaaactcatccaaaaactcctggaacacgctgttcatcaacctcatgaacgctgcaggtgcattagtcaacccgaaaggcatcaccacgaactcaaaatgtccatatcttgtcctgaaagcagtcttgcgaacatctgcctccgctatcgggatctggtgataacccgacgtcaaatcgattttggagaaacaagtaccaccccacaactggtccaacaactcatcgatccttggcaaagggtacttgttcttcacagtgacccggttcaacccccggtcgtcaatacataagcggaaactcccgtccttcttcttcacaaataacaccggtgctccccaaggtgaagtactaggacgaatgaatcccttacccaacaaatcctctagctgcttctttagctctgccatctctgctggagccatcctgtagggtgccttagacaacggcgctgtccctggttccaactcaatcgtgaaaggatcagaccgtgatggtggtaatccctgcaacgattgaaacacatcctcccgaatgtcgctcactgctacctgccccacagactccggcatagataccggcatcccttctcgatcattttctctgcctgcactgctgagatgacgagactccctgaggtaggtctcactccctgataaaccaaccttccctctggccgctcaaaagaaactctcccacggtgggagtcaagatgtactctgtaatgatccaaccaatccattcccagaataacatcatacaactctacaaggctgataatcaaatctgctggcattgactcccctgcaatctgaatatctacacccttcgctctcccaagaaccgctagaaactgccctccagcaaccttgacgtggagatgtcccctctccctacagtggtagcactccctcatctcagctcgctgcgtgcaatccgccaccttgtggtcaaggctcccacaagaaaaacatcctgcacgaccaccctgtccagctctggaaggatgatcccacttcctcttctgcccctgtgcaggcttgccgcccttgctaggtgtcacctgctgctgagtcttcttcggttgtaccgctggactcactcccaccacctgcctctgaaggtctgaaagtccccgatccggactgcctaaagtccgggcgagttctctcgacccaagccactaagtgactcggccctaaccgtttatgaggttctttcctagtctaatccgtttcatatgattccgagattcaatatatgagacgaatagagtaaacaaacaatcggatactttattaattaagcaaaggattcgatacaacctatgagtttgcatataagctattacaagtcatataatcgatccctagactatccgaactatcaccacccatcatcccggccttgagtctctcgcgcctaagccaagtccttcccacgatcaccattcgttcctgaaagtcatagagccataagtaatcttatttacttaatcatatgcaagtccatgcaatgctctatatgccatacactactcggatcagtggagagaattcagagaggggaagatcgcgcatcagtccggccgattctcggcaggtcagttaagacccgccggtcctccgccgagccgcgtccccgcctcagccgacccctacccggaccgagtcttgtgtaggatgcacatgacccggatactactcagccctctagtcggtcctttcaaggatccgactactaactcacatcctagaacccttagactcaaagtctaggatcccttaccttccttctcgaggttaggtcgatccgaccctccttctttattgccggccacagcccggctaccgaatcctaagactatttattctcccaagagggagagagttttaatggtgagttttcttgtgttttcggtgtgttgtggtgagtagaatggtcctgggcgcccttccttatatagggggcgaatggatgctcccgaatcaacacatccgttccttgcacctttccgaagagttgcacctttccgaagagttgcgcccttccgaagagttgcacctttccgaagagttgtatctcttcgcccataaccgcccagttcgtccgtcactcgtccagctacctcgagctcgtccgtcactcgtccagctacctcgagctcgtccgtcactcgtccagctacctcgagctcaaccgtcactcgtccagctgcctcgagctcaaccgtcactcgtccagctgcccgagctggactgtcactcgacctgagtaactgtcactccttccagctgagcttgagctttgggcgagctgacccaagtgatttctttacgatcctagcttagcctgcatgatttcccctttgtccgagcttatagccagctccttctcacttgtccgagactccaccttcttctctcggaccaagtcctagccaacgatcctattgaggatcgcgggcgttacaagtctcccccccttgaattggattcgtcctcgaatccgcatcaagttgatctttacccatctccttgaaccactccggaaaattggccttcatcttattctcggtttcccaagtgtattcctcacggcctccacaattccacaagacttttaacaaatcccttgattttccccgagtcgctttcgtcattcggtccatgatccgtaccggccatgcttccaccgtcatattctcctttaacccgggaggtatatcttccacgctttcttcttgatcacttaaacacttccgtaattgtgacacatggaagacgttgtgaaacgcatttaattttggaggaaggtcaagtttgtatgccaccgcccctactcgttcgatcaccttgtacgggccaacataccttgggcttaactttttccttgaggtgaatcgccctgcccctttgtaggtcatcgcctttaagtacaccaaatctcgtacttggaattccaattcctttcgacgtttgttggcgtagcttttctgtcgatcttgggcttcctttaacttgatttttaagaacttcattctctccgtggtttcatccacgatcgtaggtccaaacaaccgacgtttgcccacgggcgtccaacacaacggtgttctacaagctcgtccatacaacgcctcatagggagacataccaatactagcttgaaaactattattgtatgcaaactctactaaccttagatatttctcccagtttcctccccaatccaagacgcatgccctcaacatgtcctcgagggtttgaatcgttcgttcggactgtccgtccgtctgtgggtggtaggcagtacttaggtttactcgagttcctaaggccttttggaaagccttccaaaactttgacgtgaaccttgtgtctcggtctgacactatactaaccggaatcccatgtaaccgcacgatctcgtctatatacttctcggcaatgatttctgctccatccttatccgagatcgccatgaagtgcgcagacttagtcaatcggtctaccacaacccataccgcattgtgtttggacttgatccccgttggcagtccggtgacgaagtccatcgttatgtggtcccacttccattccggtataggtaggttttgtaacaacccacttggtacttgatgctccgctttgaccagttgacaagtcgggcacttggccacccatctggccacgtctttcttcattgctacccaatggtagtaccttttaaggtcgcagtacatcttgtttgacccaggatggattgagaacctcgattgatgggcctctcttaggatctcctcctttaatgccctatcgttcggcacacatactcgaccgttcaccatgattgtaccattgttcgaggtttggtactcggtcttattgtttagtgcccatccttttatctcctcgtcccgttcctgagccagccggatcctactaagcaggtcggcctgatcggcggctcccaaccctaagggttcaacttctttagacaaggcattcacatgcaatgtcccgatcatgttaaccaagtccacttggctccgttccgcctcaacttccgagcgcctcctactcagggcgtcggcgacttggttggccttgcccggatggtacgctatatccaagtcgtaatccgccacaagctccatccaccttctttgccttagattcaactccggctgggtgaatatgtactttaggcttttgtggtcagtatagatttgaactttagcaccatacaagtatgatcgccaaattttcaaggcaaatactaccgcggccatttccaaatcatgcgtagggtaattcttctcatgtttccgcaattgccttgatgcgtatgcgataacactccccttttgcatcagtacgcatgaaaggccccgatccggactgcctaaagtccgggcgagttctctcgacccaagccactaagtgactcggccctaaccgtttatgaggttctttcctagtctaatccgtttcatatgattccgagattgaatatatgagacgaatagagtaaacaaacaatcggatactttattaattaagcaaaggattcgatacaacctatgaatttgcatataagctattacaagtcatataatcgatccctagactatccgaactatcaccacccatcatcccggccttgagtctctcgcgcctaagccaagtccttcccacgatcaccattcgttcctgaaagtcatagagccataagtaatcttatttacttaatcatatgcaagtccatgcaatgctctatatgccatacactactcggatccgtggagagaattcagagaggggaagatcgcgcatcagtctggccgattctcggcaggtcagttaagacccgccggtcctccgccgagccgcgtccccgcctcagccgatccctacccggaccgagtcttgtgtaggatgcacatgacccggatactactcagccctctagtcggtcctttcaaggatccgactactaactcacatcctagaacccttagactcaaagtctaggatcccttaccttccttctcgaggttaggtcgatccgaccctccttctttattgccggccacagcccggctaccgaatcctaaaactaattattctcccaagagggagagagttttaatggtgagttttcttgtgttttcggtgtgttgtggtgagtggaatggtcctgggcgcccttccttatatagggggcgaatggatgctttccgaatcaacacatccgttccttgcacctttccgaagagttgcacctttccgaagagttgcgcccttccgaagagttgcacctttccgaagagttgtatctcttcgcccataaccgcccagttcgtccgtcacccgtccagctacctcgagctcgtccgtcactcgtccagctacctcgagttcaaccgtcactcgtccagctgcctcgagctcgtccgtcactcgtccagctgcccgagctggactgtcactcgacctgagtaaccgtcactccttccagctgagcttgagctttgggcgagctgacccaagtgatttctttacgatcctagcttagcctgcatgatttcccctttgtccgagcttatggccagctccttctcacttgtccgagactccaccttcctctctcggtccaagtcctagccaacgatcctattgaggatcgcgggcattacaagtctcccccccttgaattggattcgtcctcgaatccgcatcaagttgatctttacccatctccttgaaccactccggaaaattggccttcatcttattctcggtttcccaagtatattcctcacggcctccacaattccacaagacttttaacaaatcccttgattttccccgagtccctttcgtcattcggtccatgatccgtactggccatgcttccaccgtcatattctcctttaacccgggaggtatatcttccacgctttcttcttgatcacttaaacacttccgtaattgtgacacatggaagacgttgtgaaacgcatttaattttggaggaaggtcaagtttgtatgccaccgcccctactcgttcgatcaccttgtacgggccaacataccttgggcttaactttttccttgaggtgaatcgccctgcccctttgtaggtcatcgcctttaagtacaccaaatctcgtacttggaattccaattcctttcgacgtttgttggcgtagcttttctgtcgatcttgggcttcctttaacttgatttttaagaacttcattctctccgtggtttcatccacgatcgtaggtccaaacaaccgacgttcgcccacgggcgtccaacacaacggtgttctacaagctcgtccatacaacgcctcatagggagacataccaatactagcttgaaaactattattgtatgcaaattctactaaccttagatatttctcccagtttcctccccaatccaagacgcatgccctcgacatgtcctcgagggtttgaatcgttcgttcggactgtccgtccgtctgttggtggtaggcagtacttaggttcactcgagttcctaaggccttttggaaagccttccaaaactttgacgtgaaccttgtgtctcggtctgacactatactaaccggaatcccatgtagccgcacgatctcgtctatgtacttctcggcaatgatttctgctccatccttatccgagatcgccatgaagtgcgcagacttagtcaatcggtctaccacaacccataccgcattgtgtttggacttgatccccgttggcagtccggtgacgaagtccatcgttatgtggtcccacttccattccggtataggtaggttttgtaacaacccacttggtacttgatgctccgctttgaccagttgacaagtcgggcacttggccacccatctggccacgtctttcttcattcctacccaatggtagtaccttttaaggtcgcggtacatcttgttcgacccatgatggattgagaacttcgattgatgggcctctcttaggatctcctcctttaatgccctatcgttcggcacacatactcgaccgttcaccacgattgtaccattgttcgaggtttggtactcggtcttattgtttagtgcccatccttttatctcctcgtcccgttcctgagccagccggatcctactaagcaggtcggcctgatcggcggctcccaaccctaagggttcaacttctttagacaaggcattcacatgcaatgtccccatcatgttaaccaagtccacttggctccgttccgcctcaacttccgaacgcctcctactcagggcgtcggcgacttggttggccttgcccggatggtacgctatatccaagtcgtaatccgccacaagttccatccaccttctttgccttagattcaactccggctgggtgaatatgtactttaggcttttgtggtcagtatagatttgaactttagcaccatacaagtatgatcgccaaatcttcaaggcaaatactaccgcggccatttccaaatcatgcgtagggtagttcttctcatgtttccgcaattgccttgatgcgtatgcgataacactccccttttgcatcagtacgcatcctagtcccactattgatgcgtccgtataaaccgtatatggctcaccttcctccggtaagaccaatactggtgcattagtcaacatggcctttaactccaggaagcttttctcgcattcatccgaccaattgaatgcggtgtcttttccggtcagtcgagacaagggttgggccatgctcgcaaaactccttacgaaccttcggtaataccccgctagtccgagaaaactcctaatctcggtggcattccttggtcgtggccactcctttatcgaccgtattttctccggatcaaccgatactccttggtccgagataacatgaccaagaaaaccaacgcttctttgccaaaatgagcatttacttaactttgcaaatagctcatgttcccttagccgttccagcaccgcccttagatgttcttggtgagcttcccaagatttcgagtaaacaagtatatcgtcaatgaagatgataacaaactcgtctaaaaaatcccggaacaccccattcatcattttcatgaaggctgctggtgcattggtcaatccgaatggcatgaccacaaactcaaagtggccgtaccttgtccggaaagccgttttcctcacgtccgttggctctatgggaatttggtgatatcctgaggccaagtcgatttttgaaaaccactgtgcacctccaagttgatccatcaactcatctatccggggtaaaggatatttgtttttcaccgtaactttattcaatccccgataatcgatgcatagcctaaagctaccatctttctttttcacaaacagaaccggcgcaccccatggtgagctactcggcctgatgaatccaacaactcctccaactgtttctttagctccgccatttccgccggtgccatccggtacggagctttagatatgggggttgtcccgggctcgagttctatcgtgaacgggtctgaccggtccggtggtacaccactaacggccgcaaacatgtccgagaactcgttgacgatcggaatgtctttcaactccgcactcgcccccacttccttggttgtgatcgtggctaaatatgcctcacatcctttcccgagcatcctttcagcctggattgccgagattaccaagcttcccgaggttgttcttattccttggaattttaacataccctcgtccctctcgaattgtatccgtcctcggtgacaatctatgtgagccttgtacttccccaaccagtccatccctaagataacatcatgtttctttagtggaacaatgattaggtccgcgggcatattgacaccgttcactacaaccgagatgccccgaacaagtccggtcggatacattgcctgtccgccggccgctcgtaccattccataatcggtgtttggttctttcctgaacccacctattttaaccaattctggactaacaaaacaatgtgtagccccagaatcaaatagagtgtgcgttactacgtcacctactctcaaggtccctacacattcccttagaatgctgagtacctcccctttcccatatgcatgatgcaatgcaaatgcagttattgaaataatgaatagggagttgtgagaacgtaccagtgatcgccctgaagtttctggcatcgttagcttcctccgacaactcataaactcgcggtgccacggcttgccgctttgggggaggcggcagtccatttcccccgcgattgtccctttgtccggcctgcttctccgcagtcaacttagggcactctcgctttagatgtccagtctttccgcaatagaaacaagtccttgtctcttcaccgagaaccttggactgccctggttccattctcgggcaactttggatcgcatggtccttgcttccacaccggccacatgcacctatggccttccagcaagttccgctgtggctcttaccacaggtcacgcattccccggtcttagcatcggacttggtgttatccaccttgtcaaatttccttttcttatccgcgggtttagtggattgattgttccggatcggtgctttctcccggttcaagtacctctcctcctcgatcccttcctcaatcattgctgccctttcaaccaattcggaaaccgagttgaatgtccggactaaacaatggttgcggatctctatccttagtccacggataaatcggcgcacttgagcttgttcctcctcaagttcacgtcccacataacgccttaggcggttaaattcctcatcatattcacgcaccgtgcggttcccttgaactaggtcgaggtacgcacattcaagcctatcccaagcctccggtggaaagtacttcttgttaaactcgtcttcgaaatccgcaaaggaccggacctcgtcccctctgcgtttctcgatggttaaccaccaattatgggcgtctccttcaaggaaatggactgcaatgtccctttggtaatcctcagggcagcgggtagacttgaagttcctcttgagtctactcctccactcatcggccataatagggtccgtactgcccatgaagtgtctcgtgcccagctttgagacatgttcgagaagactcagatagtctccccttttccgcccataattcggttgtggattcacttccacaacttccgattcatcgtccctttggttatccccttttaggaccaccggatctgctacaacggccttggtcaatgtggctagttgcgccatcattcccttcatcaaatcccactgttcttgggccgttggagtattattccggttatccgtgatgtcccttgcaccactactctccggtgcttcctcatttatggacttcttcccggcctcaggtccggccgagtctgtcccatcgaacatcgtcccgactctggttttctcgttgatcatcgtttcctcctcaaccaaagtctcctcgacaatgcccttgtccttcttactctttcccgttttgctgctcttacccatctgcgaaacctctaaagttaatccacctaactcctagtaaaatcgcaaaagagtaaagaacaactaccgcgagattctcaagccgacgagtggtgataccccttaacccaacacctagtcctagaaccaagcatgctctgataccaacttgaaaggccccgatccggactgcctaaagtccgggcgagttctctcgacccaagccactaagtgactcggccctaaccgtttatgaggttctttcctagtctaatccgtttcatatgattccgagattcaatatatgagacgaatagagtaaacaaacaatcggatactttattaattaagcaaaggattcgatacaacctatgaatttgcatataagctattacaagtcatataatcgatccctagactatccgaactatcaccacccatcatcccggccttgagtctctcgcgcctaagccaagtccttcccacgatcaccattcattcctgaaagtcatagagccataagtaatcttatttacttaatcatatgcaagtccatgcaatgctctatatgccatacactactcggatccgtggagagaattcagagaggggaagatcgcgcatcagtccggccgattctcggcaggtcagttaagacccgccggtcctccgccgagccgcgtccccgcctcagccgatccctacccggaccgagtcttgtgtaggatgcacatgacccggatactactcagccctctagtcggtcctttcaaggatccgactactaactcacatcctagaacccttagactcaaagtctaggatcccttaccttccttctcgaggttaggtcgatccgaccctccttctttattgccggccacagcccggctaccgaatcctaaaactaattattctcccaagagggagagagttttaatggtgagttttcttgtgttttcggtgtgttgtggtgagtggaatggtcctgggcgcccttccttatatagggggcgaatggatgctttccgaatcaacacatccgttccttgcacctttccgaagagttgcacctttccgaagagttgcgcccttccgaagagttgcacctttccgaagagttgtatctcttcgcccataaccgcccagttcgtccgtcacccgtccagctacctcgagctcgtccgtcactcgtccagctacctcgagttcaaccgtcactcgtccagctgcctcgagctcgtccgtcactcgtccagctgcccgagctggactgtcactcgacctgagtaaccgtcactccttccagctgagcttgagctttgggcgagctgacccaagtgatttctttacgatcctagcttagcctgcatgatttcccctttgtccgagcttatggccagctccttctcacttgtccgagactccaccttcctctctcggtccaagtcctagccaacgatcctattgaggatcgcgggcgttacaacgcatcctagtcccactatggatgcgtccgtataaaccgtatagggctcaccttcctccggtaagaccaataccggtgcattagtcaacatggcctttaactccaggaagcttttctcgcactcatccgaccagttgaatgcggtgtcttttccggtcagtcgagtcaagggttgagccatgctcgcaaaactcattacgaaccttcggtaataccccgctagtccgagaaagctcctaatctcggtggcattccttggtcgtggccactcctttatcgaccgtattttctccggatcaaccgatactccttgctccgagataacatgaccaagaaaaccaacgctcctttgccaaaatgagcatttacttaactttgcaaatagctcatgttcccttagccgttccagcaccgcccttagatgttcttggtgagcttcccaagatttcgagtaaacaagtatatcgtcaatgaagatgataacaaactcgtctaagaaatcccggaacaccccattcatcattttcatgaaggctgctggtgcattggtcaatccgaatggcatgaccacaaactcaaagtggccgtaccttgtccggaaagccgttttcctcacgtccgttggctctatgggaatttggtgatatcctgaggccaagtcgatttttgaaaaccactgtgcacctccaagttgatccatcaactcatctatccggggtaaaggatatttgtttttcaccgtaactttattcaatccccgataatcgatgcatagcctaaagctaacatctttctttttcacaaacagaaccggcgcaccccatggtgagctactcggcctgatgaatcctttatccaacaactcctccaactgtttctttagctccgccatttccgccggtgccatccggtacggagctttagatatgggggttgtcccgggctcgagttctatcgtgaacgggtctgaccggtccggtggtacgccactaacggccgcaaacacgtccgagaactcgttgacgatcggaatgtctttcaactccgcactcgcccccacttccttggttgtgatcgtggctaaatatgcctcacatcctttcccgagcatcctttcagcctggattgccgagattaccaagcttcccgaggttgttcttattccttggaattttaacataccctcgtccctctcgaattgtatccgtcctcggtgacaatctatgtgagccttgtacttccccaaccagtccatccctaagataacatcatgtttctttagtggaacaatgattaggtccgcgggcatattgacaccgttcactacaaccgagatgccccgaacaagtccggtcggatacattgcctgtccgccggccgctcgtaccattccataatcggtgtttggttctttcctgaacccacctatttcaaccaattctggactaacaaaacaatgtgtagccccagaatcaaatagagtgtgcgttactacgtcacctactctcaaggtccctacacattcccttagaatgctgagtacctcccctttcccatatgcatgatacaatgcaaatgcagttattgaaataatgaatagggagttgtgagaacgtaccagtgatcgccctgaagtttccggcatcgttagcttcctccgacaactcataaactcgcggtgccacggcttgccgctttgggggaggcggcagtccatttcccccgcgattgtccctttgtccggcctgcttctccgcagtcaacttagggcactctcgctttagatgtccagtctttccgcaatagaaacaagtccttgtctcttcaccgagaaccttggactgccctggttccattctcgggcaactttggatcgcatggtccttgcttccacaccggccacatgcacctatggccttccagcaagttccgctgtggctcttaccacaggtcacgcattccccggtcttagcatgggacttggtgttatccaccttgtcaaatttccttttcttatccgcgggtttggtggattgattgttccggatcggtgctttctcccggttcaagtacctctcctcctcgatcccttcctcaatcattgctgccctttcaaccaattcggaaaccgagttaaatgttcggaccaaacaatggttgcggatctctatccttagtccacggataaattggcgcacttgagcttgttcctcctcaagttcacgtcccacataacgccttaggcggttaaattcctcatcatattcacgcaccgtgcggttcccttaaactaggtcgaggtacgcacattcaagcctatcccaagcctccggtggaaagtacttcttgttaaactcgtcttcgaaatccgcaaaggaccggacctcgtcccctcagcgtttctcgacggttaaccaccaattatgggcgtctcattcaaggaaatggaccgcaatgtccctttggtaatcctcagggcagcgggtagacttgaagttcctcttgagtctactcctccactcatcggccacaatcgggtccgtactgcccatgaagtgtctcgtgcccagccttgagacatgttcgagaagactcagatagtctccccttttccacccataattcggttgtggattcacttccacaactttcgagtcatcgtccttttggttatccccttttaggaccaccggatctgctacaacggccttggtcaatgtggctagttgcgccatcattcccttcatcaaatcccactgttcttgggccgttggagtattgttccggttatccgtgctgtcccttgcaccactactctccggtgcttcctcatttatggacttcttcccggcctcaggtccggccgagtctgtcccatcgaacattgtcccgactctggttttctcgttgatcatcgtttactcctcaaccaaagtctcctcgacaatgcccttgtccttcttactctttcccgttctgctgctcttacccatctgcgaaacctctaaagttaatccacataactcctagtaaaatcgcaaaggagtaaagaacaactaccgcgagattctcaagccgacgagtggtgataccccttaacccaacacctagtcctagaaccaagcatgctctgataccaacttgaaaggccccgatccggactgcctaaagtccgggcgagttctctcgacccaagccactaagtgactcggccctaaccgtttatgaggttctttcctagtctaatccgtttcatatgattccgagattcaatatatgagacgaatagagtaaacaaacaatcggatactttattaattaagcaaaggattcgatacaacctatgagtttgcatataagctattacaagtcatataatcgatccctagactatccgaactatcaccacccatcatcccggccttgagtctctcgcgcctaagccaagtccttcccacgatcaccattcgttcctgaaagtcatagagccataagtaatcttatttacttaatcatatgcaagtccatgcaatgctctatatgccatacactactcagatccgtggagagaattcagagaggggaagatcgcgcatcagtccggccgattctcggcaggtcagttaagacccgccggtcctccgccgagccgcgtccccgcctcagccgatccttacccggaccgagtcttgtgtaggatgcacatgacccggatactactcagccctctagtcggtcctttcaaggatccgactactaactcacatcctagaacccttagactcaaagtctaggatcccttaccttccttctcgaggttaggtcgatccgaccctccttctttattgccggccatagcccggctaccgaatcctaagactatttattctcccaagagggagagagttttaatggtgagttttcttgtgttttcggtgtgttgtggtgagtagaatggtcctgggcgcccttccttatatagggggcgaatggatgcttcccgaatcaacacatccgttcctnnnnnnnnnnnnnnnnnnnnnnnnnnnnnnnnnnnnnnnnnnnnnnnnnnnnnnnnnnnnnnnnnnnnnnnnnnnnnnnnnnnnnnnnnnnnnnnnnnnnnnnnnnnnnnnnnnnnnnnntagcctggattgccgaggttctttcctagtctaatccgtttcatatgattccgaaattcaatatatgagacgaatagagtaaacaaacaatcggatactttattaattaagcaaaggattcgatacaacctatgagtttgcatataagctattacaagtcatataatcgatccctaaactatccgaactatcaccacccatcatcccggccttgagtctctcgcgcctaagccaagtccttcccacgatcaccattcgttcctgaaagtcatagagccataagtaatcttatttacttaattatatgcaagtccatgcaatgctctatatgccatacactactcggatccgtggagagaattcagagaggggaagatcgcgcatcagtccggccgattctcggcaggtcagttaagacccgccggtcctccgccgagccgcgtccccgcctcagccgatccctacccggaccgagtcttgtgtaggatgcacatgacccggatactactcagccctctagtcggtcctttcaaggatccgactactaactcacatcctagaacccttagactcaaagtctaggatcccttaccttccttctcgaggttaggtcgatccgaccctccttctttattgccggccacagcccggctaccgaatcctaagactatttattctcccaagagggagagagttttaatggtgagttttcttgtgttttcggtgtgttgtggtgagtagaatggtcctggcgcccttccttatatagggggtgaatggatgcttcccgaatcaacacatccgttccttgcacctttccgaagagttgcacctttccgaagagttgcgcccttccgaagagttgcacctttccgaagagttgtatctcttcgcccataaccgcccagttcgtctgtcactcgtccagctacctcgagctcgtccgtcactcgtccagctacctcgagctcaaccgtcactcgtccagctgcctcgagctcaaccgtcactcgtccagctgcctcgagctcaaccgtcactcgtccagctgcccgagctggactgtcactcgacctgagtaactgtcactccttccagctgagcttgagctttgggcgagctgacccaagtgatttctttacgatcctagcttagcctgcatgatttcccctttgtccgagcttatagccagctccttctcacttgtccgagactccaccttcttctctcggaccaagtcctagccaacgatcctattgaggatcgcgggcgttacaattccactgaagagtgtaaacatcttctgaatatcctcctcggaaaatataaatccggtgaagtagaggcagtctatcatcccaagaatgggaaaaataaacgcaagagcgacttcaaacagtcccaggcggaaccagcgcatgaagaacaacacgtggatcaccaactgctcctcgaggacgatcacgtagaggaggcgagggtcccggagaacgaactccccggtcccccaaaaagatggagaggacagcaaccgcagcgagctccagaccatccccgcggaaggatctccatgattatggccggaccatctgacgatgaggattcagtctcggctttaaagaagcgagctcgacaagtatgcagcattagggttgccccagaagctgagccattgagccaggaaccaattatctttacttcggaagatgcgcgtgggattcagcatccccataacgacgcactagtcgtcgaactggtaatggaggacttcgacgtagaacgggtcctaatcgataccggcagctcggtcaatctgatgttcctgaagaccctttcaaaaatgggaatctctgaaagcaaagtaatacctaaaatccgccctctgacgggatatgacggcgaggcaaagatgtcaataggggagatcaaacttcaagtccaagtgggcggcatcacgcaaaaaaccaagttcgtcgtcatcgactcggaaccaatctacaatgccattctgggaagtccttggatctattcgatgaaggcaattccctcgacgtatcacctctgcctgaagttcccgataaacacaggaatcttcaccctgtacggcaaccagaaggtctcacggacgtgctacgtgattgagaagaaacaacgaaagaaggaattcttatagcaattaaaggacgaagagcgagctgcaccgtcggagcgaccagctcgtgagtcaataagagcgccaagctgcaaaattatccaggtgaacatcgacgaatcagatccatctcgaacggttggaataggaagcgaactggaaggagagataaaggaagaactgatcgccttcctgaaatcgaggtcatcatcttttgcttggtccacaaaggatatgacaggaatcgctccagaggtaacctgtcataagcttaacacggatccaaccttcaaaccagttcgccaaaagcgaaggcggctaggggcggaccgcgccaaggccgtccaagatgaggtcgagcggctcctaaaagccggtctgattaaagaagtccaatacccagaatggttagctaacccggtggtggtcaaaaagaagaacggtaagtggcgagtctgcgtggactatactgacctaaacagggcttgccctaaagatagttatccactgccacacatagatcgcctagtcgaggcaacatctggaaatcagctcttatctttcatggatgccttttcgggatataatcaaatcctgatgcacaaggacgactgtgaaaaaacggctttcatcactgatcgcggaacgtattgctacatagtgatgctgtttggtttaaagaatgcaggggcgacctatcaacgtttggtgaacgaaatgttcgccgaactgctgggaatcacaatggaggtttacattgatgacatgttggtaaagtctttacaggccacagaccatatcaaacatctcaccgcgtgtttcgatattctagacaagtatcagatgaagctgaatcccacgaagtgcactttcggagtaacgtcgggagaattcttgggatacatagtcaccgaacgaggaattgaagccaacccgaagcagatcgatgcgataatcggactgccgtccccccagaacaaacgagaagtacaaaggctaacaggtcggatcgcagctttgaatcgcttcatcgcccggtcaactgataaatgtctcccattctacaagctcctgcgcggaaacaaggatttccattgggacgaaaaatgcgagaacgccttccaggagctcaaatcctacctcatgagcgggacgatcttagccaaacctgaggtcggggaaattgtaacgaccgcgtcccgcgttcataaagagggcaggttgttttaggagaaaactagaccatggtcaagaaacggactaaaatacttagtaggaagaacgagaaagttcaagccgaaccagctaggtgagctggacaagctggatgaactagctagctaagctaggtgagctaaaccagctgtaagactagctagctcagctaggtgagctgaccgacagctcgattgagctcggtgagctaatcaagtactgacccagctgggtggtccggtcagctgacactcgagctggtgaactgtggtagctcacgggtgaagaggtgtctcggccaaaaggtgtaaggtcgagcgggtaccaacgaacggttgcatcgcccaagggatgcaaggaacagatgtgacctttcgaaaggatgcaaagaacggatgtgacctttcggaagggtgcaaggaccggatgtgatgcttcgggaagcatccattcgcctcctatataagggaggacgcccaaggcatctcacatcatctcacaacatccaaaacaccataaaacattctaaaaggagtcccaacacatcctagagttgttggtcggaaagggggtgcggctcggcgagtataactcgaccgaactgatgcgcatgctacctcccggtccaacggttcgatggagtgtagaggatggagagggtagaccgttcgtcttagagacgaatcggatctggtagaccgatcgttggatcggatcggccagaccgatcgtcagacggatcggatcggccagacggatcggacagaccgatcgtcggacgggtcagatgggacaggccgatcgtctgacggaacgggtcggacagaccaatcgtcggatgagatggatcgagaaaagtgttcgaggaagcacaaggataagtgcatccgaacacacccaagggtcgcccatggatgcaatcttaccgataaagggagaaagcaccaagaatgggtaaggaacgtgattcaccatataggatcaacatcgcggccgccttcatgtatctatctccttagccatggtgaaaccgatcagagatcagtaagaccaaagggtgactcgacggataaccaacgggaaagtccacggtgggaaccgatggacaaaacggatgttggacccgcgagcaaacctaaggccgacggaagaaagatttcatgggctagcctatgatgatccagtggatgaatccacggacccttgggtgtgataaggatatcgttcggaccgcatggatggatcattaagccgaaagctttatcgaccaccatggactggacgggtaaacgattagtaaaccgtgggcggtcgtagtgttaaacgaccggaacggaaacatggatggttcgataagccgagggctcaatcgtccaccatgtagccggaggggcgtacgtttggagaacgaatggaccaataagccaagagcttgattcggccatcgtgaaccaagggaatcgtacgatccccaatctctatcgttgtacttagaccagtggggttggttggttgtatggctaagtaacaatagggattggttcatcaattcacgaccgatgacgagtcgttgaacgaatggagtaaggcgacaaacgggctaaggaatcaaatctgcatattgaccaaggtatataacgatctagcttattagttaagatagacgtttggtaattgaccgtgaaagtaggataaaggaatatgcgattgtttggcttagaatggttagcgaacatatgcatgtcttgaccgagtaaaggatcgatctaagtctaaggaacaaagacgatgaaaccggtacaagagttggttagaattaaaccaaggttagaaagacttccgctgtgtaataagagagcgattatagaatttagcctcgtaaaggcaattctatgttgaatcgcgaaaaattaagaggttcggccgggaagaggcgcgaacttgagtacaacgtcgccggacgtcgagacgtccgggatggggtctcacaagttggtatcagagcatgcttgatcctaggatggataggtgctcgggaaaacgtcatagtaaggttctggcggataaggaagttaagggatcgttgtgtacggaaacggaaatagttacccaactcacgatcaggaaccaagatattatccttgtagtcaaaactcaaacatgacggaaaagtgggttgatatattcggagatggaccgatatcaatgaaatttggatctagtcgaaacttgactaagatcgggtacagacttagtcgggatttgactatttctggggttttgatcttatcagaaattgaccaagatcatggaaaaacgacaaggttggaaagagacctatgtcgggaatattgaccgagtccggtggggaccagggtcggaaatattgacaaagtcggaaaaagactttagtcgagaatatgatcgagtccgggaaaggaccaggatcggaaatttgatcgaatgtcggaagagacaaagatcagaaaacgttgatcaagtccaggaaaggacaaagattggaaaacgttgatcaagtccaagaaaggacaaagatcagaaaacattgatcaagtccaggaaaggacaaagatcgggaaataatgatcaagtccgggagaggactaggatcaggaatttgatcgagtgtcgtaagagacaaagatcgggaaacttgatcaaactcggaaatagagatttgatcaaacgtgatatctaaagtcttggagagactaaagatgggaaagcattaaggagtaaacaagatcttacactcgctgaattcgaggacgaattcagtttaaggggggtagacttgtaacgctcgtgtctcgagttagggagtaaccaagatcttacacacgccgaattcgaggacgaattcagtttaaggggggtagacttgtaacgactgcgtcccgcgttcataaagagggcaggttgttttaggagaaaactagaccatggtcaagaaacggactaaaatacttagtaggaagaacgagaaagttcaagccgaaccagctaggtgggctggacaagctggatgaactagctagctaagctaggtgagctaaaccagctgtaagactagctagctcagctaggtgagctgaccgacagctcgattgagctcggtgagctaatcaagtactgacccagctgggtggtacggtcagctgacactcgagctggtggactgtggtagctcacgggtgaagaggtgtctcggccaaaaggtgtaaggtcgagcgggtaccaacgaacggttgcatcgcccaaaggatgcaaggaacagatgtgacctttcgaaaggatgcaaagaacggatgtgacatttcggaagggtgcaaggaccggatgtgatgcttcgggaagcatccattcgcctcctatataagggaggacgcccaaggcatctcacatcatctcacaacatccaaaacaccataaaacattctaaaaggagtcccaacacatcctagagttgttggtcggaaagggggtgcggctcggcgagtataactcgaccgaactgatgcgcatgctacctcccggtccaagggttcgatggagtgtagaggatggagagggtagaccgttcgtcttagagacgaatcggatctggtagaccgatcgttggatcggatcggccagaccgatcgtcagacggatcggatcggccagacggatcggacagaccgatcgtcggacgggtcagatgggacaggccgatcgtctgacggaacgggtcggacagaccaatcgtcggatgagatggatcgagaaaagtgttcgaggaagcacaaggataagtgcatccgaacacacccaagggtcgcccatggatgcaatcttaccgagaaagggagaaagcaccaagaatgggtaaggaacgtgattcaccatataggatcaacatcgcggccgccttcatgtatctatctccttagccatggtgaaaccgatcagagatcagtaagaccaaagggtgactcgacggataaccaacgggaaagtccacggtgggaaccgatggacaaaacggatgttggacccgcgagcaaacctaaggccgacggaagaaagatttcatgggctagcctacgatgatccagtggatgaatccacggacccttgggtgtgataaggatatcgttcggaccgcatggatggatcattaagccgaaagctttatcgaccaccatggaccggacgggtaaacgattagtaaaccgtgggcggtcgtagtgttaaacgaccggaacggaaacatggatggttcgataagccgagggctcaatcgtccaccatgtagccggaggggcgtacgtttggagaacgaatggaccaataagccaagagcttgattcggccatcgtgaaccaagggaatcgtacgatctccaatctctatcgttgtacttagaccagtggggttggttggttgtatggctaagtaacaatagggattggttcatcaattcacgaccgatgacgagtcgttgaacgaatggagtaaggcgacaaacgggctaaggaatcaaatccgcatattgaccaaggtatgtaacgatctagcttattagttaagatagacgtttggtaattgaccgtgaaagtaggataaaggaatatgcgattgtttggcttagaatggttagcgaacatatgcatgtcttgaccgagtaaaggatcgatctaagtctaaggaacaaagacgatgaaaccggtacaagagttggttagaattaaaccaaggttagaaagacttccgctgtgtaataagagagcgattatagaatttagcctcgtaaaggcaattctatgttgaatcgcgaaaaattaagaggttcggccgggaagaggcgcgaacttgagtacaacgtcgccggacgccgagacgtccgggacggggtctcacagaaatcttatatctctacgtctcggtgtcaagttcggcggtgagcggagtactggtaagagatgatcgtggtgacgaaaaacctatcttctataccagtaaagccctgaatgacgccgagaccagatatccgaccttagaaaagctggcattggcggtgataacggcagctcggaaactccgaccttatttccaatcacattccatagtagtgttcactgatcagccactacgcacagtgctccacagcccaaaccagtctggacgaattgcgaaatgggcaatcgaactgagtgaatacgacgtggaatatcgctctcgcccgagcctcaaatctcaggtcctagcggacttcatgaccgaactatctccagatgtgatggacgttatcccggacgaaaactggatactctactcggacggctcctcatcgttacaaggctccggcatcggaattctacttcgttcgccaaccggagaaatccttgaacaatcacttcggctccagtttaaggcatcgaataacgaagcaaaatacgaagcacttctcgcaggacttcgactcgctaaggggctcggagctaaacagatcaaagctttcagcgactctcaactcgtggtcagtcagttcagcggggaattcgaagcaaagaacgaaagaatgcgggcttatctctcactggtccacgcactttccagccagttcgaacagttcgccctgatcaaaatccctcgaaacgataattcggcagcagatgcattggccgcactggcctcaagcaccaaccccgacttaaggcgaactatcccagtcgaaagcatagcacaaccgagcatcgaaccgctgaagtcgacctgcgtgattgtagaccccgtaacggccatggacatggacggcaatgcagccaacgcgccggatacagaagaaaatccggaaccatccgattggcgactccccatcaaaatgtacattgccgacggcatagttccagcagatcgatgggaagctcgccgactaaaaaccaaagcggcgaactacatgatgatgggcggcgaactttacaggcgaagtgcgaccaaagcttttctcacttgcgtggatcaaaaagaagccctaacactcatgaaggaaacgcatgacggagacggtgggaatcattccggcggacgagctctctgccttaaaatcaaaaaagacggtcattactggccaactatgctggcggactgcgaagcctacgcggcaaagtgcgaaccgtgtcagaggcacggcccgatgaagaacgttcctcccgagatactgcgttcggtcacggcaccgtatccattcatgcgatgggccatggatatcgtgggaccaatgcccccttctggatccaaaaggtttatgttagtcctaactgattactacaccaaatgggtcgaggcacaggcgtaccacaaggtcaaatcacgtgatgtggttgcattcatctggaagaacattatttgccggcatggccttccttatgaaatcgttacagataacgggaagcagttcgtctcgctcattactagaaacttcctcgccaagtggaacattcgcatgagcaactcgactccaagatatccacaagggaacggtctagctgaagctacaaacaaaacgatcatagccggaattaagaaaagacttggccctaaaaagggaaactaggcaaacgagctggatggcgtactctggtcatacagaactacacctcggcgacctgcatcattatctcctttctccctggcttacggcatcgaggcaatggctccaaacgaagccggagttccaactttacgaagatgcatgatgtcgaacgaccaaaaactgaacgatcagcttttaggcgaccataatgatttcgccgaagaacttcgcgatcaagccgccatccggatccagaattaccagaatgcagcggcgaaatactataatcgaaacgtccgagagcgtcgtttcaacgttggcgacctcgtgcttcgggaagtttacagtaacaccgaagaaaagaacgctggaaaactcggagctcgatgggaaggaccttacttgatctcgaaggtacttcatccaggagtctatctgctgatgaccatgaagctgaaagaggtggaaaatccgtggaatgcagcccacctcaaaaggtactattactaggttaaaaattagctacgcccaaaaaaaaaaaaaaaaaaaaaaaaaaaactatattcatatatttattctaagcacgcagatcgcctgtcgatctcctttatgtaatacgaactacgaatggcttgatcccttaattgggtacgtaggcagtccttcgcaaggatgcagctataatacttaataaaattaaagtttgcattctcaatacggaattcgctttacgatctattatgtcaactctcggcgccctggccaggcgttcgatgcgcgtctcacatggatgcagtggtgaaataatccacgccctattagaaacttaatttttctaatagggaaagccgagaccagttttctcgcacttaagctctggttcggacagaaatataagccgaaccgtttcgcgatctgccgaacagatgctctacggggagtaagccgagcccagcatctcgccccccaaataatatgctgagtccgcctcacttattttggaaacagagcccagaactccctctttaaatcatacataagcctgctggacataagccgagagacgtctcgcgtccagcacacgctgaatattctttctcaaaagccgggctcagtctcgcacctaacatctaatccaattagacagaaaaaattgcgttacttcgaaaagaactaaaaaagccgacctcagaggtcgcagaggaaataagccaattcaattgcattgtattaatcaacgaccaaacgggatcgggggttattacaaagacatttattccagaataaattagagttaaacaaggtcgccagccatcacaagggcgtttatttggaaataaaaagcaaaggaaaaacagtccgaaaagccaccaaggatcatcttctatcagccagatagaacatcagatcgccctgtcagaaacagtgcgattatcctgaagaaggcgatctggcatgggccacactagctgcagaccagctttctcccaatcctccgaacgaatctccaatgccctaatcgtttgttcgacctcatccagacgagtgacgacccttcttcttttcttcttcagcttagcaatcagagtctcgagctcctcgagacgaaagtccacccttcgtttcttggttcgaaagtactgcagctcgcggcattgatcctgatgcagaaatccaacctgagaagtcaaagcaacgaaattctttaaaaacatcccgatatccaaaacacaaaccaaagcaatccttacttggttgacgaagttctgacactccgtggtatcagcatcagtagcagccggcccaaggtagaatagagaaggcgtcctgggaatgaagtccccatcagcaatgattgttggatgcttctcctttgagacggcagcggcgtctcgatcacagtcctcacaatacgacaaaagaatgcccggcatcggagccagaagctgaaaaccattcttaagccaatggcgaggatgtgactccagcatagccatttttcgagcgatgtcggaccttcgttcgtcatagtaccttagcatctcgcggtattccttatgcctagactcgacgcatgacaagaaaccctcggcttcacgtctttcctccgagctcgcctgaaataggagagtccagggaactcgaaggttattgaaaaacggcatccctcgttcaatcgcctcagcattcgagaaagtcggaatatttctgccaacaaagggagaagatccaacactctccatcttgcaaatagaaggaagaaagggccgatgaaacaatcgtcgatcaacagagaagtatttataggggcaaatacagaaatcgaattgggaatttgccttaatgcgatctggaaattctcattttcctcttccgagacgttaacgtttccattttctccaaattgggaaaatggaaatttacttagttgcgggttgacttcctcaatttccttttccaaaaaaatgacaaagctcataaatggaagaaagaaccattctgcttcagaaacaggcaagatagaaaatcatcgaaaatagaagttaaaattaaaaaccgccctggaagtgggtccacggttaaataagagttttgagatcatcccgaaaattgggtccacgatcgatattccaaaatagattacaaaaggcgacctattcaggtcgtctggttcgtttcctcatcgcttacacgacgaatatcgcttccgctaacgaggtcgacatttgagccaagccgatctggggacatgttcagatcaccgtccccgagctcgataacgttcaaggcattgacttcgtcggtcgcccttttttggttaactccttaaggccgctgagttcagatgctacaatcttcgcgcctctctgcataaggatgcccactatctcctcagcgcctctggcttgattctcagcatccacctttggcccgacgaggtcctctggctcgagataagccttctctatcaagacgagcttaggttttctttgtagtacgggcgacgttagcagctcggtcattccacaacctgttgcactccctatccccgtgctcccttacagcaaccaatgcgacctgatagctttcaacgtcgtcatttcctcgaaacaacgaacgtttaccaggtaaccttcttcagcgccgaaggtcagagcggcaacaaaattgcagatcgccaccagagtaagctgggagaacgccatacgacttacgaggtcatcgttaatcttacaagatgcttcggttcctgagcttcacgcgcgcgtacagacgcggcaattggacacgtgtcagttacgaatcgattcggaaatctagtgattaattcacgctttccaagatttaaatcgaatattcaatttctaagttcggatgtttcgaattaagcaactcggatcttccgaactggggggggactaattgttggtgcaggaattagcacctccgacaataccgatttaaaccaagaaataacatgaataaaatcgagaattcgattgaaccgggaaatcccggttagcctgttaatgggcctgagtcatgagctcgcccgaaatttagatcgacaattgagatcgccgtaggcggtttctaaggtcgtgtgaaggaaaaacttctattttaaagaggggaatctcatgaagaatggaagtaatggagatttagatctaagataattagaagtttatcatattttggtatgttcgacccattgtataaatagggggggggggtcaaactccccaaaggatcatctttaacctaatacaagagactacaattatagagcaaaccttagctttttattcaagcaattttgttctttccctttgattatttgtgagctaagagaggagtgaatttgtctaaatcccttagtacaaattcattgtttgattacagaatcaacaatcctgattctgaaaatcacacaataaatttgtttaaaggggataaacaaatttacttaactctctcgctatttagtgaccaaagattcaatgaaaagaagaacaaggttgcttagagacaaagttagggtttttgaaaggccccgatccggactgcctaaagtccgggcgagttctctcgacccaagccactaagtgcctcggccctatccgtttatgaggttctttcctagtctaatccgtttcatatgattccgagattcaatatatgagacgaatagagtaaacaaacaatcggatactttattaattaagcaaaggattcgatacaacctatgagtttgcatataagctattacaagtcatataatcgatccctagactatccgaactatcaccacccatcatcccggccttgagtctctcgcgcctaagccaagtccttcccacgatcaccattcgttcctgaaagtcacagagccataagtaatcttatttacttaatcatatgcaagtctatacaatgctctatatgccatacactactcggatccgtggagagaattcagagaggggaagatcgcgcatcagtccggccgattctcggcaggtcagttaagacccgccggtcctccgccgagccgcgtccccgcctcagccgatccctacccggactgagtcttgtgtaggatgcacatgacccggattctactcagccctctagtcggtcctttcaaggatccgacttctaactcacatcctagaacccttagactcaaagtctaggatcccttaccttccttctcgaggttaggtcgatccgaccctccttctttattgccggccacagcccggctaccgaatcctaagactatttattctcccaagagggagagagttttaatggtgagtttcttgtgttttcggtgtgttgtggtgggtggaatggtcctgggcgcccttccttatatagggggcgaatggatgcttcccgaatcaacacatccgttccttgcacctttccgaagagttgcacctttccgaagagttgcgcccttccgaagagttgcacctttccgaagagttgtatctcttcgcccataaccgcccagttcgtccgtcactcgtccagctacctcgagctcgtccgtcacttgtccagctacctcgagctcatccgtcactcgtccagctgcccgagctggactgtcactcgacctgagtaactgtcactccttccagctgagcttgagctttgggcgagctgacccaagtgatttccttacgatcctagcttagcctgcatgatttcccctttgtccgagcttatagccagctctttctcacttgtccgagactccaccttcttctcccggaccaagtcctagccaacgatcctattgaggatcgcgggcgttacaagtctcccccccttgaattggattcgtcctcgaatccgcatcaagttgatctttacccatctccttgaaccactccggaaaattggccttcatcttattctcggtttcccaagtgtattcctcacggcctccacaattccacaagacttttaacaaatcccttgatttttcccgagtccctttcgtcattcggtccatgatccgtaccggccatgcttccaccgtcatattttcctttaacccggggggtatatcttccacgctttcttcttgatcacttaaacacttccgtaattgtgacacatggaagacgttgtgaaacgcatttaattttggaggaaggtcaagtttgtatgccaccgcccctactcgtttgatcaccttgtacgggccaacataccttgggcttaactttttccttgaggtgaatcgccctgcccctttgtaggtcatcgcctttaagtacaccaaatctcctacttggaattccaattcctttcgacgtttgttggcgtagcttttctgtcgatcttgggcttccttcaacttgatttttaagaacttcattctctctgtggtttcatccacgatcgtaggtccaaacaaccgacgttcacccacgggcgtccaacacaatggtgttctacaagctcgtccatacaacgcctcatagggagacataccaatactagcttgaaaactattattgtatgcaaactctactaaccttagatatttctcccagtttcctccccaatccaagacgcatgccctcaacatgtcctcgagggtttgaatcgttcgttcggactgtccgtccgtctgtgggtggtaggcagtacttaggttcactcgagttcctaagaccttttggaaagccttccaaaactttgacgtgaaccttgtgtctcggtctgacactatactaaccggaatcccatgtagccgcacgatctcgtctatgtacttctcggcaatgatttctgctccatccttatccgagatcgccatgaagtgcgcagacttagtcaatcggtctaccacaacccataccgcattgtgtttggacttgatccccgttggcagtccggtgacgaagtccatcgttatgtggtcccacttccattccggtataggtaggttttgtaacaacccacttggtacttgatgctctgctttgaccagttgacaagtcgggcacttggccacccatctggccacgtctttcttcattcctacccaatggtagtaccttttaaggtcgcagtacatcttgttcgacccaggatggattgagaacttcgattgatgggcctctcttaggatctcctcctttaatgccctatcgttcggcacacatactcgaccgttcaccacgattgtaccattattcgaggtttggtactcggtcttattgtttagtgcccatccttttatctcctcgtcccgttcctgagccagccggatcctgctaagcaggtcggcctgatcggcggctcccaaccctaagggttcaacttctttagacaaggcattcacatgcaatgtccccatcatgttaaccaagtccacttggctccgttccgcctcaacttccgaacgcctcctactcagggcgtcggcgacttggttggccttgcccggatggtacgctatatccaagtcgtaatccgccacaagttccatccaccttctttgccttagattcaactccggctgggtgaatatgtactttaggcttttgtggtcagtatagatttgaactttagcaccatacaagtatgatcgccaaatcttcaaggcaaatactaccgcggccatttccaaatcatgtgtagggtagttcttctcatgtttccgcaattgccttgatgcgtatgcgataacactccccttttgcatcagtacgcatcctagtcccactattgatgcgtccgtataaaccgtatatggctcaccttcctccggtaagaccaatactggtgcattagtcaacatggcctttaactccaggaagcttttctcgcattcatccgaccagttgaatgcggtgtcttttccggtcagtcgagacaagggttgggccatgctcgcaaaacttcttacgaaccttcggtaataccccgctagtccgagaaaacttctaatctcggtggcattccttggtcgtggccactcctttatcgaccgtattttctccggatcaaccgatactccttggtccgagataacatgaccaagaaaaccaacgcttctttgccaaaatgagcatttacttaactttgcaaatagctcatgttcccttagccgttccagcaccgcccttagatgttcttggtgagcttcccaagatttcgagtaaacaagtatatcgtcaatgaagatgataacaaactcgtctaagaaatcccggaacaccccattcatcattttcatgaaggctgctggtgcattggtcaatccgaatggcatgaccacaaactcaaagtggccgtaccttgtccggaaagccgttttcctcacgtccgttggctctatgggaatttggtgatatcctgaggccaagtcgatttttgaaaaccactgtgcacctccaagttgatccatcaactcatctatccggggtaaaggatatttgtttttcaccgtaactttattcaatccccgataatcgatgcatagcctaaagctaccatctttctttttcacaaacagaaccggcgcaccccatggtgagctactcggcctgatgaatcctttatccaacaactcctccaactgtttctttagctccgccatttccgccggtgccatccggtacggagctttagatatgggggttgtcccgggctcgagttctatcgtgaacgggtctgaccggtccggtggtacaccactaacggccacaaacacgtccgagaactcgttgacgatcggaatgtctttcaactccgcactcgcccccacttccttggttgtgatcgtggctaaatatgcctcacatcctttcccgagcatcctttcagcctggattgccgagattaccaagcttcccgaggttgttcttattccttggaattttaacataccctcgtccctctcgaattgtatccgtcctcggtgacaatctatgtgagccttgtatttccccaaccagtccatccctaagataacatcatgtttctttagtggaacaatgattaggtccgcgggcatattgacaccgttcactacaaccgagatgccccgaacaagtccggtcggatacattgcctgtccgccggccgctcgtaccattccataatcggtgtttggttctttcctgaacccacctatttcaaccaattctggactaacaaaacaatgtgtagccccagaatcaaatagagtgtgcgttactacgtcacctactctcaaggtccctacacattcccttagaatgctgagtacctcccctttcccatatgcatgatgcaatgcaaatgcagttattgaaataatgaatagagagttgtgagaacgtaccagtgatcgccctgaagtttccggcatcgttagcttcctccgacaactcataaactcgcggtgccacggcttgccgctttgggggaggcggcagtccatttcccccgcggttgtccctttgtccggcctgcttctccgcagtcaacttagggcactctcgctttagatgtccggtctgcccgcaatagaaacaagtccttgtctcttcaccgagaaccttggactgccctggttccattctcgggcaactttggatcgcatggtccttgcttccacaccggccacatgcacctatggccttccagcaagttccgctgtggctcttaccacaggtcacgcattccccggtcttagcatcggacttagtgttatccaccttgtcaaatttccttttcttatccgcgggtttggtggattgattgttccggatcggtgctttctcccggttcaagtacctctcctcctcgatcccttcctcaatcattgctgccctttcaaccaattcggaaaccgagttgaatgtccggaccaaacaatggttgcggatctctatccttagtccacggataaatcggcgcacttgagcttgttcctcctcaagttcacgtcccacataacgccttaggcggttaaattcctcatcatattcacgcaccgtgcggttcccttgaactaggtcgaggtacgcacattcaagcctatcccaagcctctggtggaaagtacttcttgttaaactcgtcttcgaaatccgcaaaggaccggacctcgtcccctctgcgtttctcgacggttaaccaccaattatgggcgtctccttcaaggaaatggaccgcaatgtccctttggtaatcctcagggcagcgggtagacttgaagttcctcttgagtctactcctccactcatcggccacaatcgggtccgtactgcccatgaagtgtctcgtgcccagccttgagacatgttcgagaagacttagatagtctccctttttccgcccataattcggttgtggattcacttccacaacttccgagtcatcgtccttttggttatccccttttaggaccaccggatcagctacaacggccttggtcaatgtggctagttgcgccatcattcccttcatcaaatcccactgttcttgggccgttggagtattgttccggttatccgtgatgtcccttgcaccactactctccggtgcttcctcattcatggacttcttcccggcctcaggtccggccgagtctgtcccatcgaacactgtcccgactctggttttctcgttgatcatcgtttcctcctcaaccaaagtctcctcgacaatgcccttgtccttcttactctttcccgttttgctgctcttacccatctgcgaaacctctaaagttaatccacataactcctagtaaaatcgcaaaagagtaaagaacaactaccgcgagattctcaagccgacgagtggtgataccccttaacccaaacacctagtcctagaaccaagcatgctctgataccaacttgaaaggccccgatccggactgcctaaagtccgggcgagttctctcgacccaagccactaagtgcctcggccctatccgtttatgaggttctttcctagtctaatccgtttcatatgattccgagattcaatatatgagacgaatagagtaaacaaacaatcggatactttattaattaagcaaaggattcgatacaacctatgagtttgcatataagctattacaagtcatataatcgatccctagactatccgaactatcaccacccatcatcccggccttgagtctctcgcgcctaagccaagtccttcccacgatcaccattcgttcctgaaagtcacagagccataagtaatcttatttacttaatcatatgcaagtctatgcaatgctctatatgccatacactactcggatccgtggagagaattcagagaggggaagatcgcgcatcagtccggccgattctcggcaggtcagttaagacccgccggtcctccgccgagccgcgtccccgcctcagccgatccctacccggactgagtcttgtgtaggatgcacatgacccggattctactcagccctctagtcggtcctttcaaggatccgacttctaactcacatcctagaacccttagactcaaagtctaggatcccttaccttccttctcgaggttaggtcgatccgaccctccttctttattgccggccacagcccggctaccgaatcctaagactatttattctcccaagagggagagagttttaatggtgagtttcttgtgttttcggtgtgttgtggtgggtggaatggtcctgggcgcccttccttatatagggggcgaatggatgcttcccgaatcaacacatccgttccttgcacctttccgaagagttgcacctttccgaagagttgcgcccttccgaagagttgcacctttccgaagagttgtatctcttcgcccataaccgcccagttcgtccgtcactcgtccagctacctcgagctcgtccgtcacttgtccagctacctcgagctcatccgtcactcgtccagctgcccgagctggactgtcactcgacctgagtaactgtcactccttccagctgagcttgagctttgggcgagctgacccaagtgatttccttacgatcctagcttagcctgcatgatttcccctttgtccgagcttatagccagctctttctcacttgtccgagactccaccttcttctcccggaccaagtcctagccaacgatcctattgaggatcgcgggcgttacagttttgcccaagaacaatgaagaaaactagggtttttagtattaaatttcggatccttagaatagaggacaaacccctctatttatacactattaagacggttaaaagagttgttaaacttttatttcttcgaggattgaatcttctaatttcctttatctccaaagacttcctattttcaaaggagaaaacttctttttcttcgaattaggaagtcggctagacggtctccctacttcgggctaaagtcggcaaatgacctccttattttggcccattaacaggctaaaccgggataccccggtttgattgaaatctcagtctaattcgtagttcctctggtttaagccggtattgtcggaggtgctaattccggcaccaacaattagtccccccccccagttcgggaaaatccaaatgctaaactcgagtttttccgaattaaaagaagtgaatattcggcttatactttaggaagatgcgaattaaaaattgatccgttgaacctccaagatacgtcagtttagcttggcacgcgtcgacgatataaaacaaggctaagcttgtgggttaggtagtctgatggacctcatgagttgttgaggagctgtgggatgctctcctagatgatctgaatgcctagcagagaaatgacctgactgatgagccgagcagtgagataggttaccaaatgatcttgctaacaagctgcaaggcaagctatcagatgatctgacgagcgatctgggatataggttgctagatggtttgtcttgcgatctgcgagatagccgggcagatgagctaaaaaaaacataagttgcgatgagctgcaaacatgccattatcatttggttagcaagatacgtgagcttttgagctctttttttttttttttttttaaggtgcgaggaactctcggcttatcctgttttgaagacttaaagcaagacgaggtcttggtttttgtgaaacattttcacataatagcaagcgtcgagctcggctcaatttatgtgtgactgcaagcgttgagctcggattaactgcaagaattatttttatcttttgaatgtagttcgatactaggtgaactaagctttttgagtcgggactcaatttagagcttgacttcaacaatcaaaaaatgtaaagcacgaatacttatcttgatgggagaagaaatggcgagaggctgagctcagaattgctgttccaaaggtagagttgcattgttcgtctatgaagagtcgttcttatcaaatagtgattaccttgcagcagagacagaaatactgtgataactctttgtcgaattcgacgttaaggtgtaggttggtctttctagaaagctgagcctcggggcttcaaattgatatgcagatcgccatgaaaattcttttggattgctagaaatttgctttctaatttggttgatcgtgcagtgaggatctgcgtttcgctggttgcatctgttgcaaagaaagagtcataaccttcagtgtaaatttctgattgaggcgagatttgcttcttttgaaagctaattttcggggcattccgtggataggttacacgccacgcagttcgtcggaatcttcctggaaattgatttcaaagtcgactggttttgtaacttttgaccagtgtttcgtcttgctgtatctgctggagagaagcgcatgtaactttcggcacatagcttcgattggaacaatattggactatatggagagctgtctgtctgggcaatctgtggatatgtttcctgtctcttggttcgcgggtcgtacaatgtcggaaaattgctcacgaagttggtcgtttgcaagtggtgtcagtctgaattgtcttggaaaaacgatcataactctcaaaccataacctcaaatcgtgatccgcttttttctgtggcttcgtgtgactgttgctgattattccagaaaatatcgtaattttccgagttgttttgttgctccattggcgatcagaattcatgacgacgaaagcaaaggttactttgtgctgcttcagaacttttaacgaaggagggagacatgcgatgctgctcaagttgagatctggaattttagagtctttgtaaacttctttggagctctccacattgttgacttgtcttgtagaaaaagcttattattttttttttttggtgctacgagattctgttcttgacgggtgttgctatctcgaactcaaaatgttagctgttgacaagttgagctaggaaagctgctaggcgacttgttgaagaactccaagctgttaggcgggcaatagcaagctaggaaggctgccgacgagctgttagctgggcgaactacgagccagagaaactgcagacgaactgtgagctaggaaaagtgcagactaggtgctagctagacgaactgcgagctaggaaagctacagacgaacagggagctaggaaagctgcagacgagctgttagctaggcgaagtgcagacgggctgctagcaaggaaacctacagacgaactgggagctagaaaggctgcagacgagctgttagctaggcgaagtgcagacgagctgttagctagacgaactgggagctaggaaggctttaggtcggttgacttatgtcgaccactcttatctttcagacttttatatttgaataaaatgtttttgcccttaagaacaagttcatgtttgttttttttttgtgaacctccgtcggttgattacgtattaaccatatcggattcccaatcttgaaattaggttttagatcgactaaattataagccatctgcaagctttgagctcggctttcgggcggactgattttcccagcttggagttcttcaacagctgttcttctgaaaatcacacaataaatttgtttaaagggggtaaacaaatttacttaactctctcgctatttagtgaccaaagattcaatgaaaagaagaacaaggttgcttagagacaaagttagggttttgcccaagaacaatgaagaaaactagggtttttagtattaaatttcggatccttagaatagaggacaaacccctctatttatacactattaagacggttaaaagagttgttaaacttttatttcttcgaggattgaatcttctaatttcctttatctccaaagacttcctattttcaaaggagaaaacttctttttcttcgaattaggaagtcggctagacggtctccctacttcgggctaaagtcggcaaatgacctccttattttggcccattaacaggctaaaccgggataccctggtttgattgaaatctcagtctaattcgtagttcctctggtttaagccggtattgtcggaggtgctaattccggcaccaacaattagtccccccccagttcgggaaaatccaaatgctaaactcgagtttttccgaattaaaagaagtgaatattcggcttatactttaggaagatgcgaattaaaaattgatccgttgaacctccaagatacgtcagtttagcttggcacgcgtcgacgatataaaacaaggctaagcttgtgggttaggtagtctgatggacctcatgagttgttgaggagctgtgggatgctctcctagatgatctgaatgcctagcagagaaatgacctgactgatgagccgagcagtgagataggttaccaaatgatcttgctaacaagctgcaaggcaagctatcagatgatctgacgagcgatctgggatataggttgctagatggtttgtcttgcgatctgcgagatagccgggcagatgagctaaaaaaaacataagttgcgatgagctgcaaacatgccattatcatttggttagcaagatacgtgagcttttgagctctttttttttttttttttttaaggtgcgaggaactctcggcttatcctgttttgaagacttaaagcaagacgaggtcttggtttttgtgaaacattttcacataatagcaagcgtcgagctcggctcaatttatgtgtgactgcgagcgttgagctcggattaactgcaagaattatttttatcttttgaatgtagttcgatactaggtgaactaagctttttgagtcgggactcaatttagagcttgacttcaacaatcaaaaaatgtaaagcacgaatacttatcttgatgggagaagaaatggcgagaggctgagctcagaattgctgttccaaaggtagagttgcattgttcgtctatgaagagtcgttcttatcaaatagtgattaccttgcagcagagacagaaatactgtgataactctttgtcgaattcgacgttaaggtgtaggttggtctttctagaaagctgagcctcggggcttcaaattgatatgcagatcgccatgaaaattcttttggattgctagaaatttgctttctaatttggttgatcgtgcagtgaggatctgcgtttcgctggttgcatctgttgcaaagaaagagtcataaccttcagtgtaaatttctgattgaggcgagatttgcttcttttgaaagctaattttcggggcattccgtggataggttacacgccacgcagttcgtcggaatcttcctggaaattgatttcaaagtcgactggttttgtaacttttgaccagtgtttcgtcttgctgtatctgctggagagaagcgcatgtaactttcggcacatagcttcgattggaacaatattggactatatggagagctgtctgtctgggcaatctgtggatatgtttcctgtctcttggttcgcgggtcgtacaatgtcggaaaattgctcacgaagttggtcgtttgcaagtggtgtcagtctgaattgtcttggaaaaacgatcataactctcaaaccataacctcaaatcgtgatccgcttttttctgtggcttcgtgtgactgttgctgattattccagaaaatatcgtaattttccgagttgttttgttgctccattggcgatcagaattcatgacgacgaaagcaaaggttactttgtgctgcttcagaacttttaacgaaggagggagacatgcgatgctgctcaagttgagatctggaattttagagtctttgtaaacttctttggagctctccacattgttgacttgtcttgtagaaaaagcttattattttttttttttggtgctacgagattctgttcttgacgggtgttgctatctcgaactcaaaatgttagctgttgacaagttgagctaggaaagctgctaggcgacttgttgaagaactccaagctgttaggcgggcaatagcaagctaggaaggctgccgccgagctgttagctgggcgaactacgagccagagaaactgcagacgaactgtgagctaggaaaagtgcagactaggtgctagctagacgaactgcgagctaggaaagctacagacgaacagggagctaggaaagctgcagacgagctgttagctaggcgaagtgcagacgggctgctagcaaggaaacctacagacgaactgggagctagaaaggctgcagacgagctgttagctaggcgaagtgcagacgagctgttagctagacgaactgcgagctaggagagctacagacgaactgggagctaggaaggctttaggtcggttgttttatgtcgaccactcttatctttcagacttttatatttgaataaaatgtttttgtccttaagaacaagttcatgtttgtttttttttgtgaacctccgtcggttgattacgtattaaccatatcggattcccaatcttgaaattaggttttagatcgactaaattataagccatctgcaagctttgagctcggctttcgggcggactgattttcacctgacgtcacagccgattttttctgtctaagttcgggttagatgttaagtgcgagactgagctcggctttataaataaaagtattcggcgtgtactgggcgcgagacgtctctcggcttatgcccagtaggcctatgtataatttaaagagggagttctgggctctgtataaaaaataagtgaggcggactcagcatattagttggggagcgagatgctgggctcggcttactccccgtagagcatctgttcggcagatcgcgaaatacagggttcggcttatatttctgtccgaaccagagcttaagtgcgagaaaactggtctcggctatccctattagaaaaattaagtttctaatagggcgtggattatttcaccactgcatccatgtgagacgcgcatcgaacacctggccagggtgccgagagttgatttattacagatcttaaagcgaattccgtattgagaatgcaaactttaattttattaagtggtatagctgcatccttacgaaggattgcctacgtacccagttagggatcaagccattcgtagttcgagttctaatggagaggtcggattaccgagctcgtgctttttttttttttttttttttttttttttttggcatagacgagtgtttcgaaaatctatgcaaaagaaaatataacagataatgcatgtatatgattgagtgatgtttgttagattataatcgataacacttatctcagcggtttggagatggagatgatgacatcaacgacatggacgatctgagtatccgaaattgtaaacgtcgatggatgaaaatctacatttgagatgttgttcgttagagaagatctcatctttgcgcagaaagagagaagcaatgatgaaagctagtgatataagcgaaaatgtcaatcaagcttaactaatatgtaagaaagtaattgaacttatcttttatgtgggaggtcgtcgagacggagacagaattggagatcgcatcattgatgaatgagtggaagccttgagcgattgctagtgatgatccattctgtactttcttttgctgatttacagaagaactgataacttccgtttgaaccgttaaattattgatcccaccgttgaatctttagctgatagtcccacgaagattttgtccgaattttagtcagatcggatattgcctgaggcttctaccgtcttatgaagttgctgtgacagtgaatttttcttcctttggctgattcggagatgcattaataactttattctgaaccgttgatttctcgatcccaccgttgaatcattatctagtagcgtcaagaatcactctgtaaatttatagctagatcggacgtcgtatgtatcttccatgatcctctgaagtcactacgacaaagtcgttttttcctgatttctgcagtttggatgattctgggccaactttgaaggtgatttgcagatgtagattaacactaattggtaatccgcttacggaaaatgattccttgtagtgagatatttgctaagagtacttagttagaccttaggtctttctgatgcgtcgggaaaatgtctcgcaaaagctctagttgcacatcagatcttgtttcagacttggcagataggtatatcactgcctagttcatcaggattttcaaggaaaacgatcccgaagctgactggttttatagagttgggtctcatgactggttgcacttgcttaaggtaaacgtttatatctctcagcatatatcttcgattaaggcgaggtcaacttctccgaaaagacgactctctgggcgatccgtagatgtattaacccttacgagattccctgtgatttgtcgggaaatcggccccgtggtgagctggattattcagacggattcgtagttctaaagatcgcatcttctggatagaagcagggataacattcgatagacagctccgatggaagtgaggtcagcttctagggacacctgactcgctggaaaatccatagatgtgctactagtttcgagaatcgttgagacttgtgggggaattgatccctaagatgactagtcttcttaagaaaggattctatgtcaaacgagattgcatcctctgcagaaacatggagataattctcggatgagatatcggatcgaaggctagttagattccctggaaagctaacaaccggggcaatccgtgaacatattattcgatgcaagagtcgttgcgacatatcgggaaatcggtcctgaggttgactggtctattcagacggatctgtgttgaaacagacagcatcggctttacaaatacggtgataactctcagaatagatatccgattgaaccatggttagactccctggaaagctgatctccggggcaatccgggaacacgttacacgtcacccggttcattggaacctgacgggaaatcgccgagcaaataaacggattggattatcttggcttgatgagcgttcaccgaaaacttggatgagtaatatgcgaagagagttgtttgtgtccccctacctggcgcgccaattgttgattctgaaaatcacacaataaatttgtttaaagggggtaaacaaatttacttaactctctcgctatttagtgaccaaagattcaatgaaaagaagaacaaggttgcttagagacaaagttagggttttgcccaagaacaatgaagaaaactagggtttttagtattaaatttcggatccttagaatagaggacaaacccctctatttatacactattaagacggttaaaagagttgttaaacttttatttcttcgaggattgaatcttctaatttcctttatctccaaagacttcctattttcaaaggagaaaacttctttttcttcgaattaggaagtcggctagacggtctccctacttcgggctaaagttggcaaatgacctccttattttggcccattaacaggctaaaccgggataccccggtttgattgaaatctcagtctaattcgtagttcctctggtttaagccggtattgtcggaggtgctaattccggcaccaacaccataccgcattgtgtttggacttgatccccgttggcagtccggtgacgaaatccatcgttatgtggtcccacttccattccggtataggtaggttttgtaacaacccacttggtacttgatgctccgctttgaccagttgacaagtcgggcacttggccacccatctggccacgtctttcttcattcctacccaatggtagtaccttttaaggtcgcggtacatcttgttcgacccaggatggattgagaacttcgattgatgggcctctcttaggatctcctcctttaatgccctatcgttcggcacacatactcgaccgttcaccacgattgtaccattgttcgaggtttggtactcggtcttattgtttagtgcccatccttttatctcctcgtcccgttcctgagccagccggatcctactaagcaggtcggcctgatcggcggctcccaaccctaagggttcaacttctttagacaaggcattcacatgcaatgtccccatcatgttaaccaagtccacttggctccgttccgcctcaacttccgaacgcctcctactcagggcgtcggcgacttggttggccttgcccggatggtacgctatatccaagtcgtaatccgccacaagttccatccaccttctttgccttagattcaactccggctgggtgaatatgtactttaggcttttgtggtcagtatagatttgaactttagcaccatacaagtatgatcgccaaatcttcaaggcaaatactaccgcggccatttccaaatcatgtgtagggtagttcttctcatgtttccgcaattgccttgatgcgtatgcgataacactccccttttgcatcagtacgcatcctagtcccactattgatgcgtccgtataaaccgtatatggctcaccttcctccggtaagaccaatactggtgcattagtcaacatggcctttaactccaggaagcttttctcgcattcatccgaccagttgaatgcggtgtcttttccggtcagtcgagacaagggttgggccatgctcgcaaaactccttacgaaccttcggtaataccccgctagtccgagaaaactcctaatctcggtggcaatccttggtcgtggccactcctttatcgaccgtattttctccggatcaaccgacactccttggtccgagataacatgaccaagaaaaccaacgcttctttgccaaaatgagcatttacttaactttgcaaatagctcatgttcccttagccgttccagcaccgcccttagatgttcttggtgagcttcccaagatttcgagtaaacaagtatatcgtcaatgaagatgataacaaactcgtctaagaaatcccggaacaccccattcatcattttcatgaaggctgctggtgcattggtcaatcccaatggcagaccacaaactcaaagtggccgtaccttgtccgaaaagccgttttcctcacgtccgttggctctatgggaatttggtgatatcctgaggccaagtcgatttttgaaaaccactgtgcacctccaagttgatccatcaactcatctatccggggtaaaggatatttgtttttcaccgtaactttattcaatccccgataatcgatgcatagcctaaagctaccatctttctttttcacaaacagaaccggcgcaccccatggtgagctactcggcctgatgaatcctttatccaacaactcctccaactgtttctttagctccgccatttccgccggtgccatccggtacggagctttagatatgggggttgtcccgggctcgagttctatcgtgaacgggtctgaccggtccggtggtacaccactaacggccgcaaacacgtccgagaactcgttgacgatcggaatgtctttcaactccgcactcgcccccacttccttggttgtgatcgtggctaaatatgcctcacattctttcccgagcatcctttcagcctggattgccgagattaccaagcttcccgaggttgttcttattccttggaattttaacataccctcgtccctctcgaattgtatccgtcctcggtgacaatctatgtgagccttgtacttccccaaccagtctatccctaagataacatcatgtttctttagtggaacaatgattaggtccgcgggcatattgacactgttcactacaaccgagatgccccgaacaagtccggtcggatacattgcctgtccgccggccgctcgtaccattccataatcggtgtttggttctttcctgaacccacctatttcaaccaattctggactaacaaaacaatgtgtagccccagaatcaaatagagtgtgcgttactacgtcacctactctcaaggtccctacacattcccttagaatgttgagtacctcccctttcccatatgcatgatgcaatgcaaatgcagttattgaaataatgaatagggagttgtgagaacgtaccagtgatcgccctgaagtttccggcatcgttagcttcctccgacaactcataaactcgcggtgccacggcttgccgctttgggggaggcggcagtccatttcccccgcgattgtccctttgtccggcctgcttctccgcagtcaacttagggcactctcgctttagatgtccagtctttccgcaatagaaacaagtccttgtctcttcaccgagaaccttggactgccctggttccattctcgggcaactttggatcgcatggtccttgcttccacaccggccacatgcacctatggccttccagcaagttccgctgtggctcttaccacaggtcacgcattccccggtcttagcatcggacttggtgttatccaccttgtcaaatttccttttcttatccgcgggtttggtggattgattgttccggatcggtgctttctcccggttcaagtacctctcctcctcgatcccttcctcaatcattgctgccctttcaaccaattcggaaaccgagttgaatgtccggaccaaacaatggttgcggatctctatccttagtccacggataaatcggcgcacttgagcttgttcctcctcaagttcacgtcccacataacgccttaggcggttaaattcctcatcatattcacgcaccgtgcggttcccttgaactaggtcgaggtacgcacattcaagcctatcccaagcctccggtggaaagtacttcttgttaaactcgtcttcgaaatccgcaaaggaccggacctcgtcccctctgcgtttctcgacggttaaccaccaattatgggcgtctccttcaacgaaatggaccgcaatgtccctttggtaatcctcagggcagcgggtagacttgaagttcctcttgagtctactcctccactcatcggccacaatcgggtccgtactgcccatgaagtgtctcgtgcccagccttgagacatgttcgagaagactcagatagtctccccttttccgcccataattcggttgtggattcacttccacaacttccgagtcatcgtccttttggttatccccttttaggaccaccggatctgctacaacggccttggtcaatgtggctagttgcgccatcattcccttcatcaaatcccactgttcttgggccgttggagtattgttccggttatccgtgctgtcccttgcaccactactctccggtgcttcctcatttatggacttcttcccggcctcaggtccggccgagtctgtcccatcgaacattgtcccgactctggttttctcgttgatcatcgtttcctcctcaaccaaagtctcctcgacaatgcccttgtccttcttactctttcccgttttgctgctcttacccatctgcgaaacctctaaagttaatccacataactcctagtaaaatcgcaaaggagtaaagaacaactaccgcgagattctcaagccgacgagtggtgataccccttaacccaacacctagtcctagaaccaagcatgctctgataccaacttgaaaggccccgatccggactgcctaaagtccgggcgagttctctcgacccaagccactaagtgactcggccctaaccgtttatgaggttctttcctagtctaatccgtttcatatgattccgagattcaatatatgagacgaatagagtaaacaaacaatcggatactttattaattaagcaaaggattcgatacaacctatgagtttgcatataagctattacaagtcatataatcgatccctagactatccgaactatcaccacccatcatcccggccttgagtctctcgcgcctaagccaagtccttcccacgatcaccattcgttcctgaaagtcatagagccataagtaatcttatttacttaatcatatgcaagtccatgcaatgctctatatgccatacactactcggatccgtggagagaattcagagaggggaagatcgcgcatcagtccggccgattctcggcaggtcagttaagacccgccggtcgtccgccgagccgcgtccccgcctcagccgatccctacccggaccgagtcttgtgtaggatgcacatgacccggatactactcagccctctagtcggtcctttcaaggatccgactactaactcacatcctagaacccttagactcaaagtctaggatcccttaccttccttctcgaggttaggtcgatccgaccctccttctttattgccggccatagcccggctaccgaatcctaagactatttattctcccaagagggagagagttttaatggtgagttttcttgtgttttcggtgtgttgtggtgagtggaatggtcctgggcgcccttccttatatagggggcgaatggatgcttcccgaatcaacacatccgttccttgcacctttccgaagagttgcaccttttcgaagagttgcgcccttccgaagagttgcacctttccgaagagttgtatctcttcgcccataaccgcccacttcgtccgtcactcgtccagctacctcaagctcgtccgtcactcgtccagctacctcgagttcaaccgtcactcgtccagctgcctcgagctcgtccgtcactcgtccagctgcccgagctggactgtcactcgacctgagtaaccgtcactccttccagctgagcttgagctttgggcgagctgacccaagtgatttctttacaatcctagcttagcctgcatgatttcccctttgtccgagcttatggccagctccttctcacttgtccgagactccaccttcctctctcggaccaagtcctagccaacgatcctattgaggatcgcgggagttacaaggccctcctctacctcagcagccgtctccaccagtgccgccttcgtggcgtactgcgacactctacaccgcactctcaaatccggtcgaagtcccctcaagaacctcctcatctgggcctggtcatcctccatgccccgacccgcatacgccaagagtcggttaaactcccggtcatactcccgagccgaccgctcaccctgtgtcagctcaagaaaacgcgcctccatacggtcgagcgcctccttcagaaagtacttggcattaaactcagccacgaaatctgcccaagacatatccgcctgcctcctcctggcagtcacactccgccaccacaaatgtgcatccccctctagaaaatgcactgccagatctacccgatactccgccgggcatctgctcgaaccaaagttccgctcaacccgcgacctccaactgtcggcctcctcaggactagtaccaccagaaaaataaccggtgccaatcctctgcaactgctccatcatcctcaaataagatggaacctcctcagcaaccgcagcccgctgctgcacctccgccactcgtggcgcaactggagcctccactggtaccacacctggtaaccgctccaacaactgcctcaacaggcccgccaaaccaacctctggaacctgggctccggctgcggcacccatcactcctggcccctcagcaccaacggcatgcacaccggtaccgacactagctccaccagcccccactccggctgcaccagctatatcggcaccaagaccgttcctaaccccgggctcaacaaactcaggctgcgaacccacactctgctcaactgtggcactgtggccatcactctcgccggtaccctcgaggactcatcccctaccgcgaccacgaccacgaattccagctcctctaaccatctgcgctactcaagaacaaatagctaagaaactaaaacaaacgaatatatcacgaactcctcggagaagatgatgctaggactccaacaacacacaattgactaaacactccataatcaatcctcaatatgctaacaccctagctcatcctgtgagaccccgtcccggacgtctcggcgtccggcgacgttgtactcaagttcgcgcctcttcccggccgaacctcttaatttttcgcgattcaacatagaattgcctttacgaggctaaattctataatcgctctcttattacacagcggaagtctttctaaccttggtttaattctaaccaactcttgtaccggtttcatcgtctttgttccttagacttagatcgatcttttactcggtcaagacatgcatatgttcgctaaccattctaagccaaacaatcgcatattcctttatcctactttcacggtcaattaccaaacgtctatcttaactaataagctagatcgttacataccttggtcaatatgcggatttgattccttagcccgtttgtcgccttactccattcgttcaacgactcgtcatcgatcgtgaattgatgaaccaatccctatcgtacttagccatacaaccaaccaaccccactggtctaagtacaacgatagagattggggatcgtacgatttccttggttcacgatggccgaatcaagctcttggcttattggtccattcgttctccaaacgtacgcccctccggctacatggtggacgattgagccctcggcttatcgaaccatccatgtttccgtttcggtcgtttaacactacgaccgcccatggttactaaccgtttacccgtccggtccatggtggtcgataaagctttcggtttaatgatccatccatgcggtccgaacgatatccttatcacacccaagggtccgtggattcatccactggatcatcgtaggctagcccatgaaatctttcttccgtcggccttaggtttgctcgcgggtccaacatccgttttgtccatcggttcccaccgtggactttcccgttggttatccgtcgagtcaccctttggtcttaccgatctctgatcggtttcaccatggctgaggagatagatacatgaaggcggccgcgatgttgatcctatatggtgaatcatgttccttacccattcttggtgctttctccctttatcagtaagattgcatccatgggcgccccttgggtgtgttcggatgcacttatccttgtgcttcctcgaacacttttctcgatccatcccatccgacgatcagtctgtccgacccgatccgtcagacgatcggcctgtcccatccgacccgtccgacgatcggtctgtccgatccgtctggccgatccgatccgtctgacgatcggtctggccaatctgatccaacgatcggtctaccagatccgattcgtctctaagacgaacggtttaccctctccatcctctacactccatcgaaccgttggattgggaggtagcatgcgcatcagttcggtcgagttatactcgccgagcagcaccccctttccgaccaacaactctaggatgtgttggaactcctttaagaatgttttatggtgttttggatgttgtgagatgatgtgagatgccttgggcgtcctcccttatataggaggcgaatggatgcttcccgaagcatcacatctggtccttgcacccttccgaaaggtcacatccgttctttgcatcctttcgaaaggtcacatctgttccttgcatcctttgggcgatgcaaccgttcgttggtacccgctcgaccttacacctttggccgagacacctcttcacccgtgagctaccacagtccaccagctcgagtgtcagctgaccggaccacccaactgggtcagtacttgattagctcaccgagctcagtcgagctgtcggtcagctcacctagctgagctagctagtcttacagctggtttagctcacctagcttagctagctagttcatccagcttgtccagctcacctagctggttcggcttgaactttctcgttcttcctactaagtattttggtctgttcctcgaccatgatctagttttctcctaaaacaaaccgaccttttttatgaacgcgggacgcggtcgttacacatcccacatcaatcatcaggaaaataattcatcaattaatttttctacacatcctagaaccgtaatcgctctgataccaaattgaaacaacccgacccatttttaaaaaaaaatatataattaaatattcccataaatatctaattaaaccaaccaataacataataattaaaccgcaagtcagaaatactattttatgaataaataaataattcgatcaagaaaaccaagaataaccgggttccaataaccaaaaagaccaaacataaaacaaacgagttcctagatcatcctctcttccttgccatgattccacaatcacactttatctttacctgcatcaacaacacaatgagatgcgtaagtattatcataaatacttagtgaggcgatcctcccatctacgagctatacacacaagcaaataaaaaggtataatcacgaatacaatacaaacaaaccagtcattgaacaattcacccaaaacacattcaccacacctacatatcatcacacaacccaatcgctcagataagctcatggtcacgcactcaccttaataaattgattctaatagcaattaaacccaggagagtctctccttgcgtctgaaacagtccagaaacgtccgttaactattcaatcgctccggtgaaatcctagctgcagacgtcacaaagctgcccacaaaatctcgtctcgatcgaaaaacagacgagaccacgatctcagtttcaatctccgctggtcctaattcgcgtctgagaaaacgtgtctcacgaaacttttaccacggtttgatatgacgaaactgatttctcccaaaccctaacgattctgctcattctccttttctctctttttctcctttacaaaacgaaaagtggctaactaaagccctaatttcgagtttccttcttttataggcatactctagggtttccaattaacccaaccaattaaaccggatgatttaaaaacaaaccctaactgattttccggttcacggccgttacacatccactctataagaattatcaaaccccaggcctcgacagatcctctctgctctgttccctccagcatgagtttcgaacaatgcaagcaggtctgttttataattcttcaacataaatcgaattgctcttcgaaaattgggtttattcgccccccctgcagttccagaatagacaatccattaaaaattgtagagttaaataccaaactaccggggaaaaacgtcatgccattccctcactggaattccccacttccgatccttcatgactcacaacagctatttcagacatcaaatcctcccgctggaaccgctgagacaaagtcgacgatgaatccaagtcgaaactagcctcatgggcatgcgaacccatcgcacttgaatacacaccacctggtctcccaacatctctttgttccacacgcagtcgcttcccgttggataacaaatcctccccaactggtactgagtttgcatctttagtaggcccaaatattaatcccctagcaggcttatttgcggccccatgtttctgttttggcccaatgggctccaaagccttcatccctccattacgcttccatttaaaaccacctttactcccgcctttccctttctccatctgcgtagaaccccgagcttccttaactagtgggacacccataaccttccccacattcctcccatgatattcattttccttatttggcccttctgtaatggcaacttcccttaaatcaggcaaatcaccattaccatccaatccaccaaatcgatttgcgagatccaccccctgatttttagggagttcccttaacctctgttttgacctaccaccagacgcacccaccgcaaacaccatcttctgcaccggtgccgccggccgtctagcggtgcgttgaaccactgtgaacccgtcatctccctccatcccaacaggcaccacagctctatccgtaaccgtctctgccccagccgaaactttcaccaccacatttcttggacaagaatgaaccaaatgaccgtaaataccacacgaagaacagattttagacagtccttcatatgctacgaagtatctatccccattgattagcacagtcccttttaaaggttttgctaagttaacctcaatacacactcgagcaaaacgacccttgtcaaagttaatcgtattcatatcaaccttgagtggtctacccaacccacgagcaatctccatgagtaaacaccgatgatagtagttatacgggatattcgataatctaacccacaccggggtagtcacaatatcatccctcaacggatcaaaccttgacgaccagtcttggaccaacagatagttcccaagaactctccatggacctccggttaaagcagccatatactcctcttccagttcaaacctaatcatgaaaaactggcggggcaaatccatcactgtcatcactcccgacggtttccaaagctcccttagcttgcgattcaacaccgagatcggaatctggctcccaagcaccttcactatcatacacttcttccaaagcccattcatggcttccaacacctcctcaccaatggtaataactggctcctcgtcctcaccatctggaaactccagccccacccgctccctcacaaactcatcatcaatcacgtcttctggtttcaagatacctcccccagcactacccttcactttcgtagcccacgactccaacttatccggaggatcccctggtggacgccccttttctccgacgtcaagcatcatagcatcttgctcaccagatctcaccgccgtcgcagaataattatattaaaatatactgtatataaatgttaggatccccatgatacttttatctaaagaaatgttagaatacttacggatttaagatatatataaatccaaattaaattttcaattttaatattttcttcaacaattttaaataattatattaaaatatactgtattttcatattaattacgaatttatatatatatatatatatatatatatattaattagatttaattttttaaatttaattaatatttcaaagataaaatcaaaataattatatcactttcttaaaaaaatgaacagttcaaaaatgtccactctgtagaaactcgtgcatgattggttgggctttaaatctgacttacagccttaatttttcttaaagccctattttcttgctaacttacaaaccaatggtgttgtagctttctttttaaacttacagcccaaattttttttattttgtttttaaggctgtactagagtaaattctcaaagccctattttcttggctatagaaattttaattcattagataaatacaaaaaaaatttatcaaaatatatatataacaaaaacaaagataaattctaaaaaaaaactgataattatcaaacctaaaaaaaaaaaattatattgcaataaatttatggaataatcatagataaaatttagatttattttattaaaaattcataggagtttttttatttttatataatcataataaatatatctaagttagtaatataagacattttatttactataaaaaaaaaattttattacaactattatatttacttatcatttttttataaatatttaaaaataaaaacctacagcagtaattctacagcaataaaagttacagctacagccaacacagctacagcaaaatctctacagcgaaaattctacagttacagcccaaccaatcacccaccaaatataagtcgactgttttgatatagtcggtagagaaaaaattaagtcgatgaaaataaaatataagtctactaagattaaacaaaaagctgataattcaaaaagtctatcttattaataaatcaacgtaaaataaaataagtctactaagattaaacaagtcggaaaaacaaattataaaattaataattaaaataataagtcaacagttgaaaaagtcatctatgtaagaaaaacaattaaccaaaatgtaaatcgactgttataaaataagtcgatgaaaaataaatttagtcgacaaaaataaaagagaatattacatcaaggggcactttttaaaaacatttgacgtgttccaacacttaaaaaacattagacacttttccttgttaaaatgactattataccccaaaattattagtaaggcatataactgacgattttcttatttttaaagtccaatttctctttaatcttttagaaaatctcaatattcaaaatcaaaattgaatctcttagggtttctcatcatctaccatatttctcaaccatctatcgcttctcttcttcttctctggagatctttaaatacattcatgaatctgattctaaatctctgaaagtctccaactttattacaaaatttggacaacagatacatgaaacatatgacggtttctgtgcacttctcctcctcgtttgacgacgtcgtttatggccaaagccaacaactttaatttcattgtgtccccttcaatccattacagtctatgatccaatacaaattacgaaccatttgcttgttatcaacaacattgtatcatattctcaataaaatgtttgttgatggatcttgtattaaaatatataaaacgaactgtttagataagtctatgtggccagtttatattggatacacaattagagacatttcagtttgtagagacctccaccttcaagatcttatgaacatggaattttggtttttttacaaaccacagttaatcgaatcttctgttattatggacatggtatatagaatggatatggatcagtaaaaaggtttctgaatgaatatatcttaatggacttgttattatggatacaaaactattgtttgttgatttttctttcagtttgcagagacctccacctccaagaccttatggacaagaaaatttggtagctttacaaaccacagttaatcgcatctcttttattatgtacattgtataatgaataaatatgtatcagtaaaaaggtttcttaatggatatacttaaatggactcgtttttatggatatatttaaatagactcgttatcttctttttgtcttcatgggatttaatcggacgactattgtttaattttagccctagatctcggctgaatgatatttccgacggtacgaaggctatgaaaaccagatcttcaggtaacatttcgatcatcatcttcccgaagaaaccgagttcgtcggagatgtcgtctccgagtttgcagagatggttaccagcggcgagaggtgtttccggtaatttaagaaaggagaagatgagtatagttaaggaagaagcagtgatgagaagaaataggaaaaacattggattcttcaaaaaatgaggtttcttcatcgtttctattgcgttgatttcatggatagatgtctgcttaaggagaaagaagaaggaagaagatctgagagagaggaagacctttttcatcagatataagattaaaaaaaaagcaaatttcatttctttttaaagaaaatattacgtgattagacagttatttggaaatgatataattgtcctttttacctccaaaaacaaagaaaagtgcctcatccctgaaaagtgcctcaaaaagaataagattttgtaaaagtgtctaaacgtgtcacattcccaaaataaaatataagttgtcaattcaaaaagttccttattacactgatatactaagtattttcttatagtagaaagagtgttttatatgaaagcaacattgtttcttagaaaatattaaatttttattttgttgatccaaaatagtttatttatatttgagaaatttaatatatgagaactgtaaaatacaacgtttggagagaacgtaacactagaaaataccataaagaacacaacccgtgcactcacctcattaccgtcatcgacaagaccattcgagatcgcatcaccagtctttattatcaaggcaccagcaaatatgcaaaccttcagaacggtgcaggcttcactaacgtgataatttgtaatgttctgttttgagatcatctccaggcctagctaactttatgctaggttattcagctgtgtatgtttaaatgcggcatgcgttactgttttgataaagtagctttagaagaatgtagtgtgttgggaataagagtaattttgttttgtgtttaccaaattacagcacaacacagacatattcattcttcatgctcgtgatagtgcctagagaattaacgacttgtgatcacattattagaggaaactcctaactaataaggattaggataaacaacactacatgtggtacactcaacaactcaaagattatctcctgaaaccttatccaactgttcttcggccccaagcagtgatgtagatggctggtcaaaggcgaggacatggtctgactgatggtaagaagtgttcaagcctgattctagtattgggtgacccactacaatatcaggtgtataaccagctgcacctctcaccaatcgaggcttctttgataatctctcctctcctgtgctctcatctggagacccaatgttacaccctgagtctggtgttaaaggctcccggtaagatgagagagactcgtcaactgagagacttttgtctggtccacagtccttgccagacttgtcttgaagaggagactcagatgttggggcaggggttgcaggatctgaatcgcccgttactggggctgagggttcgccgagtactccactgagtcgttgttgctcttcaattatcttcttcaagtactttccttgtgcttctatccgtagttgcagctgtctttgcacctaagaaaaaatcacatcaaagaataatgtcatatgtaatgcaaaattcagtgctacactgaaaatcctactaattgtttcgttgttgcttgtctttcttaagtaggaatggtgaagcatacttctagttgctcgtgtaatcgtttctgaacttccatctgcaacttgagggcttcagttatctgcattcccctgtaatctcgaaacgatattgatcacttaatctgcggcgcgaggtaatatatatatagcatcacaaatcaagctcaaagagggaaatttcacgtacgacgagccgtccaacccagagagcatatctccagattctttcttatcagtttttttccctgaaaattgaaaaaaccagttttcaggtatataggaaactggtagaatgagaaagaagatgaagaaaatcaatgtccacactaccttcagaagacgaatctggaagatactttgcaagtcgatatttctgactcaaaatacacaaatgcaaaaatcagcaagggtaagagaaagagagacgagacaagatgccacacagtttgagaatacctgtaagtgactcttgacatgatatatagttaagccttgtacacccatcactctaagaacgcctttgggtgtagctcctttggaaatcaaaggaagaaaaatgtttaggaaccctaagcaaacagacgataggctttccctctcatggatagtagtaaagcatacaagaagagcaatttgattatattggtgtgcatattattaccacagatattgatgaggaaaacatgagttactaaatttaccatagactatacaagaaaaaaggaaacttactatcagggccaccaagttgagcaacggcatcaacgaagcgttcatgtagctcatgcgtccaacgcagacgttgtttggatgcatgactagaattggggcctccgttgtctgcttccatcagggctaagatataaacacgataaagggaaagtaatgagtagtggcaaagctaggaaatgataacatatgaggactggccagagagaaagagatagaaatggaaacaaggaagacgaaatagcgcccagaattagctagtaaaaacagtccaagtcaagtttaagacttgctccggcagatccaccacaggacaccaaaatcagagacatgttcactaaaatcggaggaatttgtcgccgagaaagcaaaaagaaaacacaatccaaggttatggaatctacgaacctgtgggtggtggatctatacacgacgcccctccattttcggaacttgctcttctccaagctaaatcttatctgaaatagaagatattgtgttacagactagtttactgagtccggtgggttacagggcgggcggcgatggagcagagtcctcctcaaaaaaattccagtcttcttcttatcgctcgatcgacgaattccaggcagtggcattgactattgctgcatttctttctgggtaagccgggcctctcggtataggcccaaaccattctaaggcccaaaccattatattaagttggttggtccaccaaagtcagcagcagctagaacaagagcgactctgcagctgctcttctcccgcttccttcctgttagttagcctcagagatcctcgttccccgataatggatttgggaaaactgatccagctgtctgcgctgctgtgcccatttcttctatcattacactttagaatcgctggggcctccgcccacatctactcttcccagcccttccacgatgtcggtaattctctcctcctctacggtggcagcgagggcatcttcgcctcttcccgatctttaatcaggtatattctatggattacattttcaactcttttgatgctctctactctactctactcatcctccctcctcactgcaggtttgagaacatcactctctggaggacaattaccggtaagggccaccgcagcaatgggttagttcaagcagtgatctttgaagcctccgatcgtaacaatatcggtggttcagcttacggaggccaaagatctatttgctgcactccagatctggccaagcttcaaggctgtaagcagggtgagatcattaggattccttctccacatgaccctcaatggcctatcctcttacctgtccgctttaaaggaaaacgctcgtctgctaagatggcagacactgagattcttatcaccaagactggaatctataatctcttattcatatcttgtgatccacaacttaagggcctcaaaatgaccggaaagactgtttggaaaaatcccgacggctatcttcctggtaggatggctccactcgtgaatttctatgtctatatgtctctcgcttatttgttgctcagtgccgtctggttcttccagtatttgaggttccggatggatatattgccacttcaacattgcattactgccgtcattcttctaggattgcttgagatgctcttttggtacttggattatgctaattttaatcacacggggatgaggcctttagcccttactacatgggttgttaccattggtgccttgagaaagactgtttcccgcattctcattctctgtgtttccatgggatttggggttgtcaaatctactcttggtggtctcacttctaaagtcctccttgttggagttacttacttcatagcttctgagatccttgatattgctgagcacgttggcatcattgacgatatgtccggaagatcaaaactttttcttgtccttcctgacgccttcctcgatgcatttctcatattgtggatatttacctctctttcgaaaacactggaacagttacaggtatctctttctttctaaatatagccatcagactctgtaagttgtaagggttttgaggcaagattcatcagaccagctataaaattctttattactgcagatgaaaaggacctcggtgaagctggaaatttaccgcaagttctcaaatgcactcgctgtgatggttgttgcctctgttgcgtggatagtgtatgaggtaccatcctgtcaagcctgatttgatgctgatttagtaaactcaaatcttacctctaggaaacaaactgctcaactaaaactggctttgtttcaagctaggaaaaaagaagctccttctttcttggaatatacccagcttgcttgcctgatgatttgtccccgtgcaggtgtatttcaaagcaacagatccattcaatgaacgatggcagactgcttggactataactgccttctgggatgttatcgcattcttgttgctatgtattatttgctatctctggaccccctcgcagaactcccaaaggtatgttacatcaacttaaaaggttttgatacctctcgggcataccaacaaataagcatggttttgtggaaacggtttcagctgagcatgttgtgggaagtcttggctacatgctagtggttcttatgtagtggtccaattttggtgttcctgggtgtgatagggatgctaatatgaaactaatgatggacagatatgcatattcgggagacgtggatgaagaaaacgaggaagctcaatctctgacaggggggaagcaagatggtgatattagcttagttaagcaagagaagaatgcggagtcggacagggaagaagatgttgaagaagataaaagagagtgaggagagtcagtatagaaacgacgtggcatctgtgtttgatcaagagttgacgaaaatataaatatcagcaagaggtcagctatatagcacaaagcaacgacgtaatacatatatatgatgtaactaaaggatagtaactgtgtgtttgtatttgtttgtttttttaatatcagatccaacattttttgagtcatctctaacccttgtctgagtgtgagatttgcctaaaattgctgtaaattacattattgatatttttattggtggttaaaattgtgaaacattaatttgtcaataatactagagtccagacacggaaacagggtctctctctcttgttgtgtataatttcaacaccgctattacagaagaagagtgaaaagggagagggagcttcctgctttcacttactatgcctcctcctccttctagttctagagcaggtctcaacggcgatccgattgctgctcagaaccagcagccgtattaccggagctactcatcgtcgtcgtcggcgtcgctgaagggatgctgctgctgcttgttcttgctgttcgcgttcctggcgctgctggtactggcggtggtgctcatcgtaatactggcggtgaagccgaagaagccgcagttcgatctgcagcaagtggcagtggtgtacatggggatctccaacccaagcgctgttctggatccaaccaccgcctccctctccctcaccatccggatgctcttcaccgccgtcaacccaaacaaggtcggaatcaggtacggtgagtccagcttcacggtcatgtacaaaggcatgccactggggagggcgacggtgcctggattctaccaggatgcgcacagtacgaagaacgttgaggccaccatctccgtcgacagagtcaatcttatgcaagcccacgccgccgatctcgtcagagatgcttccttgaacgaccgagtggagctcacagtccgcggagacgtgggggctaagatccgagtcatgaatttcgattcaccgggtgttcaggttcttctcccttcttttctccccgcattttgctcgctcagcgatctggcctaaccagcgcagtgtgaacacttttgacaaagaaattaccacactttttgagtaaaaaatgcgggtaaaaaaaaaaaaaagtggttgctaagttaaatagattccttacaccactagtcatgctcttgtctgtccccactctgctttccttttggcctttgcttctccttcacttttgatattttttctaggatcattcatccacgtctatgccaccacctaaaaagctattatatgttatatattgaggtgtaaattacgaacaacgacaccatctccttcctttcactggtttatagtgtattgatttaaactaataattttatcaaaaaaaaaatatatatatatataaaaagattcactctgcttgctaatatattgatgcattgcaggtatccgtgaattgcgggataggcattagtcccagaaagcaagctctcatttacaagcaatgtggctttgatggcctcagcgtctaattccaaaactgtaacataataatattattatatatatatttgtactgactactcccaactgcagaggagttgcaaaaaaagatccagccaaactggtaaagaaatgtaacaagatccatccttcccctgccttttttgggaaatttttgtttctactagcaacaatgtttgtttaccatagatactaatcagtagtttactcacgctgcaatcgcttggcctatctaaagtgcatacatttctgttaatcaattagagatatgcactcattttcccacatggacagttacgtcaacactcaagttgaaatgaactgctcctgaattgacatatggttttattactgattttcttgacgagagcaccggcagattcaaaagtagtctcagaatacttagtcttggttaatatgtaactgaaatgacccgagactattctttttggattacatatatgaagataagtgatcagttcctacatcgactatccttttttcaatcctcctatcagtttgtagctttctttttcctccagagcttccgtcagtttaccttgtattgcacactgggaaacctattcacaagtcacaaccaaccaacctctgcccatgaatcaagagaatattgtgtgtatgtatcatatacaatctaactcggcctctcctctcaactcaaatgttaccatctttcttctgacttttattttctacaccatgggcttgaggatgttggacattaacgggctacttaaaaatgttacttggtacaggcccatattgttcacaacggaaacggcaactagacgtagaagaagaggaagaagaagacgatgaaattggaggaaatcgaatcgaatcgaaacatttagggttcctccttccttgaggtaataatgtcaattctttctatgtatctactttggtacataaaacattgtcgctcacataaattttgatccgttgttctctcagagttcaggtcaagctttctttccaatttcgccatgtaagttccttcgtcttgtctagattctgcgttataccaccgttagggatttttctcaccaatgtcctttctttattcttttgctctcttcatttattagatctctagcaatttctctctaaattgagttatccccttaagctatcagatagtattggtattcccgtcttgacacatagtagtaagcacatcctctacagtttagtttgttgggtatttacttaatggcactctccgttttcttgctttacataaaaatcttgaagagctttgtgtgtaacatgggaagcttagcttcatcccttaaacagcctcctactttgacaacaaaaattgctatgtcatagttatgaacgttttattcgttccttagtttgcttatctaacctttgattttccatcctactcgatggttataattacaggccagaagaagatgttgttgatcagaaaagatactttgaggaatcttgcaaaccaaaatgtgtgaagccactacttgaatatcaggtgaatacgacttgagctgtcactggtcataaccttgttttgcattatacgagtcatttgacatagagagagagttgattgctttcggtgctgcttatctatctcacatcacatggcttcttagtgctgctcagttttaacatcttgttgttgtgggtggttcaggcgtgtgtcaagaggatccaagatgatgagtctggccacaaacattgcactgggcaatattttgattactggcattgtgttgacaaatgtgtaagtgtgtgagtgctgtttttctgtatacacctaaagtttcgcgaaactaaaatgacaaagacagctacttggagtctatttttctttccagggttatataaaatgatgtggatgcttaacattactactgcaaaccataactaacacgggctccgtccgtgtgggttttgtttctctggcaaactgcgattgctttgttttcgtactgagtttgtgatgcgtccattaatgtttaatgataagtggagtaataaaaaggaagaatccgattctatcttagcttaggtccattttattcaactgtttggtatgaaatcattgaattaattcaaagcacgttggtgttaaacgtctccagtttcaaagtgcaaacatattaacaaggcacgatgacaaaacggcacgctgtgctttggttttgtgcataaacggcacgctaaccaaatgtgtactgtatataaatacataaatactaataattacaagtcttcagaacagaaaggcaaatttctcaaaggaagcgaagccctagcgtcctctctctgtcttctcgtttctgcgccggtaagctctctctcagattttagatctcatcaagatctaacccttatatctctcacggatcatcatcgatctttcagatctgttttccaattttccctgctgatagcgtcttggtttctctaaatccgttgatttgttttcgtctctagttttttttttttttttttcgtttttacatgcctgagtctagcgtagactttctctgacttgaccctcttttgcagattcgtagtctgttgtgcgcttgcctctcctcttttggattagcatacctctcactcgcatcaggtaagaagtttggttcagatttagtgaatctcattgctttagtttcaaagcttattagctctctgtgtttttgcgttggttattacgttggaatacttaacccttatagcaactactggaattttgctgaaacatagttagtctctatgctttgtttggattgaattgattatgatggaatgcaacatagttatcgctgtgccttgtttggatggaatgttttaccctaatagcaacaactgtgatttagctgaaagtgttttttttattccttctgtattagcattgtgtagtgttctgtattaccatcatgtagatactctctgtgctttggctggactgattgatggaagagctaacattgttttttcttctcttttgtgagatgcacttttggttatcctcataccaaaatgcagattttcagttgctttttctatccaaatggactgcaagaagttcatccagatggtcgaggagaagaaacgaagagttcttgagaagcaagaagctcctttgaaatgggagcagaagctagaggcggctgcgaatgccaaagcagacacagaaactaaagtgaagagatcaaagggccctaagagaaaacaaagggctgcgtctgaatctagctcagaaagtgatagtagctctgaggtgagaagaaagtctagaagatctcacaataagcaccgaagacatgcacactctgattcagatgacagtgataggaggaaagagaagaaatccaggaggcagaaaagaaggtccttgagtccaagcgatgatagcactggtgattatgaaagtgggtcagaggatgagctgaggatgaagataaagcaccatcggaggcacaagtggcatagctcaagaaagacttgcgatgatgacagtaccgaagatgtgagaagaaaacatttaaagcatcacaggcgcagtgaggtggtcacttcaagtgatagtgaggaagagagtggaagaagaaggcgaggcaaatatcacaggcacaacagaggttcagcctcctcgagtggctcggaagaagatagtgggaaaagtatgaagagaaggcaacataaaaggcatcgtttggctgagtcttcaagtgaggaagatggggcaatgagaaggactaggcatcataaacatggcagagattcagcatctgagtctgatggaagaaggtaatcagatgagaaaagagagcactacttcgacaaatgaaaatggaaaatgtctttgtttaattcacatcataagaactgaatcttgtggtaaaccatcagcacatgattactacccagatgttgggacccaaatacgatgaatattgtgttgaattactatggtggcactctgttcttagattttcatttttacatttgtagcaagaatggtacacaaccaattgaactctgaaatgcatgtgcagatgatggtttttattttgattatacctcgtagttaagaggagtgtgttacaaaataagatcaaatcatcttggtttttatactctgaaatgtagtaaactatctttgattaacaccccttccctctgcagcgtcttaatcatatcttcagcttgtagttaccaggattgtggtctcttgctcttgatactctcagctatgcctatgtgttgcacgcgaagatgtatatatatgccaaccggctggtccaatttgaattttcttcattcttctgaatatggaatcacttgtatgtttcatgaaatgcagcccacaaagccatcgcagcatctaaagattagacattcatctcctaaatctgaattatcatgtatcatataatagaaaataaatgcccctccccttaaaccttgttgctgtttttggttgctaaatttgtacatatgaagaagatgaagattcagataaacactttgggtaccaaactgtggtggaaagtgtgatatactctacaagatacatgatttattttcgtctctgaacaaccaagtttctcaccgacctgtgagcttgaccatccatgcaccacccaagtagagccccagaagcggtgttgctaggagcatttgagtgacagggtctgtcgagggtgtgacaacagctgctgcaaccaccgcacctaccaccacatatctccaaattgatagcatttgatctcccgacacaacccctacttgtcccaggagtaactgaatgactggaacctgtaaaccaacaagaagcagccaaaattccaggtgaagatggctaaagcaacgtttaggaacatgtataatatcatattgccacatacctggaaagaaaggcctgtgctgaacataagcactagtacaaactcaaagtactggtcgatagaccacagagattctaccacaccttcagcgtaattcacaaagaaattcaaggctgcaggggttaaaacccagtaggagaaagcaagtccagcatagaagagcaatgaggagccaaatacaattggccccagaaaccttctctcagcccgtgtcagaccgggaaggacaaaagctataatctcatacaggatcactgggctccctagtagaagcccgcaataaccggagacctgcaccgcaacacaagaaaaagaaaatcatctatcttgaatatgatgctatctgtcgtcaatctgatcattacctttaaagttgtgaagaaaaattcgccaggagcaagctggagaaaccgtacaccctgagttttgacgggagcttcaagaaagacaataagatctttggagaaggcgaagcatcccaagattgcagctcctacagccaaaacagagacgaatattctctcccggagctcctcgagatggtcgaaaatagtcatttctttgtcatcagggagctcctctttacggggatacagaaactcatagaccgaacttgatctatcttcagatgaatctgccacagcagcagtgtgtaattcatcactaactaactaactaactatatcaacaacccggggagatgataataaaaatcaatcaagaaagtggagtttctcctaataataaatacctggtggtctgtcttctacagcagagccaacgccgggggtggtctctgttggtgaatcgtcgtcattgagagctgacaccggcccaaagcctttgctccggcgttgcgtgacggagtatcggagtccagcttccctccacgaattgcagaaagttacagcgtaaggacaacgctgctttgtaggcgaacccaagttgcgagtggtgaggcggaaatggtggataagagcagaactagtgcttgtgctgctcatctctcgaagaatcctctctcgtatcgtatgttgttgattttcaattgcaaagagagcttcagagaaggaacgattggttccggtcgagtttcgttgcccacatttgatattttccaaaacaacccaatccttttttttttctccgttaaaccttcttccatcacaaacttgctaacacaatgtaaacgacgtcgttattaggagaaagcaaaggagctttattgggccttttattgctttataaggcccattactacggcccatagagtaagtttatactagtagtgatgatgggtgttcacttcacagttcacacagagggctcgcttggcttgtcagttttcccgccagtccgatgggcaaagagactccggcggagaaatccctaaatctgattcgcgggagactctgtgatcctagttatgtcttcagacctctttccgcttcgtcagatagcaattacaggtctgattgcttcactcacttgtcgcttaatttctcgaaacgaatttgcttttaacctaatagtacaaacaaatttgtcaacacacagtaaattgaagttcattgtatcaacctctatcacggagggatgcaacaactcgatgttgcttctcggccctcgcggctctggcaaagctgctgtatgtcgaaccctgcttccttctactctctatctccgtcattggcgtytgatttcttcttttatttcaaaaaatgggttgatttcaggtcttggatctcgktstaggtgakttattggagcagtttcctgattcagtatcagtagtatgtctgatttcttatacatttggaactatctcctatatctaatctcatcgttatgatcttactaccatctcaatgtgattgcagatcagattgaatggactcttgcatagtgatgataattgtgcctttaaggtctaagagagggagagagcccaccattctcatttcctacacctaatctattcattcactcaccgtcttacattgatttttcaggaaattgccaaacagttgtgcatggaacaccacctactattctccaaaatggtatgacattgttctctccgaatgttctttctctttgctgtgtagccaatgtctcagttgacttgctttctctcttgcacttccaggcatcattcgatgacaattcacaattcattatagccatgttgcggtcagtatttttacctttacataaatgagcctttttgatattcaacgcagacaaactgatagagatatttcagggcatgtggactagcacataagactatcatctttgtgcttgatgaatttgacatgtttgcacaggcaagaattctggtttcttttaacctttgatgaacaaaggaattggacattggtgttttctatccactcaccctattatctgcttatatatatatagggaaagcagcggtgctatacagtktgctggacgatgctatgcaatctgtaacctcacaagctgttgtcgtcggtattagttctcgactggtatgagcatcgctatacagatatatgtgctttgggctttacaaactgtttcttgtatgtatttttatgtttgatgacagctgactttggttcttgttaatactactctggttcaaaatcttataatatgcaatctgtcaccacaggacgccgaccaacttctggagaaaagagtgagatctcgcttttcacacagaaaatttttgtttcttcctccttccagggaagaacttgacgggtaatgagcagcttcttttctgtaatagccagtcaactatttttccaatcaacttatttaactaataggaactatgtttctagtttgtttgtacacctgctgtctctaccagcagactcaggcttccccagtggatatgtttctcggttcaatgataagattaaggttctaatatccaatcccaattactactatgacatgcttagcttttagatgatgttgattcttgttctgaacaactgatactaaccaatttcaaaaaaaaaaaacctattgtgcagaatttaacatcagacacgagatttaaagacatacttaagacattgtttaatgctaattctactgtgaacagtttcctgaagtttatgtaagttcttcgattacaatcatgagatgtttccttaagatatcattttctctgtgttgagtctatctcttgatgttagattctgcgctgtttctttaatgaatttggaatctggcctcctctctcttgagaacttcaaagcagcactttcaagtatgcaaaggcaaccaaagttggaagccgttagaggtataataagctgcggtgttgcatatacattttccttgggaatatctattgacactatctttgttgagcagattgttccgtactggagctttatcttctggtctgtatgaggaggttagaagtgaaggagcaaagctcatacaacttcatcagtgtgatgaaaggtaatctgtaaatttggtttaaaccatggcaccactatgaaaatgacttgagattccatgtgtattccagagtataaggcgatacacgattcttttcatacctcagactactacgcacaaaatgtctgcctaagggtatgtttatagctctcatgagatgccatggtttaaaggtggtggtctaaatggttgacatgacaggcatttgagcacctgagagagcgacaagttatatgctatgcagagaatagaggacagtctcagacaggagagtaccgtttgcagaagcttttgatatcagcctctgagcttcatcagggaatgagatctcatgcttgttgccccgtaagtctctttttcatccataccctcctattcttccccttatttttgtaaacagatttcaactttgtgacatttttccctccgatggaacaggccatccttctcaagttattggaccattgatctctgtgtttttgtcccttgggaataagacaagtctctcaaggccctgtgatatgtatgtttatttcatggtaaaagctacttggtttacaaactgtatctttagtttttgctttgtgtttacgctatatatatataaagggagagtgcatgtcaacacatacccgtgattacacaaacaactttctctactacacacaaacccatttgagtctcaacatcaaacccttcaactcatataattacacatcatgctaacagttaagacccgcacaaattggagatcttaattcaccatatccagatcgactctatctctctcagactctcacttttgtgcttgcaccaacgaagtgtgctccccatctccaccctttctgtgtcatattatgagcatttatctcccttcagctccgtttgatcacaaagagatgcttggagtctatcctttgtcttcccagttttgctctgtctcgcccagaaaaattatggactccataaaaatgccttctttctgataagatttgcttatagaaaatggtttttcatagataataa

SEQ ID NO: 42 - DNA, 94503 bp, Arabidopsis thaliana
aagcttacctagaactctgaagaaggctgaaaacaactcaatactaaagaaccaacaatagaagccataaccaacctaaacaaccacaaaatccgataacaaaatatcaacaaatattcaaatccgcattgaggcaaaatgggtctaagaaactcaccaaaagtctcaaattgataatggattcggcttttaatttcggtggagctttaaaacgcttatatatacgatatattagggttaaggaacaaggattcgacttgccaaaaacttcccttcagtttcgggaaagataaactggaattctcttctcttccacgtttttgcactttagtcctcaaatttttctctatttacagattccgcctaaatttttgaattgctcagaaatccttgtgaaatcagacagtttcaatacgttcaatttaatccaaaatctgatcctatattttcttttaattttgggtgttataatctacgtggaagaaattgtgagattgcatggtgtcgtgagtaccattgtctcacatcatgatccaaactttacttcacatttttggagtagcttacaccacgtattggatacgaaactacattttagtattgtttatcatccttagacagatggacagtctgaaacgactatacaaacactagaggatatcttgagattatgtgttttggatagtcatcagtcataggagaggtcattgtcattgattgagtttgcttataataatagcttccatgcgagtatcggtaagcaccatacgaggcttgatacggtaggccatgtcgtacacctttatgttgggcagaagctggagaaactactggtattggtcctgagttaatcttaggaaccactgaaaaattgaggctgatcagagataggatgaaaccgtcgaaggcgtgatttagaatttcaggtagacgatcaagtatctattaaagttcaacctatgaaaggcaaagttcgatttggacagtcaggaaagttaaaaccgcgttttataggtccttttatgattcacaagcgtgttggaagtgtagcttaccgcttagatttcctgttccaggaactcctgctgctcctggtggtcgagatgtccttgttccaagaactcctccttatgttcataatggttctcaatttccaccacctcctccaccaaatgctgctccaatggaggatatgtgacaaaggttccaatctttgaatcaaatgtttgctcaaaatgctaccatccagcagactttgttgtagcaactacctcaggcagctgttccacagccggctcagcatgcaaactctcagcctgactattgggtgttgcaagataggttcaaaaaggaagtcagcttgcaaaaatttaaaggttcttttgaccctatggaagctgagaaatgacttgatcttgttaaagaggctgtggggtatttgggagttcctaaggcttttaagttacgaatgattactcgccaacttgctagagatactcaacattggtggagaagcattgttacctcccgtcttggtgtggagttgacttgggaagattttcagggagcgtttatggatctgtacatcctagagtctgtcagatcaaatttgaggatgagatttgaggagctcaagtagaaagataaggcactaagagagtactaagttgagtttgatcatttagcaggctattagcgaaagttcatcgagaatttttctcgaattgcaaaacccctcacacaactactttgcaaaggagctaagtttgtttgtagtgagtcttgtgagcagaggtttagagcattaaagaagaggttaacttctgctctagttttaactattccgagacctggtgtagggtatgtgatgtacaatgatgcttctttatcaaggctgggctgtgtattgatgcaagaaaataaggtgatcgcttatgcatctagacaactacataagcatgaggttaactatcctacacatgaccttgagttggatgtagtagtttttgctcttaagttgtggcgtcagtatctttatggtgaaaatatgcaaatattcacagatcacaagagcctaaagtatttattctcgcagatggagttgaatcttagacaaagaagatggattacattgctaagtgactatgactgtgaaattcttatcatccacgaatggctaatgtggttgttgatgctttgagtagaaagcaagttacagtgacatctcttagatcgcaatggaatttagtagagcagatgagccagtttcacatttctattcgagaggaaaaattagggtttttggccacattgggtattcagtcaaatttactagcacatattcgtgattcttagtggcaagatggtaaattgggtactatttgtgaaaaaactgaggattttcgtcagctagggtataagcttagagatgacacagtgttatcttttaaaggtagagtgtgtgtgcctaacatacctatgttcttggaggagattttgccagaaggacatcaatctgggtatacggtccacctaggcagcactaagatgtatcaaacacttaaactttttttatcattggaatgatatgaagggtgatattgtagagtttgtatctaagtgtttggtatgctagcaggtaaaaattgagcatcagaagcgtagtggtaaactgcaaccatcacctatcccaaattggaaatgggagaaagtttctatggattttgtcacaggactagcagagatctatgtaacactccagtttcaggaatatagtgatgcatgcggagaggtttaaaagaattgatttggccacctatgtcaccaaagtgcacttatcttttcggtcaaacgtctttagagaactccacagttaagcgtgtttgcgctggattagtttcaggatggttgaccttctaggaagtgattgtcggaaccatgcaggtgaggacaaagcatggaaaaaaatcatgtggtgatttgtggggtcgttaacaagcctttaaagcctcctagacacggcgcaccgaccgtctgacaggggtgggcccatgggcctgagagagaacgtgaggcccactgttaagggcggtcgaggcgttacaaaatcagaacgaaaatcccaacaattgtaattaatattgacataatagaaggaagtgaatcgataaagtaaccgaactcaaaaaaaaattattatctatggtcccaaaccatacattttgatgaatgtaacttagaaaaatttgttaaatagatagatagattgaaagatcataactatagattgaaatgattaaaaaatattactaagttactgtcaaaaaaatttatttgtcttttcctttactactaaataaatttttattgtgattttatgcaaatataggaaaagtgaattataattccatactctcagtatagattatttaaatgatatatgctaattattattaaatgtattataaaataactaaatattatatcaatatatatatatatatatatattagttatagaatattgtatatttcactacattcattttacccaagaatcattgttgcagtgtgttactcgacctgttactcgaccacacccattgattggcatcaagctgtgttcgtcgaatatatttactgtttctgttagaatttatgttttctccctgttcacttaggactgttagaaacttcaaaacctgttcttgctttgtttgactctgtgaaatgtgattgcatcttgattgctagcatcacatttacaccaatttagattgacaccttaaatactgcaatgacataatagtaatagtaatgtgatcagaagttatatactcaagttatagatacttgattaccgtaatagttatatacgcatttgtttggtaaacgataactatttacacttgtttgcatatcacgttagtgtactaactatttatacatccaaaatactgtagaaattatgtttaaaggaacatcaaagattttgttttttggtctgccaaatatttcattaaaaacaaaagtttttagaaatttaatccaacccaattttcaaatatacttctcttttaatagtatagggatttattatacctttttggttgcattttagaagttttttaaagatatttttgtgccagtttctatataaaatttatatttaaaaacattgattgatttttttaattcaaatattaaatgatattttggtataagaaaaaggttttcatatgcctactttaagccaaaaatcttgtaaaatgggacataggaaataaatatgttatcttatggttaactttcaaactactcttggtaactgagtaccaaatagttttaaagtacaattttattaaaacactctcggtaagtagggcatgattggttgggctgtaagaaatttttgtagaaataacagattgccatcatcctctcatcgtactgcagaatctggttaatttgtgaaaattgacagattaactttgagattagttagtaacccaaggcttgatgaaactagtactgttttaagcattgcctacctcattttgctcatgtggttccattgcttcttaccggtttggattgctgttgataggactactactactcgcttatcgaaaagtttattactagctcgcactctcattcactcttgtttctttcttggttacactttagagatttattaataaatcttgttttaattcatccttctttgataatcatctttgctttgagattgaattgatgacttgactcaagaatatgttatgcttccctgctttaatactttttttggcatggaaccatgtaataggttatgtttcatgtaaccttaactttcatttgagaaatgaatatttacatttttacccaaaaaagatattttttgaatgttttaaataaaacaatatatatcttatatgtatatttaaaacaaggagtagaagttaaacattatgattattcaataatttaactaattaatactcgtgaacttgtttatttatatttttaaaaattagctgttactaaccaatcacaaagttaatatgtcaattttcacaatttaacaagattcagccatataagttttaatatcaacaactaaataacatgagttttgtttctatgataattaatttggtttttttttttgatgaactaaaaggaattttggattaaatcttgatcgcaatttgccaatcatcataattcttcccatcaaatatttcagaagcaatggaaactccgggattatcactgtttgtaaggtagtaaggtgaatatatgtataatactgtcatgagattcgattactggatttcgagtacgagctcgaggttcacgtgaaccttcaggagaagaatcatcgcgaattgccaatttacgagctgaaacaggaacgcggatcgtgcgatgattagaaattttacgtccatgcgccattaaaaaagctcttattttacggcgggggataaaatttgttcaactttttggtcgatgcaacaaatttctcggtgacgaaaccgaagaaactgttcgaagagaagaagaagcaaagaaaaaaagaagtcaagaatcgtatgaatgattcaccatgttacaagaaaatttgttacgaagaagaagataagaatcttatatattaaagcagatgtcgaaaggcttcacgttcgctctcagaaaatgaactgacggatttggccctcccctccacttaaggtttttaaggataaattagtctttttactaattaatgagataacatattattttaatatgtagaaaataaaaaaaagcgtttaattccctatcaaccctaaatttcctattctccagtgcccctaatcaaacctaaatattaaccctaatcaaacctactcaatcctaagtcgcccaacaaccctaacggacttatattatgcccgtataatttacgccgtcatatgtaaaaccctaaaatcttatgctcaaaattcctataaatataggatctctcctctcaaacacaaacatcgtagcttgattttagtgcatagcaatagcaatatggtttatagttcttttttgtatttcaatcaaggtcttttctatgatgctcttcatagcaatagattttttcgagtcctttttatgttatggtcaattggaaagtaagatctcatagtctttgccaattggtgatgagttgtttacccaaagtttatagtttgttcgattacatgttttggatctatcgtcgctactatatgatataattattttggaatttctttcttttaatgttagtggatcgatcccgtctttaaagtgatggtgtttgtgtatgattttgcaagttggtgtttatgcaacgtcgtaaattggtgcaactaacaaaatctccaaaaaatctgagggtttgtttaatcctgcaaaaaggtagtctcttatctaactaaattttctattttatcatggatttagtttttgctttttttttttctggctgctataaaccctagcgttcgaattgattcacacagatcatataaacacatcatataaacacaaacattgtatgtaagttattgattttgtttatagtttgttcgaattttttgtttatcattggttttgagaagaaatatgcatgaaagtttgtcaatttagctgaaggaacgttattttgttgttgtgcagtcttagacattgaggcggtaggaacattcaacatgtgtcacgcagctctcaagtatcttaagaaagtagcgcctggaagagactcatcaagcggtggcggttcgattattaacataagcgctactttgcactacacagcttctaggtatcaaatacatgtatctgcagccaaggtaatttgattagtctgataaagtcattcagtgtctcgagttttggttcggaaatcaagaactaacttaaaggaacaatagaatgtagcaaaatgtgatcttaggagtttgaaacttgaaacaggttgcagttgatgctaccacaagaaacttggcattggagtggggaactgactatgatattagagtgaacggaattgctacaggtcctattggaggtacaccgggaatgagtaaacttgtacctgaggagattgaaaacaaaaccagagagtacatgcctctttataaacttggagagaagtgggatatcgcaatggctgcactctacttgagctgtgattctggtatgctgagttaaataaagcacactctttagtataaaacatatatagatggttagatgacgtaactcatttcttgatttgtttaacagggaaatatatgagtggactaacaatggtggtagatggaggactgtgtcttagcaaacctcgccatttggccaaagagtggagaagaggtctagggccaggcgaatgattattactatgttttggtgcatattgtacaaagaatgtagtattaaaaccaaaaaagtctttggtgctttggtgcatattaattatacaagaaaattctcacaacgtctacgaggaagcaaaaacgtctaagcctaaccaagatgaagtttcagaccagtctctagctctgaatacgtaattatggtcaaaactcaaacgtatggccgagctagaagaaaagtacaagtcccttgactcaaaatcagcagaagatgttgggaatgtcctgaaatcagttgtactttactctagttaaagttgtaatgtcgaggtttgacatttgtataatattaggtggttataatgtgttgctagagaccgcttataatctatgagtcagaactcattgctaatattatacaaatctacagggtcacacacctaagcaaattggatcaataaaaagatttattgcgctttggcccattattaaccctaattgattagggttaaacgtttggctatatatatgatatattaacaatttttgtgagatacacttttgatcacaagaaccataaaataaagagacaaagagttgtctaaagttttgagattaaatcttaaaggaactagcatttcagatctgatccagtttgtgtgcgtgtggatactagtagaggcacaacacttggggtgctaaaataatctcgagataatatggttcacctttgcgctgcagaatatccaggtatattcaaacccaaagatctaaatttaattctttatttacacagttcctggcaattgaatttgtttttagtatttattaattgttataaaccggtacgtaattccttcagtggtatcagagcctatgtgtttaatattgaatttgaatctagtttaatctatattataatatagataaataattgttatttgtttattatgatgaaatttgtgaaatttaatttgttaaacatggtagaaacgaattcgcctaatagaacatgaccgttgtatttttatgggcagcaaacgaaaccaacttcttccttgtagactatagatttttgtttgaaacccctatatttagaaaattttgttgcctgagaataattatttatgtatttgtaggaggtaatttgacatatcagaccactgtaagaagagagctaacggacctaaatgtcccgaaacggcaagcgtattcagggtgtaagtagtctctgattcatatctctctgatttgatttggtacagtataaaattgtctacttttttttatttttgattgactcgtattgattgtgtggaggttattgtattgattgatgcgaatgtagtagttttttttttttttttttggtcggaaaacgggagaagtctcccgctttattattcataacaaaagaaaaaagaactacaaccgaacaaaacgtaaccttgagaccccattggcatcttccaacaaaatcggattaacaatatccggtggaagattaaaagaatggaaacctaaaggtctttaaaaaacatagttcgctaacccatccgctagacggttagcctccctatacacatgtgacacacggactaaccagtcccttgataaaaagccatagcacaagcgtactaggaacgacagggggtgagagtcactgatccctgaagttaaaaaccccaccacaatctccgagtctacctctagctccaacctcgcgacccgcctctcccaagctatgtaaagtccatagtagaccccccacagttctgccaaaggagctgtacaaatcccaatattaagcacaaagcctccaatccaattaccttcctcatcccgcaacgcaccacctgcagtcgcctctccagggttcccatgcgacgccccatccgtattcagcttgacccagccctcatttggtttcctccatgagacttgtcgctctacctgcacaatctccttcgtattcccggagagctttaagtgagcagctgaaacctcatttgccaaatccttaatgaaccgtaatctatcccgacagcggccaacctctcacaaaacatttccacaacgccacttccaaccccaccaagttgccaatgcaaaaactgtggaccaaacactgcctcccatctcaccgtgttctcccagatttacatacagccactcaagaatagacttctcaaagaaaaggcgttgtttgctcaccgagataagccgtagccatattccttccattgcagggcaatctctgagaacatggataatagactctttcgctcccttacaaacttgacagatggtcgtggtactcaaatgtcgacgatgcctttcttgattcgtcataatggcttgttgtgctactaaccagaggaagagtctcactctctcaggcgcagtcacgctccatactcggtcaaagaatctcttcatatcttgtctcggcgcctcatctctagtaagaaaagaataggtggtgctcactttgaatctcccatcttgactctccccccacgatattctgtctctagctcccgttatatcatctaaaacaaacgattgtaattgtaatctgttataagaagatatatatggagctatcgtcgccatatcccaaccgatcccatttctcctaagatccctagctcgcattcctttccaacccgccggaggctcctgaaccaacaactcagctagaggaatatttgttagccacttatccatccaaaacagaatctcccgaccatctccaatcacccaacttaagcccgggattaccacctctctcatacccaacgctacacttctccaagtcgatgagcagacacttctaactttagtccaagcaccatcccgaacatcttgtactctgtagttacatctcatgattctcgcccataagctatgataatcctgaattagacgccatcctaccttagagagaagagctttattcatatcctgagctttcctaattcctagcccaccttcactcctaggcttacaaactcttttccaggaaataagatgctgcttcctttgagttacagagctgccccataagaaagatctagacactttgtctaacccatccaacgttgatttcggcaaagcaatggtgctcatggtgtgaaccggaatcgacgaaagcactgccttggtgagtgtaactctccccgcaagactaaggaatctgcccttccaaccagccagccttgttgtcaatttttccaagatatcaccgaaagtgtccttattaattctcctctgaaggaccggcattccaaggtattttccaagctctctagttgagctaatcccactttcatcgcttatcaacttccccaagtcccgagacacattttcagagaagaagatcttcgatttctctaggctaactttttgaccagaagcaacacagaaacgttccagaactcgtcttatcacccgaatctgagccacagatgcttccgcaaaaaggattagatcatccgcgaaacagatatgtgaaagctttggtccaccctgagagagactaatgggtttccaatctttccgagcaatagaatgctctataagatggcatagtcactccatgcaaagcacaaaaagatacggtgacagtggatcaccctgacgcaacccccgttttggtctaaacgcttctgttcgctcaccattccacaataaactcattgatggctcagtaacacactgcatgatccatacaatccacttctctggaagcctaactgcccgtagagtatcctccaaaaattcccagcgaatccgatcatatgccttttctaaatccaatttcaagagcatccaacccttacgcccttttttcctcctcatcgaatgaacagcttcttgcataatcactatattatcagctgccaatctacccgaaataaaactagcctgagccggcctgataagcttcgatataacccgcttcaaccgcatcaccaaagttttagtaattgttttgaataaaacattacataaactaatggggcgaaactgtgttatcctttccggtttcagaactttagctatcaacaccacgattgcatcattcgtaccttctggaagtttcccggaagcgaagaagtccaacacaaaccgactaacagaatcacctactatatcccaacaatcctgataaaaaacaggttgaaagccgtcaggccctggagccttatacttccccatgcttcgaattgatgtctcaacctccaagggattaaacggcttgctcaaattagacatgaaaggccccgatccggactgcctaaagtccggacgagttctctcgacccaagccactaagtgactcggccctacccgtttatgaggttctttcctagtctaatccgtttcatatgattccgtgattcaatatatgagacgaatagagtaaacaaacaatcggatactttattgattaagcaaaggattcgatacaacctatgagtttgcatataagctattacaagtcatataatcgatccctagactatccgaactatcaccacccatcatcccggccttgagtctctcgcgcctaagccaagtccttcccacgatcaccattcgttcctgaaagtcatagagccataagtaatctcatttacttaatcatatgcaagtccatgcaatgctctatatgccatacactactcggatccgtggagagaatttagagaggggaagatcgcgcatcagtccggccgattctcggcaggtcagttaagacctgccggtcctccgccgagccgcgtccccacctcagccgatccctacccggaccgagtcttgtgtaggatgcacatgacccggatactacccagccctctagtcgatcctttcaaggatccgactactaactcacatcctagaacccttagactcaaagtctaggatcccttaccttccttctcgaggttaggtcgatccgaccctccttctttattgccggccacagcccggctaccgaatcctaagactatttattctcccaagagggagagagttttaatggtgagtttcttgtgttttgggtgtgttgtggtgagtggaatggtcctgggcgcccttccttatatagggggcgaatgaatgcttcccgaatcaacacatccgttccttgcacctttccgaagagttgcacctttccgaagagttgcgcccttccgaagagttgcacctttccgaagagttgtatctcttcgcccataaccgcccagctagtccgtcacttgtccagctacctcgagctcaaccgtcactcgtccagctacctcgagctcaaccgtcactcgtccagctgcccgagctggactgtcactcgacctgagtaaccgtcactccttccagctgagcttgagctttgggcgaactgacccagctgatttctttacgatcttagcttagcctgcatgatttcccctttgtccgagcttatggccagctccttctcacttgtccgagactccacctatttctctcagaccaagtcctagccaacgatcctattgaggatcgcgggcgttacaagtctccccccttgaattggattcgtcctcgaatccgcatcaagttgatctttacccatcttcttgaaccactccggaaaattggccttcatcttattctcggtttcccaagtgtattcttcacggcctccacaattctacaagacttttaacaaatcccttgattttccccgagtccctttcgacattcggtccatgatccgtaccggccatgcttccaccgtcatgttctcctttaacccgggaggtatatcttccacgctttcttcttgatcacttaaatacttccgtaattgtgacacatggaagacgttgtgaaacacatttagttttggaggaaggtcaagtttgtatgccaccgcccctactcgttcgatcaccttgtacgggccaacataccttgggcttaactttttccttgaggtgaatcgccctgcccctttgtaggtcatcgcctttaagtacaccaaatctcctacttggaattccaattcctttcgacgtttgttggcgtagcttttctgtcgatcttgggcttcctttaacttgatttttaagaacttcattctctccgtggtttcatccacgatcgtaggtccaaacaaccgacgttcgcccacgggcgtccaacacaacggtgttctacaagctcggccatacaacgcctcatagggagacataccaatactagcttgaaaactattattgtatgcaaactctattaaccttagatatttctcccagtttcctccccaatccaagacgcatgctctcaacatgtcctcaagggtttgaatcgttcgttcggactgtccgtccgtctgtgggtggtaggcagtacttaggttcactcgagttcctaaggccttttggaaagcattccaaaactttgacgtgaaccttgtgtctcggtctgacactatactaaccggaatcccatgtaaccgcatgatctcgtctatatacttctcggcaatgatttctgctccatccttatccgagatcgccatgaagtgcgcagacttagtcaatcggtctaccacaacccataccgcattgtgtttggatttgatccccgttggcagtcgagtgacgaagtccatcgttatgtggtcccacttccattccgatataggtaggttttgtaacaacccacttggtacttgatgctccgccttgaccagttgacaagtcgggcacttggccacccatctggccacgtctttcctcattcctacccaatggtagtaccttttaaggtcgcggtacatcttgttcgacccaggatggattgagaacttcgattgatgcgcctctcttaggatctcctcctttaatgccctatcgttcggcacacatactcgaccgttcaccacgattgtaccattgttcgaggtttggtactcggtcttgttgtttagtgtccatccttttatctcttcgtcccgttcctgagccagccggatcctactaagcaagtcggcctgatcagtggctcccaaccctaagggttcaacttctttagacaaggcattcacatgcaatgtccccatcatgttaaccaagtccacttggctccgttccgcctcaacttcctagcgcctcctactcagggcgtcggcgacttggttggccttgcccggatggtacgctatatccaagtcgtaatccgccacaagttccatccaccttcttagccttagattcaactccggctgggtgaatatgtactttaggcttttgtggtcagtatagatttaaactttagcaccatacaagtatgatcgccaaatcttcaaggcaaatactaccgcggccatttccaaatcatgcgtagggtaattcttctcatgtttccgcaattgccttgatgcgtatgcgataacactccccttttgcatcagtacgcatcctagtcccactatggatgcgtccgtataaaccgtatagggctcaccttcctccggtaagaccaataccggtgcattaatcaacatggcctttaactccaggaagcttttctcgcactcatccgaccagttgaatgcggtgtcttttccggtcagtcgagtcaagggttgggccatgctcgcaaaactcattacgaaccttcggtaataccccgctagtccgagaaaactcctaatctcggtggcattccttggtcgtggccactcctttatcgaccgtattttctccggatcaaccgatactccttggtccgagataacatgaccaagaaaaccaacgctcctttgccaaaatgagaatttacttaacttcgcaaatagctcatgttcccttagccgttccagcaccgcccttagatgttcttggtgagcttcccaagatttcgagtgaacaaggatatcgtcaatgaagatgataacaaactcgtctaagaaatcccggaataccccattcatcattttcatgaaggctgctggtgcattggtcaatccgaatggcatgaccacaaactcaaagtggccataccttgtccggaaagccgttttcctcacgtccgttggctctatgggaatttggtgatatcctgaggccaaatcgatttttgaaaaccactgtgcacctccaagttgatccatcaactcatctatccggggtaaaggatatttgtttttcaccgtaactttattcaatccccgatagtcgatgcatagcctaaagctaccatctttctttttcacaaacagaaccggcgcaccccatggtgagctactcggcctgatgaatcctttagccaacaactcctccaattgtttctttagctccgccatttccgccggtgccatccggtacggagctttagatatgggggttgtcccgggctcgagttctatcgtgaacgggtctgaccggtccggtggtacaccactaacggccgcaaacacgtccgagaactcgttgacgatcagaatgtctttcaactccgcactcgcccccacttccttggttgtgatcgtggctaaatatgcctcacaacctttcccgagcatcctttcagcctggattgccgagattaccaagcttcccgaggttgttcttattccttggaattttaacataccctcgtccctctcgaattgtatccgttctcgatgacaatctatgtgacccttgtacttccccaaccagtccatccctaagataacatcatgtttctttagtgggacaatgattaggtccgcgggcatattgacaccgttcactacaaccgagatgccccgaacaagtctggtcggatacattgcctgtcctccggccgctcgtaccattccataatcggtgtttggttctttcctgaacccacctgtttcaaccaattctagactaacaaaacaatgtgtagccccagaatcaaatagagtgtgcgttactacgtcacctactctcaaggtccctacacattcccttagaatgctgagtacctcccctttcccatatgcatgatgcaatgcaaatgcagttattgaaataatgaatagggagttgtgagaacgtaccagtgatcgccctgaagtttccggcatcgttagcttccttcgacaactcataaactcgcggtgccacggcttgccgctttgggggaggcggcagtccatttcccccgcgattgtccctttgtccggcctgcttctccgcagtcaacttagggcactctcgctttagatgtccagtctttccgcaatagaaacaagtccttgtctcttcaccgagaaccttggactgtcctggttccattcttgggcaactttggatcgcatggtccttgcttccacaccggccacatgcacctatggcctttcagcaagttccgctgtggctcttaccacaggtcacgcattccccggtcttagcatcggacttggtgttatccaccttgtcaaatttccttttcttatccgcgggtttggtgggtttgttggtaacctctcaacaacctcatcgacatcctccatagaataaagacgtgagtagtaatcgacagccatcttctcaagttcctgctgttgtgaaacccaactcccatcatccgctttgagcatttcaattctgtttctccgcctcctaacaacagtcatagtatggaaatactttgtgtttcggtctcccaactctacccacttctctcgggatttctgaaaccatagtacttcctcctgctcaaggaccacatcaaattccttaatcaactcctcctccttacttaagagattatcagtttggttaatttccaaaagctcttgaaccaccttaatttcattcatcaaactctccttccttctattcacgtctccaaagacttcacggttccacttttttaatttactctttagagctgccaatgctacaggcgtctctccttccgtattccaagaagcctgaagcaaatccttaaaaccactatgggtaagccaagccgcttcaaaccggaagggtctcctcagcggattactccgcacctctggttccagctgaatataaataggagcgtgatctgaagcgaagaacgggaggtgagtaactgaagcttcctgccactttaaacgtgtttgaggacggcatagcaccctatccaaacgctttgcgacaaaagtactttctacacgacctcgcttccatgtgaatttgttccctttgaatcccatatctatgagagagagctcatttatccattccccgaaagctagtgaatccggcgagagtcctccattccccccgttctttcgtcgagtctgataattgtgttaaaatcacctcctacaatgatcggctcatccacactctgcactatccggctcaacagactccatagtccacttcttctactaaccgaaggagccgcataaaccgccagcagatggatagccgctaacccattccccactttcgcgtgtatgaattgttccgctgactccacaattgaaacatctcccacctctgatttccacaagagccaaatacctccactctgccctcgcgcatctactctgaaagaattttcaaaacccaaattttgataaattctgaccgctttctcaccacccgcatgtgtctcaaacaaagccagaacatctattcgatgtttcttcagcatataccgaattgaacgacggaagttgggtttgttgaccccccggcaattccactttaagcaatccataagatatctgtaaatcaagggcaaacgaatcaccggggcgacctgttatacaagggcagagcttcccgcttcaggcgacaagcttccattcacacctatccctccctccactcgagtcccggctgaaatcaggctcgtcgtatccatttcattctcccggaccgataacagagcactctctgtgattttctccatctcagtcctggtcacaaaaattcctcctcgtctccccatggtacctttctctactcgaagccttttccctgtctcagaccgcactacctcacctttcgttgggccaaagacaagccctttagtgggcctattcgtgttctgcttggccttttgacgattctggtcattgggcttaaagaatccggcccgtctatccttcagcccacctttcagcccaattttccttatctcaagtcctccaccatcgattccctctcgaatcccttccttatcttgactaatactcttcccttgaataaacttacgcagagtattaacattttccttattctgaactcccgacaaatccgcctcacttccctccactggacttgattcgatatccaagttaccaaaactattcgataccagaatattccccgaattttttccttgagtgatttcccgaagattgcgccctacaacgcccgtagggccctctatcccattgaccaccgggacctgcggcggtgccgccttcttcctcgaccttctcaccaccgtaaaaccatcattctccggaactgctccactaaccaccaccggagcactctgagaagcggcattaacttctttctctgcaatagtctgtgggcaggtatggatcaagtgaccatacatgccacatcttgaacaaatattagccaaaccttcatacgagacaaaatatctctcaccattgagtaacaaagttcccttcaacggctttgccaaatctacttcaatacacattctagcaaagcgggctcgctctacatgcagcgttgtcatgtccactttcaccggctttcccaaagacccagctatacccataagaatggacgtgtgatacagagacaacgggatattcatcagacggacccaaattggtgttgttgtgatctcatcgcgtaaagggtcaaattctggagaccaggcttgcacgagaagataactgccaaacgctctccaaggaccacctgtgagtgccgacagatactcatcctctctttcaaatctgatcataaaaaactgacaaggcaggtccacgacgaacatagctccttgtggcttccacatctccctcaacctcctgttcaaattagcaatggagatattccgtcctaaaactttcaccaccatgcactgcttccacatactattcatcacatccaacacttccctaccaatcgttataaccgattcaccatctgctccattcgggaactctacacgcatcctcgaagaaacaaactcatcatccatcaaactctctgggcaaagcctccctcctgcattcgtacccatcactctcgccgcccaagatccccttccatccggcggatctcatggaggccgtacaccctctccgatctctgtcatagtagcatcgtgatcacccgtaaccctagccgtcatcgttacccaactcttctgttcaactatctgaatgtagtagtttagcatgatttgtttgtgctggttagataaattcaacataagatgaattaaattactttgttttccgtcaattgataaactaattcagtgatatttattgataaactaatgatttcttcggtttggtgatacaacattactatttatgatttttgtttatctaatgttataaagaaagccccagcccaaaaaaaacgtatcgtcccatttataaaaaaaaaatcaactggtgggagctaacgctcgcgtcttcttcctcttgacgtgattggaattcgtactcgcaggactattaaaaaatgaaatcccgcataaagataactacttttcactatctgtagatatgtgttttttttgcaatctttattctagcaatatatgagaaacaaagttaatgtttattgttttcattatttgagataatatggaaaaaaaaaatgaaaagaactgaatatcaattgtaaacattttattaattcgctgataaactgattccagtagctccctcaattccaatatgccctgtgttgtgaatagcttgaatctgttcacaaatgttaaaaaaatagattatctatattattaacatatcacgattataagaattttttgactgtgtttaccttgtagaaatgtctcttgcaatgcttagtcttacagattctgaaacacttctttgaacaccacgttcattgtttccttctgtgggttcccttctttgtccacaatgaggattttcaatcctttctttgaagtgacccttgagatagcaacgtagagttgtccatgcgaaaaacatggcctgggaagatagatgccaacgttctttaaagactgtccctggcttttattaatggtcattgcaaacgcaactgttattggaagttgtcttcgacgcattttaaaagggagtttactgtccgagagagatatcaatatcctgggaaggaggactttatgtccaactctatcacctgtaatgatgacagcctcaataattttatcacacatttgtgttatttgcaacctcgtgccattcattaagcctccttttggatctaggtttcttagcaacatcacaggacaaccgactttcaaccttataccatgatttggtaaaccagatacctttagactgttcaagaattctgatgttaacactggattattggtacctccaatgtcagaaggatctacagaatcagaacttaggtataattgttcctcacctacacataatatgacaataaaattaaccgcttatctagtacgaaagccttaaaaacatttaaccatgtttgaatactaaccttcgagttgatcaagcatataattgttgatcatacaaacgtcttcattggttggacataaaatcggtctctcttgaaagaaaaccggatcatttttttctttcaataacttaggatctccataaacttccctgcttattgcttcaattggattatcagcgtacttgattaaaaactcgtcgggtatgttaatcatcacttctccatcatttggtagtgctatcttaccatcaccaacaactaaaatccactctgaaaattcctttaaatccttcgcttcacttggactcaaatcatttgaaaacagccgcatatttttggtcagcttgagaactttgcaatgattccaaatataagaagcattaagagcagccatgcaaatctctgccctaccagcaccaggtataacaggtagtacctgcctgaaatcaccaccaaaaacaactacttttccaccaaaaggttttttcccaacacctcctataatatcagacaaactcctatccaaagattcaaaacaatgcctactcatcatgggagcttcatcccaaataatcaaagacgcttctttcaacaattcggcttgatttgagccacgctcaatattacatacagtgaaatcgtcaggattaattggaataccaaatcgagagtgcgctgtcctcccaccagctaacaatagagaagcaatcccacttgaagcaacgttaagcacaattgaacctctagatcttagtgaagctgaaagtgtcttatatataaaagtttttccagtcccaccaaaaccatagacaaagaatacacctccagtgtcattgtcaactgcctcaatgatctcagaatacacactcttttgctcatctgtcatcttctgcaacgattcttcaaatttatccctctgttcattccgattatagtttctttcgtcaagtatcaaaagattactatcatcatcatcttcttctggtaattgtggcattgtcttgaaagctgttagagatgttccattgcttcgtaagatactgttgatttcctttaaagcaaacatctgtttttgctcatcaaacaatattagttctgcagacgaatataacatgacatggcaacaatcaataatcaaaccaataaaatgtaaagatctatatagaacatatatctgtaaaatacaaaattatggtacctggtcagtcaaagtactctctcctttttctttctatatcttctgataggtgttcccaagttttttcccaaacaacttctggttgagaaaagcttgtagactggagcattacaacaaacaacaacgcaaatagtttccagttgcctagaaactggttcttattatgtcatcaatatactcctggtcatcatctagaaaacccaaagcaaaacatgtctgcttgaaggatttataaaccacaccattaactgtttttagatcatcaaaactctcaggtccagtttgtgtgttgagaaacactcttaaataataaccttcttcataaaaaggtggaacataatttatccttccaatcgtattccctggtcgctttctttgattgaaagtttttgctgtaccatcccaggtaaaatactctggaatctgagtatatgtgagatctttggctgtaggacaccgtttattcaattcaaaccaagccagaaacattgaattttgtagttctgaacgcttcaaaacgtgttgtacctcatcatcacctttaaaaaacagaagttgtttccctggtaggtgaaaggataacctctgaacggatgttgaccggtaatgtataggatttttcagaattctccaaccagcttcacatgctgatacatatctggttaaaaaaacacaaaacatgttagaaaaatatgtctaatctagatatagctactaagtaaaagatatgtttaatacctgcaatcaaagaaatcttgaatttcatcctgaattgtttttccactacttgagcttgtagacttctctttagaatttgtaatcttcgtaggctcatcatgaggctgaacaacaactgctacacgatccatccctttagtgatatacttgaataagtacttgatggatcctgtttagttacaccactcaacattaatatgagccctgtatcgaagcgacaactttttgttataaggaatgacatatccgttatcaaacttaaaaccacacttctccacaaagtgttttgtctttcgtcttctaaggcgatatcacctcattcgtgagattattggtagaggtgatgtgaagattagcagagtttcaacggatgcaaatgttgctggtcctattaccaaacctcttccgcagccgaagcatgagagtcatactgcttcgattggcattagatctataaagatgtgatattatttctagtgggagattttttcttttatgatatgatgttcatattaaaatacatttggatttaatttcaaattaatgaaattcgtttcagtattatttatttatttgataattaaataacagtcccaaaaaattgatatcattcttataggtcatcaagtacgtgacttgatcatgaaaccctgtaagtggaaaatgacatatattattgaagtccctagtcaaggttatgaaaatgggacattaataactgggaatgactagtatgtgaggtgactgatgactaagtttcatggagtcattaatatgtggtattaaagtcaatcacatatatatgtgttagagaacacaatattggattgacccgttatgaggactctacaagattgttatatgagtgtcataagagtttctcatcacaactatagagtatagtcctttgacctgagttcgtcatgatttcttactcatggattagttcgctttgactctttcaaacgtcagccataaaaggtgattatatagacagtgattgggcgcgttatgaattgtttaaggaacagggatggaacaagatggaatttgtccctcccatataacgggagataaatatctttgggcctatcgaagatttgatactgaaaaatgcgtggccgcgctcaaacaaggtgaatgtcagtcgtttgttttatcagtataaattggagttcgataaacatggtctagctgaataaggatgacaatttcttgccttatgctgagatcgagatatagagacaaagggattatgggaatagatgattccagtacaagtgggagattgttgggaatgtcctgaaatcagttgtactttattctagttaaagttgtaatgtcgaggtttgacatttgtataatattacgtggttataatattttgcaagagaccgcttataatctatgagtcagaactcattgctaatattatacaaacctacagggtcatacacttaagcaaattggatcaattaaaagagttattgggcttttgcccattattaaccctaattggttagggttaaacgtttggctgtatatatgatatattagcaacttttgtgagatacacttttgatcacaagaaccctaaaataaagagacaaagagttgtctaaagttttgagtttagatctcaaaggaactagcattccagatctgatctagtttgtgtgcgtgtggataccggtagaggcacaacacttggggtgctaaaataatctcgagataatatgattcacctttccccttcagaatatccaggtatattcaaacgccaagatctagatttgattatttatttacacagtttctggcaattgaattcgttgttacttgttagtatttataaattgttataaatcggtacgaattccttcagatgatgctttagagaaagaggataaacttcggtccgcttttaaccaggttcaagtgcttgagcatgagttaattatatgagaccaaaaaggtaatcctcccttccctttacctttaaatgaaagctttcaccctctccctcatctgcatccaaaccggagcgactttgttcaatcgcttttgcacttttttctctgcctggcaggcttttcatagttcacgacccctgttgagtagggtcggtataggtaaggcaatcgattcaaaagtagactgagagtggaggtttagaataacctaaggcgtactgtagaaggaaagaaaggtaagcaatcccagacccaatagggctacctttcttcgactgagacctatctgcttcattcccgagtttcacttcacttggacacagccaaagaaaaaggggggcttgatccaccgctttcaagtccagttaaattagagaactcctttttagaagaataggatagaatcttccgaatcagtcctactatggttggaccaaggtcatttcgactctctagactttcttgcttctttccatcctgagaagtagatcctttggaccttttctttcctgttgaacgagtggatgttttgaacgagtgttgagcgagtgaaatgccccataagctataagggcgagctatctctttagattctgtgagctgcgattgaactgaacgttccaagtgcatccagcaggaatcgaacctacttgcctctttattaggttgggcgctttaaccattcagccatggatgcaaagagagcgagtgaactaggttttggtattccttctcgagcttcaatttcttccgttataggagattcgagaaaagatggaataggaagacgtgtttccagaacaaacaagatacgggttgagaaggggaagttagcaaagttagacaagattggaatgggcataggaacatgtattgatgtaccagatcggctaatgctcccaggttgatgcgatgtattccaccagttgactgaagactttattattggtatatcgatcggtccagcacgaattgaaatagaagccggttcgacaggaagcttttgaaaacgcagtgcacccaggtaaataagaaacgagatgaatacagaggtcaaacgagcatcccacacccaaaaggtcccccacattggtcttccccgaaaccccccagtaactaaggtaaacaacgtaaaaaaagcacccatttctataccggttccggaagagcgaagataaaggggatgttttgttaataggaacaagaaagtgtttatagccgtggcgatataaacaataatactcatccgagccgcaggaacatgtacatagagaatacgagaatttccaccttgttgaagatctagtggtgctaccccaagacttaaatgaatagccatcgctgttaagaacaaccaagacccaatgagaatttgcgcgtagcttctggtctttgacatcaaaaaagaaggttgtaataacgaaacggacatgtgcaaattttgtcctagctagtggaacaagaaagacatggatctataatacgcaatcaaaggatttcccccaacgaataattccccctcccctgctttgtttgttttcgctctgcttgtgcgtggcactccttgctggcggagcggcgcatagcgaaaaaaagaaaaaaggaaactcaccaccaaaagatcagtccaataatcccactcactggtaaatagcgcaatacttcttcgtgaatctccgctatttgaatatggaacatcataacaacgaaaaggaatgaaacggctatagctcctatatgaactaccgggaagatcatagcgaagaagtcgagacctaacaaaagacgtaaacctgaaatggcggtttagtcgtcggaatcgcttttatttatgtcgtagtcagacagcaattccagtagctccacccaaaacttgtctccgttttttcctaaccgggaataaagatagtagaatcttttcttacgccgatcgatatcgatcatttcatgttcagtcatcacaacatttattgctcgttctatatcccgttcatccggaatatggtaaccttcggatactaagagttcatgtgtttttgctattatttttgccttgattttttcgcatttatcactctctgcttttacttgctccccgatggtatctgtgttttgatcctctacctcgaggttcaagaaaaggcgttttgagccactttccttgtactctttcgaccagaaaggtgaacccctctgctgatcgtgagagtgctcattctcatgagcataatatccttctaaaagaccaccctcagatggatttgtcgggggcattggcgtatttcctcctcctagtcctccggataccaccgggtagaactgagaaatggcacgacttaagtcgtccatccacaagtatcctacagcaaataaagatttacagagaataactgaaataacataaaaccaaatcagttgccattttttggaaagtttgtttataataggaagcgaacaaaaggaatctaaaaggacttttatgctgcaaaagactgggatgggaaacaaaacagaatgtacaaaacggataatacgtgtaaccagcaaaccaaagaccaaaacttcagtacggtccgtgcgccgtttttcttctctaccatgacgaatcaattgattaaacgtgggcattattctctttcctttctttttccccccattttgtgccctatcactttactcccgatccgaagcaccccttttccattcatatagaaatccaatcgtcaaaataaataaaaagagtccatcatggaccaaaatctgcccgagacaaagctgagctgtcaaataagaccaacaagggataagatagggaggctcctctaaagctggaacctcttccaaccccagcacggctcttccccgtcgactcctcgtacgcgtatcacaggggcaaacacgccttcaaaacatctggatcatacaaacttctcattcagtggaaaaaaccttaccaagactagttgcctcaacgaattgatatgcttttgctttttgtgacaccggcgcgaatgctgaatacggaggaatacaatgaaatcagaacaaagcaggtagaccaagctagcttacagaattcgaggaattcaaactcagaataagctcttttattagcacgtttggtagccagaaaggaaagaggttctcattcacagtgccttctccttctgtgatcactgatcaaaaggacattcattcagtaagggattgatcctcaaagtggttcttttagcacaatgaattacttatcttataatgaattacttatcttatatagtagtgtaaccttctcttcgtacaaaaaagcctattctgaaagccgtctttcaatgcctgtaccctagggcgagctaggttcaagggtacgcacctagtagctgcgagcctaagattaaaggcaagttcccttggttcggcacgctttcactcagtatgataggctacggtcagattcgctcggtctaggtatcaccttgatgcgcgtagttattgccttgatccctttcctttgctcgggtcattccattgcctaaaaaagtgagcctggatcttcggagaaaggattttagagctctgtggagaaagtcttgaaatattggatgctttctttcgtggttaggcgggcatggcatcaactctgtataggtgggttggcccggccggccaaagctagatatagatcggttggcactggatctgctggatagaggtagcggcacagacagctacggatggatagaattacgtcagcttgtcgggtcagtagatatgcccaggatccattttgactagaaatgaaatggtacagagaagcgcagtgagcggtagcaaccattgactactcgggccgggccttgcagccagaaaatgggactcgatcagctcagcccattgactcttttatggggaactattagagacctaggaaagtcaagatgccaccggggcgtagaaagaaaaaggcttcttcggcatgatagctctgctctgtcggataatatgagccccttatggaacagctcactccggggtgattctggtttagtcatagaatacagtaaatccatgcgtttgtcttcgccttttcggaagaccaagacagctagacgatagattaaccaaagccataaagagaagatcgatatcgcacagaaatcctggatctatcaaaaaagcccgccaaaggtgtcctcacatgaaatcatgaaaaggatccgagcccatcaaagactctactacatgaaaggatctgaatctatccaaatagctgtggcccatgatccaagggacccgcaaccagtcaatcatgctatccttaccttccaaccaatcggaaaaaattacgttcaattcaggatcgaatacatctttggcttatgagttatgcgttttctcttcttggcactttatgtctgctagtgcataatcatgcttatggaaatagtggaggttgagcagtttccctgatgaagagaactctccttctctaaacaagcttgcctgtgggcgtcgagtaagagcatctgggaattgatcttttacgagacagcccggagttggtctcgtggctaggtctttaaccgaaccggttcggaatagaaagtctcggtcaatgaagtggagtgggctgaaacagaaagttgggtattgtatttttatgctcgcttggccggaatcccctatagtgcttttcgggcgaagtgacggattactttttgagtgactaccctcagtctttcagagcctcgggataagctgttcttgtttcataagcaaatgtggcaacctggtggtatagtgagctctctctctggattaagcttcggtcattgatagagaggaatcacctagcctagcattagactcgactagctagccttccttgggcggattgctttgaatagcgtagttttcttagctccggggactgccttatctacactatgagaaatgttagatgcaaccattatagtatagatatattcttagatgattactatatgtgatttctttcatacagtcttaacaaatatagagatcttcaccataggagactagcttgaactaaatcctccaaccttaaagcagtatgagagaggacggataccagaaagaatcacctcggagccgctatgccactatgagaaacgttatactatagatagacatgagatgatattctataaggaatacaatgtttgaaaagcaagaatagatagagttgaaagaaaggcgctcgtatagagccctcgactatgtatcggacatatggcaggttgggaaagcgcgcttggaaaagaaagactatcctcgaggtaaatgtaaatcaatctatctcgcattgcccaatctgaatgctaaaggctcgtaaccccctaaaaggaaactcaccaccaaaagaaaaaggtaggttaactaacgaaactcaaaactacattttaattcttgctcaccgataatcctttataaaaaatattatacagctgtatacaggattattggtatagctgtccactagccgaaaatcggacaccaaattattgtagactgacgacctgtccttaatagaaccgatctgactctctgaacaatcggaatttcgtacttctgtcggatcctccctatctcctgatcgagcttgtgtaggtagatgttgcctggtagggccgatagtagtacactgtgtgggacggagtaagggcccctctcaactcctacgagtcgtccggcggaaaagactttctgaatggagtaaaagaacttgggatcgtcgatctcttccttcaaaatttggatgagtcgatgtcggtcgatggtgtgaaaacacttcctgatgtcgaattctaaaaaccagcgagagattccccactcttctttgatccgtcttaggaccgagtggcagccttgacccgagcggaaatgcgatgtgtctggaaactcgggatcgtaaatggattcgagtaccattctgatcgcctctttcatgatcttttctataggtagaactactgtgagcggtctaaacttcaacccttctttctttcttcatattgtaaaggggggaaaagctcgttttttgctccccttttttataatcaaaggccccctcctgccgtcgtttcagtgactcatagggcttccctcagttcagtctttttggttcttgaaaatggtcgccacctctcctcttctttcagtcgatggggttcctctccttttagtcgagtaatcaatacctctcccaggaccggaatgattatccctgcccgatgggtctacatccatccctgaatgtcgtcgggtactgttcacttccccgccattcttgtaaccgtcacctgtaatccgcgcgggtgtgtccgcacccccctgagtggacgagaaagaaaggatttctcggagcaaccccccaggttccagacccaggagtcaactttcccgtatgagcattcggtacatgtatcagtccgtgggaagaggtgaaagggtcaccactactgaggatctccccccccccctaatcttagataggtcgtctgagggttcgccgcggttcattgctgtgcttacacacaaggctacccttctccgaaagctacgcgggaccacctaccactagtcttcggccggaggggtttattgcacaaaaacggccgggacgcaggctcccgaagagggaagcccaacgaatgtcagatgcaaagttccgcacctcattaagatcatattggcatactctcccaaaaaaaaaagagcagaccccattgaagacgagagtaaggtacaacaaggccatttctgtccaccgcccttctcacggaaccgtacgtggacgttaccgctcatacagctcccagccagcaagcacagttagccttcctctacaagaaatggaaatgtggatgaatcgaatgaaatcgaggaattcggtttttcttttcagacatgataagtaagagcatccctttcacaaaaacctacggatccccctcctatcctgccacttcagcaccttgtgatctttgagaagatcattacgagccctttcctagaatgtttttgtagattccgaaaattccagagtggatcaggacgagaatgaatccgggaatccagggcatactcatcctggagcttccgctctcctctgggaagggcttttttatggatagagagatgagtcgagggattgattactcgactaaaaggagagggtagcctcccgtttgaccgatttctcggagtcggaagaagatctctcatctgatgaccctgaacaagaaggagctgctctcgatgtgagatcagcagcaaaagaaagaagaaaagggccatgatgatgatcctatgttcgttttcgccctgcccctatgatgcgctcctagctcgcagagcataagtcagcgcaaaggagagatacatcctttaagactgtgaagagaatccttggtttgacctacggactacgtgggaaatacgagatctaggcaagccgctacatgttctcccccttgcccttgaacgatagaagaactacttatcttctcttagatagcagtcgatcggttctatgatctatggtcaatcaataggcccacggatctattcttctatacgataaattgccatctcgtagcaccacagcctgggggtaagactagaagaggagatttgcttggtcttctgtgcggaatctgcttcctaatcagtgtagctcttgggtcagctcacagctaggacgtcatcagttctaaaggattcctcactagggagactctctccttatgggcaagggaggcagattttgatggggagaaggattcggaatatagttacataagtccccttccctctcctcaatatagtttcactcgagtcacgtcagtacctctccttttagtcgctcgtcgagacctcatcaactagttaatacctccggacctctcctttatcagtcgagtttgtgttcacaacctctcgagaaacaagttcgagagttacgtactttcaatgctctctctattccttgctaatcaaggcctgcaagggaactggctacgactataggcgggacgacatgcttttagcttccctgaaataggcgacttgctcgctttggcaggaagtattttttttgaagaattgaacaaaaaaaactgaaatttctgtaaatcattaaaacgggactttctttaaagaaaaatggtctctcaagacggtaccttccatcaagaaggtcctatccatcgtctggcaaagagacgcccaagatttatagcaagttttgacttgagcgctgccaccgatcggtggcccgttccagtcatatatgagcttatggcgtgccttttcggtcaaacgatggcatcgtgcattgtcaatggtgccttagcactcaactcatgctctttgaagtccgttactggacggcatgacgaagttgtgtttgttgcaggtcaacctttgggttattacggctcctgggctctattcgcgttgtcccaccatgctattgtgtggttggcagcattacgagcatatcctcatcagacgagaccatttctcgactacgctttgttaggtgatgacatcgtcattgccgatcgtagtgtggctaaggagtaccgttctctacttgatgctttgcaagtagatatatctgatgccaagtctattgtatctgagacgggttgtcttgagttcgccaagcggttctgggttaagataatgtcgaaggacttatccccagtatctgcgaaagctgtgcttgagagctacttcctcgttggtactcagcagttggcctataagtacaagttaagtcctaagacttgtttaaggttaaataaagctggataccgcgtgctaggacaaatggacactacactaaggccctatcccggcgttttagtcggattcaggcgttatctagtaagcttttagtcggtcctgatcggttaccactcgagtggtggattggaagaggattacctctcagtccctatcttcgtggtgtgttaattgcaaggattcgggatgggatgaagcttaagcagctcacgccccctcccttggagatgttcctttgtggagagccagaagcacatatcgcagaaaacaccgcttatagacattgtatgaacaatggtgtgagtacgtggtatggtttgacttcgttcctcgtcgtgccccttcccacctaggaagagatactaacccgcagctgcacttggtgcaatcacagcagaaaacccttctcctagacattcctcgggggcagaccacaccacctcggaaacaaacaaacagcacatgcagcaacagagacaggcgttcatcgctcacttacctgcatacatcatgacaacttgttcccatctcaccatgcagaggcgcgtagcgagtaacaatccggtccatgtgctggcttggcatggaaggcaaccctttctttttcgcagcgctacgcgcctccacattcagtgaagagatcccggacagggaagtcagaagggcagttactcttcggacctagcggccctgctttagctgcacttggtggttccccgctcgggattttatactggatttttcttttagggttagtgcaaggttggcttgtgcgaagtcgacaggggtggttgagaaacacgttttattgggatggggcagcaggcaatggataccgttcccccaccagagcctgcagttggtaggccaaatccctctgtccaagtgattgagttgaagcttttcagagaaagggtaatttctgagtgaatcaagagaagatgctctaaatgaccagaattaggcgccctatcgctactttgttatctaaggtcccacatcgatcacaaggtttttttttcaacgtctttgattatttactttcacttgcactactatgctatgctaccacggggaagttctaaatggcgaaagagaatcctttcagtccaggcactcagtgcagtccagacgctcaggagaagacggaggttaggaatgctgattggaaccaatacgattgcccagaggagctttataggtatccagagtcccgcacaaggagcagttgagacagatgcggaagaaggtgcggccgagacggttgatagagatgatccggcaggcggagagtttgattgcgacagtccagcctttcatacgagaaatggcggtgaccgtttgccctaaacaaatatctcaagatgtaacacatatgccttctcgtagagcactcccagaagctaccctgaagcctgatcgtgcttggaaaaggcatttcattgaccgaacccgacccatcccaccgagagtgcgaactgctctttattcgcttcatagctgggctttgcattggaacctctgattgagcccgcggagtcgccttactgcttgagtgagtaagccattcaagattgttgagcttggctcacttcagcttcagagctctggctattgcttgcttagaggaggaagcaggcgtgtggtgcttcccgcaatgaagtgtcttcccttagattcctctttatactcaagaagattagaaaaacactctgtggaactgcaagtggcgtattggagactgcacagcaagtggcgtagtggagtgagcgagcatcttatttgcccggatggaatagaggtttatcctattctctgtaaacagaaaaggaagttgtgctcaatgactggaataagctagtaccatagattattagctatggactactccttaagctagaggagacttgtttgtctgggataaattgtcattctagacccgattggaaagattgaattgaaagcaagaacatagacctgacgagaaagacccacattttgaatattaacttatgataatcaaagggagtcgtggttacgggtaaggttaggaagggcgggaaggacttccttactagaagaggatggtaagccatatgtgaagctgaggcaaagacattttatcttgaagatttagcggaaatcaaagtctaaagtgccttactgtgcgaaaacgcatattttactctctggccaagtctggagatagaccaggaaagacatcttcaaacctgcccgctgacactagtactgaagacttacttgaaagtggtactggctagtggactgatggagctggagaacggaatagacatccattagttcccgaagaaggcaggtttgagcaaggaggctcaagagtagcttttcctcttcctccctttcataacactccttccccgtcttactaggcgttaggtcctccattgcattctattctccggagcctaccaacttgcccacctcttaatctccgcccgttaacatataaaaaatcagactcttgtagattcgcctctttctttccgactcgcttcacgactcttttagtctcgttacgcttaataatcaaaataagcggaagccaactcttgaaaatctcaggtttacactgctagatcaaattcatactgaaatgcattaccctacctatctaaaaaaaagagggccctggggagcatgccaccctcaacccacaaactcccattctcctcagtctcccagtattggagacctacttactacatctcgaccgggggcctctccagtctttgcttaacaacttttctatagaaggattcaatccagccgcaggttcccctacggctaccttgttacgacttcaccccagtcgaagatcccagcacggtatgcctcagtcgacgtaatgccgggcattcacctgatggttccccaagcccctgagctcatcaatgaacggattccacctttcacagcgagctgttccgaagttgcgcctgagcacagtgaaatgcctcttacggtcatctatagcgtgctcccagtcgtcatgtagagccaactggagagcacgcttgacatcctctggatccccgagagttactccacgttgatgcaagagaatttgggctttccgtaccatggccgcctccaaattcgcgcaggcgctcgtgatagtctctacctcggcagagatgcggtcgtgctcttgtgcccgagcctccctttcccaagcctgctcctcaggaatcggttgattgaccgacgaggaggtacgcccggaactggccgaatcttcgaccatatcggatgtatacgtgaaccactcagacgaggccccgtcttggtgattcactatcccccccgatgaaccggtaactgaaaatgtgcccataaagacagtaaatacatccgcggagaatttaccaaaacccgccaagatatggctacgtagaagaacgagaaagagggagatttgacaaacaagggctagatagcaccattgtgtcatcctctttcctaaatactgctttaaggatctaaataggcaaattgaaaaaaccaatagaatcaagaagattataagattgaaacgggaaacgctttctgatcctagaaaacgtccgaaaaaacctgctacggaactactgagcatggacaaaaatacgataagtagatacataatttaatttcgagtgtgatcaaaaacctaaaatcagacaattacagagcggccagtgattgagtgatagatttctcgacgtccggagaacgctcgaccgaagaaatgagtaactaacaaggaagattttgttccccaacttgcttgattaacgggcattttcggggactagcccgcttcttcattaaaaaagagggcgattgcccggtccttggaatcattttagatcgtatccccaagcctgcctccactttcttatgtgaaagaggtgcttgctttatgagactgaatggaaaccttctttcttcgatcagaatacgaataagatcaaaaaggccatcattggggcaaacaatgcaatagcttcggttagagcaaagcccaaaatggcataaccaaatgattgtttagccaatgatggatttcgcgccacagaatgaatcaaagaactgaatacgtttccaataccgatagcagctcccgctgaagcaattgtagcagctccggcacctattgattttgcaccttctaacatctcgggttgagaattatactcacgctttgtcattcacttatcttatatcttattgattcctcgtcgattcttaccctcgttcctttgatcttggacatctcacttggaatgcattctttgcgatcttatacccacggagtggtagactgaagaccaactgaatctcgacaaagagaagtacaagcaagtagatcattcgacgtcagagggaatgactcgtagctagggtcccatctctcttcgattattcaatttgatccgtcttcgtcttctcttatgaaattgatagtttgtgagatcgattactcataaatgctgcccttctcttatatacgagagcaccagatacaccatggatggatacatacgatttcacttatcccaaaagtaaagatcttattcgtattctgatcgaggaaagaaggcgagctagttcaactcaatgacaacctctagggccaagcctatggaaagcttttccaatctccttccgcattctttcctttaatatgcttgtatcacataccaataagacataggaggatccgatagatttcaatcacataccaataagacataggagttcgttccgaacagataagatgttagttggctatcaatcttctttagcacgagtcgatccctattcttctatagttggtgagaactatgacttgaacctgctccttacttcaatcttcttttcaattcagatatggatggtaaagtccattcagatatagatggtaaaggaagatcaagttactcggctagaccattatccaaagaatggaaagctaaagcaagtcaaagaatcagtcccataattgaatggcatcgtcctttctttcccccatgaattgctttctctcgtactcatgcgatcccgtccgacccctttctacttgaactcctggttttgatgctgtgacttcccccatgaattgctttttcttcttttcttgctttcctgcgttgcgtacaactccttctcttattagagggctctcacggctcctatggttgaggagcgttgggcccattctaagttggagcgactctccggaagaattcctttgaagaaagatccaagcactcaacttgattggagaagttagcgaaagagtctcgagagcaaggcgttgagcggatcgacttttgctttcccctaataatctgaagggaacgggtgagaatgaagttcaggctaaccacagctcctttcgtttcagtgggggttgcagtctaatgagaaatgagggttgatcatcgatctgtagcgaatcttttctgccaattgactttcttgtccttcgccctctaagccattggttaagttggtgagtctaagtctaaagagtaggggcgtagcgaattgactattgtgatctctttagcttgaaataggcgctggagtctgtctgagtatgtaaaagatgtggtggataggataagaaagaaaccttctacatcagctaattcttcttccacgagggactcaaataaaggaggatcggtttctttcccgttcatcgtatcataggattgggggtctcttcctgtcctgaagaagcagctctttgcctttctgcttcaaagaaagagggggaatgagcagatcaagcctttcccttcatgcactagatggatcacttacaatgaccaatactcctcgtgagaatctaaggcgcttaaggaagcatctcgaatcgggcgtgaaaaagatccatctttgatttatttcacacaatttcgcaatgtcaacttgctcgatgtaggcttgctcccatattctccacggtttaaggcaagattggtgggaaagggatattctcgcatcgattacaatgaaatattctctgtagccgacatatgttccagttcgccaatagtatccatcgttcacagcttctgccccttttttggggggcacccagcagtttactgttaaggacactatcgacttactgtgatatgtctacagtcaaaagctagtactttatgggtagcatctttagggactcagagatcaggaaaacttgatagaaagccctagctctaacttgatagaatgccccagcaatggccatcggagaggtccaacgtaatttattactcttataaaagagggaactcgactgaaaggagagaagataaattccatttacaggctttctaccaatgaccggagaccagaaaggggaatagaagagataagccttgagcggtcagaccaattacgatcgattcgctaaacattcaagattctcgagatgaactgctaaaagaaggaagggcgatagagagaggtttttcactttcaactaagctaaggagattcgggatgggaacccgcactcttttgactgagaggcgtaggagatagggagttccccgtaatccgaaatatgatttagtacagaggccggccgaccccaaagtcctccaagtactcactcctttcaacgtcccaaggggcattaaagacatagagatcttggaaccaaggtgtcctcctatggaaggaataagaccttgaaacaagacccccaaaaaagggtctttatgggacctttgtcaaggtcgttcgctctgggctttgggttcaacgggtcgctttgaaaataaatagtctcatcacatctaaggtgcaaagattgacctcgatgcatgtcaaattttgaatgcctcatgacctatggttcggtcgtggaaaaccaccaaagggtggttggttgagatcttaaggaagaaataccgacccaaagatctggcatgtgtccttgagtcctcttctgccacgtgtcgcagggcagcaaacctataaaaagggatcgtatccgagaaagtactcctgctagcactgagtgtcttctttccactaggctgaaatacggctgatttctcacccgtgcgcacgcatctcgcttctggctccctgaccgatacgacctttctgggtttgttaacatccttccttctccttttgggtatttgctatcttgtggtccctgattcttaggctgaccacgtggtcctcttgcgacgtctgttgggaggtagcatccaaggtccgaaaggcctttattccgacccgacttgcggatccgggtttgggagaacctccttcgccgccggtgagttttctacatcagtctggttttgcttcggacaaagctctatccggtggccatattccccacactcaaaaacatataagatgcaagccttcgtattcgaccctctggatgtcatcattaagacaaaactgggaactctttttgaatttgaaatctacctccacacacacacgtgcatatagacccctagatgaatccactgtgcatagatcagcccggactgctttgaccagtttcttttcttcccaaaaaaatctggttcattaacaaattgaatcgtgatcactggggacgtctcctctcgtttgactcgagttgcctttaagtctcctaatcacatggatataggtgggttaattgttcttcctttcggatgagctaattgaatcagatgaagatatgagatcagttcagtctcattccgtaaagccaaagacgacattccattaaagatagagtgggtcgacctttcaaccaggacggttgggtgcgctaaagcaaaggcgtcttatcaagggcctgccgctcccctctttagttgtgacaagggagtgtgcttatgattctactttgttgctagaccaggtcttaaaacgcaattatgactaggtcgggactgacggggctcgaacccgcagcttccgccttgacagggcggtgctctgaccgattgaactacaatcccagttttaaaattattcttcttgtcaaccttcttctcatacgaaatttcaaaagaaagaagtagagtcgttggaccaacaaccgccaggataaaatctgtgtgagcggggcaaagacacctgtttgttttccgagcgagaaagagataaattggagattgtgtaatattacatccaatcttccttgagagctggaaaaattccatgaagaagagctcaaagtattcgttcccagtcggattctctaattaagatatagcagtcaaccatcaagaaatcatcaactatttcaccggggatgagctctatggctattctattaagtaaggatcaacttaggccttaggcttaagctagaactgctccttctatcacatcggattctagtaaagagatgggccttctcgtctgatctctgcatcaacaggaatgcgggaaaagcttcttctcgccccagagtccctagcagccttaagcccgctacgcccctttagttgaactggttgctatataggtcaattgaatcttagccagtttcttcttactccttttgttctcattcccggccaaccgtgccatgaagagtcgagcaagagcaatcgcagctttatctctgcctttgcagctcccattcctgccttataaaagcttcaatctacaaaagtagaactactgatgacaggtctggcctacaactgacttgctttcagacttactggctgaagagcaaagagatatctattttacagtaaattcctcttagaatagcatcccgctctttataggtttagtaatgctaccttgagcccaacgagtgtaatacctggagcgagtaatagagaggacagaagatatagactttttctttcctttctggcttgaccatgaggccatgactattcaaatcttacaggaagcaaccgctgtaccccgccttctagctcttagacttttagaagggggttcctccggcgccttgttccgttagtttacttttcattttaagtcttgtaagttagttatgtctttcaagggatatcaccatcccccgcacctcttattggtggaagcgcggggcgttgcaaccatcatccttggacccggaatatagagttcttccctggtacctggaggatggagaagagaaggcattgtctttccttgatggaaaactctatggtatagctatcattaacggaggaaattatccttccgcaccttgatctttctagggctattttcactaagccgaatctgtggactgagtggctaactattctaggagtggggcttttctttgtatcgagaaaatcttttgttaacagttcaaactccctggcaccatcccctgaataaggggctgggggaggtttgacaccctcccagatcacttgagcacaaagctttaaaaggagcaatagtggtcctgctaacgaggtactatgcccggttggtggactttccttaccaaagtggcaacacagaggtttggtcagaaagctgataagggtatgacaaccttacggattaggcaatacctaatcttactggttcttcgtcagagccgggcgccgtccatcacgtggcgtttgtccacgggtcaaggagagtagaaccggcggggtctttcttagtgttttgtggtacataccaaaaggtttgtcattttataccgattgatatggctttcaatttgtttaccacattcaccgagaggctccgcttggtctcttggcgcagtgtttttgaagacactcggtcactccggcgtttcctcattcggatcgccttagtggctactgggctcgttagtaaagaatcagcgattgtttgtcacgtcttagcaggcaaagtacttagaatgtacaagacatcgcgggacccttgtttgcgtattattgtaagtctgcctttacttagtatttatttccgacccgactccatcgctaagtcgaatagaaagcaaagaccttggaaagaaaagatctttcacccggattccaggaaaatgagctgccattatgaaccgctaccataccagaccagatttgacagacaagctccgttgcaagagtattccatctatccaaaatcccgcaaacgcttggagttggatccacaacaaaactcaaccgtggtcgtccagcacgataaattttgaacttacaccgaatcgcgaatcccgtgcaattgagattttctagttgaattcattcacaaaaccccgggaattttagatgaatcactccataacgaaaagtgctaaggtcctctcatttactatttgcgtaagttagttttttatataaaagagggcaaaactgtatgaaaaagttgctaaaactcgtcttttttcgttactttgaccgggatgtaaagatgtattttataaccttgtctgatgctgaccacatgcattaggcaactgttcagctattactcacgttagctgcatctcttccgagaccaggcccttttctcactcgtcgatggagaacctcaccctcaggctcaaaaatcgtcgttcttacgctttcgggggtctccctctctacagtgaggttctgtttgaagttatgattgagacaatgagtcacaggtctttcttttattcccttggaaatgaatcaccaagaaaaaggttattcattagcaacaaaaagagtaagacagccctgtcgggctcctgcagttagaagaagagcgcgaccggaaccaagcataaaagattgactgtgatgctacgtgcatacactgatcactacggagaagagaaaagatgtcataaagcatgggggggaccatcgacttcccccaaaaactattgattgggatcgatataacagagtgtgctcgataggaatcactattatgtccccgaatagaatgtatgtcacctttttctttccctttttgaccaacctgccgcgtatagtttagttgtttctttatgcgagggttgatgattctccagtttcggatgcctccggctgggaagaagccctaatcttcgagtcaggagataccttgagaacagtgaaagcggaatcctactttatttagtttaaaagaaggctttgtctcgtcccttcccattgtaattgtaggagggaaagtaaaaggagttattttaaaccaccctgcccctagccctaccatggaataaagatatagccctataacctggttttcagcagatctagaatctactgcccctctttcaacaaacttgcttgctatcccagcgcgtctatccttagttgtcgtgtctagcaagcgagaaaacgtaacgcgctaacgaacgcacttacgtagtaacccctacgcttgctgctggcgctaccttggatacgccaacccagcgagtaagggagtgagtctgtccaaagaagctcttaagaagcggagtttcactcgacaaaaaaggtttggactgaaaccattttcagacggaatcgactgacttctagttgcatcggatctagagatctgttgccagttccgatagaaggaaaggagtaaggtttaggctttacccaatagttgttgaactcgaggttggtaataaactgaagctgctcagtcttctagcatagcggagtgatatatatcgaagaatgaacttagccttcaaccacaaatggggtcctttaggcagccgattgcccgtttgcttccactgacttacgtcgtgaacatttctccaacccgtcaatgaaatgaagagaaaggcaacaggggaacaaggaaccagggaaagaccaacacaacttccttgacttcctaggcttagaaacccattcctataaacgggaaaagcttactaaccttacaactctggaagggattactttcttaccaactgacatggcttacctggcttaccttactaacaactaacaaacattcctgggattacttcctgacagggcttagcttacttactaaccttccttacacggaattacagggaagccaacacccgggatgttccgagtgaaagtagaagtttaaccggaactgtcgaaagattactacagaagaacccataagatgtcccttacatataccgatgtaaacaaagatctgaacgattgagagaaggaagatagagagtatgataggggaaaggatagcagtagagctcttatataccaaattcaaacggttatcctcctaggctagtaaacctagtcggaatgaagagtacgggagaaggaagacagattaggagagtgttcagtggatacaaagagaccaacagttcttcggaagcagaaggaaagaaagcaggagaaacacaaactgaccgagctagcgatgttcctattaggcttggagaactactcggaggatgaaagaaagagacagggaacaaagcacagtatacatcctactagagctgctaaccggtattcctcggtggttccgtcctttaagccagattattaagtaagatatggtttgacccttttcctttttgttttcattttcatctggaaaacacccggaaccagagcatgaaataacctttcttttttgtatgactgagaggaacgcctcaggtcgaatgaatacgaaagggagatcaatcaaagaaacaaaaaaggccatgaatgaagaagttgggcctttcaccctctttctagttactctgggagctgatctgataaatgcacttcaaagggagggaaggctaggtctttcccatcttggtatggccgagcataaaagatttgaaaatcaagtcaaaataagaaaaggtagagagaaaactgaacgaaagcggtagcccccgtcagggcaagagaaataaaaaataaggactcttgttttccgcatacgcatataggctgtgaaaaataagtctactttttttaatagagaaagtgagtgattcgtctactttcttaataaggtaacggaacgaacttcaagtccttcgtaggacgccgccgtttgctaagatgtgcttccacatcgtgagtctttagtgcacaagtcgtcgaatcccttaaaggaaaggtttggggcaggagtatcgacgacaagtcgtgcctgaagttgttcatgcacatcttgaggagctcttgctaagtaaacttatggggacaggcaaaagtaaaagctcgccaccttgcagtgaattccatgacaggttcattatacctttgcttggtttttagtagttcgggcactccaacccttctttgtgtgttgctgaactgcttcctgaactccgagacccttgcttcccaagtcgggatcgactcttcagagaggtggaggtacaaaggaaaaaacactggaaggagaggtagtttactggctagagagagtcagaaagcagtttagtaaggtagtttacaggctttcttcctttcttcaatgcttgagggacttctttaccgtctaacctagctagatctgagctaccttaatccgtttgtaagtaatggagtaagagttacctggattgagacagtctgaagctttcagcccttaggtccaattccagctgctgttgctctctcaggacttcctaggtaaatcgagtatgtgaaaaaaaattgtcaataaattctcacacatagtcaaacaccttatacaataggttatcagactacatcgatagttgcttgaagccaatagtgggtaagtgttagatgaacgaaccctcttgtggatcgctttctcttgcacgttaattaatcgataaattgcgtatgtaaggtctgctggtctgtcaaggagaatcaagattcgacgggacgctagcgccctaacaataacaagagggagtgctaagctagggttcaaatccaatagtagctagaaccagtgaaagggtagttcaccagacccgctcacgataatgcgaatgaaagggcagataagcctattactagttacgacgagaagatcctaacaggccggtttacaacagaaaaagaaaagataaggcttgaagacctattagtcgaggaattggcgttcctcggggatgaaaaggaattgatctgacccaatctattgatccggacgggactacgaaagattgactttcttccttcagcttgaaagcgggaaagaaaggaatagacagaagaaagtattagagaggaataagcgagtgtcagagtagtcctaacctcagttgaccgatgatggttctgctggttcttacttgaatctcttgctttgagaataatacttcaaaaaaatgcttttatcttgcgatgtcaccactcgctttatatatagtataggactagaccaactttcgccaatcttcgaccgctggcgtatatgaagcacgttttctccgtccctacctcccctgcacccggccatggatcaagacttctttctggttctcctccggcacaggaaagtaggttcgtggctctccgtctcctttcttgatgaagtaaggattcatttattttgtgtctagtcgagtacttggaagaaccccttggaatgcttttctattttcattcagcgctacgccccttgtgccaacccttttctcgtctaataaagaaaggagtcccgggccctacctctactgaatggacttctacagctaacgatccctgctaacagccggccttaccttaagttggaacgaacctatctcaacccatccatcttcattcgatcgatatgggatccttattccttatataatatatcagaatcttatctgtttaaccagctgataggcaactacactcccttttgtatgcatgctggtaagactgatagactgtcattctatcccttttcttgaaagagcgtatatgatggttatgaatggaaaaatgcaatgattgatcccacagcgctttatttagcatgctatacagtagtaaggttatatgaaaacagaccatgatatagacaaggggctagatcgtgataagggcattatagaaaaaatccctaattcaggcagtggcccgtcatgactttatctcaaaggatgtaataggagctaatggaagaaggataatgtgatcaatctccagtcctttacaccctcctgactatgccccttgtggtcaactgagtcgtgcagcacatcttttcgtatcttgacttggtactatctccttttctaattcatcctgtaagcaggtttgagcgctttgaccatctataaaaagcgaatcttcctactcctacacctctcctgtgctgtggggcttggctgcgtagaatatctatcttgttcatgtccctgcccgggatttcttccttggctgtagcttcgctccttgggtctactccccgtttttctggaaggttctacctagatgccggaggaacccattcccttcgttgatgttgtagctttcgttgtttagagggcgcatgaatggggcagctaattaattgcatagtagtgctgctgttcctgcaagcacgaagtccgcgctgtagcttctgtcatttcattagtattcctcttctcctccgttgggaataggttgcattaagggaacaggtatgtaggctttagccggcttctccctgtgcttacatggggtttattgcagctatcccctcgcatttgtagctcttgagcagccaagctctaatcaataggttctaaagtcgacttcgtctcgttattctgtgttaggtttgtaaacctaaggtgtacttcccgaggaacgccagttagtcgactaaagggagaggaacgcctatctacggtttaagcagtctaatctcactctctcgtccagaacaacttctttgggtttacttttctgtacatggaggggcggagcggttctgttaggttgttttattggattgcactgggcattcactgcgagctcttccgaggaaccccttgaacaaacaaaaaaaagggtaattagttctgttttaacagaccccttgttccatagctgctccctatctcgctaagctacctaacaaacagtctcgctctatctcgctaacttactgacgacctacctaacttttctctctcaataactctctcgtctagggcatccgcgcctgagaatgctgtaagctccctctcctctctagacaagtgcttgagtcatgacttcgccctctccttttcagtcgagttgctaaagcacctctcgccaagacgtcttttccagtgtcgatcatcttgctttcccgaattcgttagattgccaccagttccagaattgggagaacataggattggtagttgggctctgctcgcttggttggtcattcccttctgtcttggttgatggataggtgagcgcatgcggttacttccgaacgaaccggtcgatggcaagctttagcttagctggctagcggaacagaagatgggttaatgggctcttaaggcttgggattttatccactcgataggaaacgatcttcaaagaagacacctctcccgcttctgtgactcagcttcatcgtacaagggacttttagctcatcattccacttcgactggtaggggttttctattagtgcacttcggtgggaataagtcttcctcttttctttcggaaggagaaaaagatgcttcatttggttccctcggatcggtaaatccgaattcgtgacccaaactctatctagtttagttacatcaaaggtggctgccgaataaaaggggaaactttgcctgccagattgccttcggtaaccctaacccagttatcaaaagaaggcgccggttcggctttcaagagaggggagcgagctacacatagtgaagcgagtattcgatgaacacgaaggctttgatgaaaggaaaattgacatttcaagtaggtaaagtagggcgcttaggctggctgaaaacagataaaggagacatcatgtgcttggacgagttcctccgaggaatgccttagacggatgaatcccgctggtaaatacggcgggataggatccactcttgcagctgaacttctttgtctatttctctataacctcgtatatctttttactgcgcccgagaaagaaaagagcaagggtaagggccccgggagaagccactgactgctacttcctccgctacaactggtggttatggatggagaaaaagaggggagctttcgatttttaggaacttcttctagttagtagcgatgaattagaatgagaggatccatccaaattggggagaaagagacgtatccgacgaaagcaagatctatgataatagattcagtatggattctcttgtaggtaagttttagcttgagcttgatcaggatccaatctgtactatatattttgaaacatttgtgagatgccaaagagagttcgaacaaggttttgaatcaacaggatctaatctactgctacccctcgaaatggaattggtaggaatggaatgccgtgaacccaggattaggcctcgttagctcgcttactcttagtatagcaggtaaccaaccttcttccctttatggtctagctttgatttcactcagaaaagaagaaaatgataggaccttgattctgtcaaaaagtgagtcattttcctcctcaaaaccctataccccgtaagccatctagcccctttttccattacgtaagcagttcgaagtcttcaatgtattacattccttcatccggggaggttttcatagcctaaacagaatggaaatcataggtctctccgtatgtacctttagcgctcagttcggaagtagatttctttcgttccttcagttgcagcaaggacttatttagctctttctttagtctctatggcttggtgagttgtccaaagccaaggggccctacacttaacaagggagccactctgccagagcttcactctaggcctctcacgtcggtagctatccgtagatcactattggacgatcttcatctttctccgaattatactcttctttctatcttgttgcggggaagttcagtcatatagaaggtctaatcacgagcagttccaatcccagcctgcctaggcatcgaagaaaacatatccatatcccatgttatcgcactcgaaaccatgctagctcatgttgttggtatatcaccttcaaccgcagggccggaggcgcctactaactctgtctcgtcccaggctttcaacagcaggcatgtaaccttcaaaagaagcaattgaggatggaagcaatcgacccggactaatggacctctcccagcaacagcctttgatgatcttcctccgcaaagccgttattccactgcaagtcaagattttccttttgatcgtaatcgggattcgaccaagtcaactgcctttcctgaagcagatgaaacggcagatatttgaaacaaaactaaggaaagtaacattccgagtacaaagtttgactaatttgctcagttgcactgtgaaaaggtaccggaaggaagaatgaaagctaaacagcttggagttcccattccgaacggagagagatagattcaacagaggctttcctaggaaaaagagaggggatatattgaaaagagagcagaaatcccattacaagctgtaaaacagagcttacaacagttgtatcgcagtggacagagtaagcaacattcataagaagaagaaaagggtttttttcctaacaagccagcttgtgtcggcagttagcaacaaatgcatgacaaatccattcgcttggcaggagagacaggatgcaacaggtattccgtagagaaggtataaatctatactattattcaaacaaaacaaagaagttctctcttgactcttggtacctgcctcagctgcacctactcgaaagcaaaggaaacaagaaaagcaaggcagctacggaccaatacttcatacatccttcccggacgagacaagaaagggatcttacagacaggaagcaccacccggaacagcaacaactacaacgacgggtaactcgctggaaaaaagaagtcacaactagatcaagacctaaggagacttcgagcacacatcttccctatcacggctcatactaagaaagactctctagtaatgacagagcagctagccgctcaatcgtgccttacctcagtagatgcatacgcacaacccggaaggcactccttccctacaacttgtttacttaggaatcacagctacgccagcaatctatctcatcaagctacgtagaaccaggagaggagtgactcttaactgtgctctagcaacaagccagctagcccttatagtgcccgaagcgagatcggagtaggaagaccatgagcggaaaggcgttcctcgggactgacgtgactcttccacttgaccgatgaggtgaaggagtgagaactcttactataacagaagagaaaaaacaaacagttcccaaggaagaaacagtgaaacacagcaaacaacccgggaaggatctatacactaataggcctactggcgttcctcgaagtactccgggatatacaccagggcaactttgaaagacaagttagcaaccgtactactggtatgaattgagtattgcagactagtgctaagcccatagcaacaagactgctattatcagatagctaggacttattctacagctctttcacacaagggaacgtatggggatatctaaagagaaagtttatagttctgacttcctgccttaaaagcagattcaaagagacaagatccaattccttcagcctattcacagcggatgaagtaatagcattgtacaattagaacttcatacctttttcttgctttcttgttcttaagccagttacatactttattcgcccgaggggttcctccttttagtcgagtatgtaaacaacctgaaactaatgctttttccctttctagctttccaccattaagacttgttgacttcctacgctattcgattcgctggcatgtccggtctcatacgaaggaaaggctggatggtcagtcactcatgaattccttctcgaatcactactggaatatagcttatagaaagagcagcttgaagcaagtggcaatgctagaagggcatttctttcccgcctacttgagtagcgcgttggatctatgcttaggcagcttaatcgagacttcatatacgtagattgccatgtctgtatccgaacgaaaagaccttcctgatgttcttgccctatttaaaccccgggcaatttccaaaagaagagaaaacaaccacctcggaacaaatatcatgcatacataggaacccggcttcgctaacctttcttacttagtcgtgaaacaactgttcccatcgaacgtagagagatagtcaaatgacaaagaaaggaaatcagacctcggaacgcgctgcacagcacggaacagccattacatcagtgatcggcaaacaaagatagatacttaacagcagctacaagcaacaatagctacacccgcctagggaccactccagaagtaagctgcgattaaccagctcacttccctcattcgatagggaagacaacctgcagggatacatgcatgaacaggaatactgctacgcttacctacctgaccattcatgcaacaacttactcacataccaacaagggatatgaattctactgaagctgcaagcaacaggaactagtgccgcttagctacggtagttcgcaggccgttcttcactacctccatacatgcttcacacagaaacaactgctgtgcatacacagaaacaaggcagctatgcacactaactaaccattcctatcgatagaatacaagtaatggcagataggaaggatagtataaggtagggacagatagatagaataatacgtatataatcagaaggctgcttagaggagtgatctagctctctaacctctaactatcactaaactaaacaaagtggaattgaataagagaaagagattcgttggataagttgagaacaaagtggttcacaggtagctcagatggttagagcaaaggactgtaaatccttgtgttagtggttcgattccacaaccacttctatgcgttcctcggacgctaataacgaagcaaactacagaatctcaaatttatgaaaaatatggttcgactgttgttgcccctgctcggagctttggcaggtagtttttgcgcccgttttctaggatcagaaggaagcgctataatgaccactacgcgcgtttcattctcttcgatcttagtcgtaagcttcctattttgctttcattttcattcctttcgtttgaaagggccgcagaaaaagattatctatctctttttggtcttttccatggggttcgtgggatctttgatccggatcgaagtcatccacctagtggggggtctggctttgcccgtgttgggacctttggtcttgaatgcaataggggggcaagcacttccttctaccggcccttccgggtcgggcagttcttccatgtgggaggaagattcctttgaactgggagttctcgaggaatccgactcccccccggcaggggggtcccgaacggaagagggggaaccctcggtaaatcagggcagtcccctcccgtcccaaacggaagagggggaaccctcggtaaatcaagtgccccaggaagctgggcctgcgcttccagctaatccagtccctcccgggggggaggaagctgggccagtagtcccctatccatacaggagggatgaaatgattgggggggatagcgtagaggcgatagaacgccgccttctggcgaaataccccgaaggctctccctctgcggagatcatagagatggcccgaatagaggccgaagatctattcgagatcaaagcccaaatcatccaacggatggctctatatgacccaaccggcgattggatggcgcgtggggctcgggccctcgataatccgaggaccactagtggggaagagtccttggagcgtctttatgatatatggaaggacctccaagaaaccgggcccctctcggacgagttttctcgtttacaagagaaagtattcctcaagaaaggcggccctggggggggaccctatcgcataaggtctgcaagcctttcgggatgggcttttgcttctttctttatttttcgatatgccgcttcttcgccagcaaggagcgagaaaacaaagtgggctgtaatgatgtcagaatttgcaccaatttctatctatttagtgattagtctgctagtttctttgatcctactcggtgttccttttccatttgcttccaatagttctacctacccagaaaaattgtcggcctacgaatgtggtttcgatccttccggtgatgccagaagtcgtttcgatatacgattttatcttgtttcaattttatttttaatccctgatctggaagtaacctttttctttccttgggcagtacctcccaacaagattgatctgtttggattttggtccatgatggcctttttatttattttgacgattggatttctatatgaatggaaaaggggtgcttcggatcgggagtaaagtgatagggcacaaaatggggggaaaaagaaaggaaagagaataatgcccacgtttaatcaattgattcgtcatggtagagaagaaaaacggcgcacggaccgtactcgagctttggataaatgtccccagaaaacaggagtatgcccgcgtgtttcaacgagaacaccgaaaaaacctaattccgctccacgtaagatagccaaagtacggttgagcaatcgacatgatatatttgctcacatcccgggcgaaggtcataattcgcaggaacattctacggtgttaataagaggaggtagagtgaaagattcgccaggtgtaaaatcccattgtattcgaggagtaaaggatttgatgggaattccgggtcgaagaagaggcagatcaaaatatggtgcagaaaaacccaaatcgatatgaatggaagatgcctctggaactagtatcggtcagtcggtggaacaatcacaacgttacgccccaaaataaaactatatggagccgttacgaatgaccataatggagtctactacactagccaagaaagagtgcatttgactcacttcgcccgtggaggtggcagaggaagcctaaggcatgcccgggctagtgtaactgatctcgctactcaatccatatcgtcagttatatggttgcttcatccaagagagggtaagaaggttcgaaatcatcaatgagagcaggctatcgcttcctccttaccctctcatcgactgctggtagttggctgacttggttgatggctttatgtcatatgtgtgccaagttaggaaggttagaccgactaattgaaaggctttttcgttgagaatagtttgaagttcccttctttgtagcattgtaagttatttccttctttagcttatgaattttttttagggaaaagaatgagaaaagtgacagtggaaggagggaaagctccttattttacccgttctaaaagaagctcgattaagcaggaagatctttggtctcctgttctctagcttagtcagttagtggtatccgtcggtcggttagcagatttgcagatagaaaaggctagccagcctaagctgatcccgaggaaaggggctataggattgcccacgacaagcattggatttattttttgatgatctccgactcctaagtcttccgcgtgccttattccaccctcaaaaaacgattttcgtagtttatcagcccgtcttgcctcacacttctacttcaggagcttgccttgagggtacgatgacgatcttagtccgaataactgcttcagggtgggaatgaatagaaggccggtgctaaacgcccaatgctatttatacgaaaagactgatcgaaccaatgaagtaaggctttttaacactactttcaaaggtagaggcaaaaagcccactttttagcgacatgatagcatgaactcttcccccgatgtaaacatttcctgcctaacagatttgtagacgtccaggaagcttaagatcttaacaagaaagatataaggcgatggcgtcgccaattgcatgaaagaaaggccttttaggggagttggctcgtgtgtggagtgaattcctctgtcctgtgtgcggaaggcatatgaagtagtccagtaaggattcaagtcaggttgtatttggattttgcaactcggaaattatcatagattgatgatcctttccttaccctactgcctatcaacattaaaaatatgcaaaatagcccttatataaatataaccaacccgatctacgagtggatattgccttttttttcatcggcgatctttcatagagttgccgaagccagaaaatctgctaatgcaatccgcagaattacatcagatcaaggtgtggatctatttcgaacaagtgatatccaagaagaagccattcgttacttctccaacctgtttcagttttcaccggtgaaccacactcgagcctctatctcatcccttcgctctcttatcgacttcatcagatgctccaactagatgcaagcgaatcttctgcaacaggttaactacggaggagattccaaattgtcttttcagcatgccgctcgacaaatcccctggctcggatggttttccagctgacttttacagattaacttgggatattgttggcccggactttgttgttcaaactaaaagaaagaacgctaataaaataaaggtccgatctgatgtttacgatttgttgtggttaatcttcccaattgactaagtgcaagttagaacatggtagcttctgattcacggccaatgagactccgcttgcgagctgaactctttttggcatcattcgcagtgagagaagagagcatacgcagtgaagaagggagtggagcttatatttcaaagtatattaaaggtattctaaaatcaagattatcccgacgtgagcagtcacgctggaatataatagatgatacaacttctatggctttctttgaagaatttgcgtctcttaatccagtttttcatactttcttattttacgggaggagagacggagaagatctttcttttcacattgttgggttttttcgtctatcgatacggggttacatattctttttatgggaaagcttttagctaccgaaaaggatccgagcaagctcatcttctagaatcaaatcacatcgaagaaaggtagcactggaagggcagagtactcaatttttttatctttgtgcaagtaatgatcgtgtcagcatcttttggttaactgattcagttaccgatcaatctggccctaggttccctagctccaacgcggaaggactctcatttcgtccagatctttgctttgcggcatctccaactgtaagctctgatggaccaacacttatgcatgcgatttcaagtcttcataaatgaaaaagttcgagtcattacacaagcaaaggatagctataacgagaaaaaggtattttattttgctaatcccaaggggaatgtgaaatgtggaatgaatcaggaaatagccctttgatttatcaaaaatacagaagtagtagtcttcccgggtctcactgttcggataactttccttttaatcctactgcataggcaagatctcatccttcggcgaatcatgtggggctcagaagagtgctccctacgacggtaaatcggggcaaaagaccctttcttcgacgacgtggacacggggagggagcaggcgaagcgtgtcgttcgtaatggaaagaaagagaccactagttcgcctctttgttggaccgccggcgcgaacacagtggtctctgatcaggaccaggaaccaattcgaatttggatcttgacatgttggtggtttttaaccgtaggcatcttgccaggaagttggtgggcttatcatgaattaggtcggggtggctggtggtttcgggatcccgtagaaaatgcttcttttatgcctcgggtattagccacagctcgtattcattctgtaattttaccccttcttcattcttggacctcgtttcttaatattgtgacttttccatgctgtgtctcaggaaccttttcaatacggtccggattgctagctcccgttcatagttttgctacagatgatacacgaggaatctttttatggtggttcttccttctaatgaccggcatatctatgattcttttctaccagatgaagcagcaggcatcggtccgtagaacgtataaaaaagagatggttgtggcgcgaagtactcttgtgcatctacgtcactcggctcgcgcgcaaccccgccccgttatgttatggaagaattgaacttcttgctgggctggttattcagagccagcaattggctgccggatttcgtcctgcaatgaggcagatcgcttcggggggtcactgtggcgtggctgaatgtagagcagtccgcccctacagcgtttgatcagtagattatttagaacttcggaagatggtcaaggtacgaagtgacaagccactgcgctagatgcgcatgtggtcgtagtagtcggctcgtcgctacttttatccaaagaataaggcctacaagctctctgtttggagacagaacaacgttataagttctgagtcgtatgaaaactagcggtttgggggaaatagcgatttatcaataacatagaataaacaagcttgcttggcagactggaagataaaggcaagcagcaacatagagtaccttgacctgctcgctggggacataaggattgacatgtgccgagacagctgtcccgcggattaaggaatccgcaaaggctaatgccataagacgagcaagactaaagaaagagaagatcggtcctcgtccactcggaaagctttttctcatcatagggggacggagacggttagtcagcattccactaccaacgagcagcaaactccttgcgactctaattgagaaaaacccaacaacggccaccctccctaggtgtaagataatagggcttgatgcctagcggcttccttttacgggttgtccgatctcaaaggtttacaccttttaggaatgaatgttccacgagtcgttatgctttgattgtcgtctttcgaatgaaggatttgtctagctaataaacatcatccttcagtccgcgccggcattccagaacgaattcttatcgcttagcacaagcgctaaccctgacaaggccctacatcgcatatgcagttggagtggttagtcgattcatgcaaaatccaaagaaacctcactttcgacgaatattgaggtacatgaaaggaagacttgactatggtcttctgtataagaaaggagaacagtgtaagatagttggctattgtgacgccgactatgctggtgatcacgacacgcgtcgatcaacaactggaaacgtgttcaggcttggtttaggagcagtttgtctttgaaaagtaagcggtgttttagccgtaacccttgttggaagagaataccacgtaggagtgaaaactcccctgctcatctatcttcattccaaaggcgaacatttcaattgagtgactgtaactgctatctatagtttacagtcagtagttcttaaccaaccgcccagctttataaagctttaagagggaatagggagtaagggggaccttcgcttcattatcaaattgacctggaccctctttcttctcctgctgcagattttgccctgcgcggattctggagcttcttctttagtctaggatttcaaataataatcaaatcaaaagaagcggctgggcgagaacaagaagcggtcgtcgtacgccggccggtagctctactaagcgaagaaccgctcgctgccttttcttcgcgaataaccatgtggagtggaggtagcctaggagaagagaagcaagctacccttcgcctacctcccatctataagcggcaatggtaagagctggtaagcatggtaactgtatcggctaaggggtcggcgctccgcgttctatctaggttccgctctgacctttccccacctcacatagaagaaggggaagcccttcaatagaagaacccgtgtgagtgggaggattgaatcattcattcatcggatacgtcttttcccgtgatccatttcatgtcaactctaattagttatcaaaaggcctaccttacaaagggaaacggccgcatcggcccgcttcgtcaccgtcggttcccgcaaccaagcctttctcttattctttctttcagaagggcttgcggttcattacaccaaaggctttcagtgaactattgaagctatcgagagagtaccaaatgctgacggtgacgaaggttaccgactttcggtggacgcggagccaacgagttcagtcgaagagcgtaacgagtctaaggttacagaagcgttcgccaactttgataggtatagcattgcgagcaaatagagagcagagagcttaccctttctttctatgagagtcgcgagcttgttgtagtcggtcctaaagaaccttgctgcttacttgctatattcccgcgttcttgcacggcttgcgcgtaaccccgccctgcttctcccttccccctcccccccttaccgtccaaaactcagaggccgtatggagtatagccaagtggtaaggcaccggtttttggtaccggcatgcaaaggttcgaatccttttactccagattatgaacacccgatcggatctgtcaagaacgagctgacgacggaagctctcattaattagttgatgaggggaagcgactgacagcagtccctgagctaagccttggaaatcttaatgccataatgcctttaaaatcctcctagccattatcctactgcaataattcttgctaagaagaacgcccatgttgtggcaattccacccattaatagtaatggaactctgtgcaaagtttcctccagtaatatgagttaccaccccttgatcacttatactacccctcacactgatcgtacttccggcaaacataactagttcttcgagtaagattgggttgaagcggaaggatattcgctttattagctaaggctgattgaattgctaactgaacttaactagtctaattccattattctgaccctgcaggctttgatcttttttattctcatcgaaatcggaagatttgaaagcggaaagaagattctagccttccttccatattaaaagatcaaggaagacgagcaagaaaacggatgcgcgttagcgcaacggctttcgctaacgttgttcaatccgttgcttgttcccttgacctttcattcacactctgattgacgctacccggtccactcaaagcttgaaggatgaagaggccgacctctgtttttgaacaagttggtcaaggttcgttatcttaagcattcctgttggaacgactagctggaaaggcactaacgctttgccgagttatgatagggggatgaggagaacagacagagatggtcatacagacttctttatcagaccgactgctgatcgccttcaaacgactcttccagtcgctgacctacctcgaggagtgactctttatatggtgtttagctgagggaaagaaggtgttatggcctgcccgagaaggagattaaggctctttttatggcagtggagaagtggatgaggatgaagtgttctcactatggtgattcggtgaagagggcgttaagcctagtgaattcttgttgagatttggtagaccttgcgaatgtagctacttctgactatgttccccctcctaatccttctaccactactgagcataaaactctatctgtatgtgaggatgagtacactaaattccttcagtatcaagcagcaagtaatctgttcctactgcatcgccctacctttctagggccttgagttgggatacggttctagttccaaacccctctattcattcgtttgtagccgtgggtcacattcattcctgctgtttgtcggtagtcttctcggtttatcctatgtaataagaggtaaaagtagtaggagcgagaccgttgtagctagagcagtcaatccctttatcgataaagtggtaatgaagggtctgtagtaagcaaacccagtagctgctcttagtaagaccagtcacagggatatataaaaccagagaaaggctgacttctatttcaactgaaacaggcttggctggaagatcttttattaagtcagactggctagaagcgctatagactgaccgttagaagtcattgatagggatgttgaacactatcaattacttctctttagtaccggtataacatcgactactaaaagtagaagggaagaaaggttatccagccacttcttttggtccgggataggaggcttgttgaatcagacgaaataggacatcggtgccggtactcgattcgaagcatggctggacgccgcactcctggcacctaaaggtgcttttttcgcgtactctttttttgtgatttcccggtagggagggatgtttttagtacagatcttttaagcgaaccactagaaggagtctttgattgaggatcatctgagatggatgagccatctcctttccattgccagtcaagcctgccattcaacaagccctgttgtggtcatcagactttattataaaataagtaacggaaaataatccattgctccgttgactctttcaagcaagggcttccttgtctcagaggccccttcaaccggcttcaaaactcgctattctgctgacgattttagcctttatatatcaccccgaatggagtactcaagttgaaccgggcggacctttggaagggtctgttcgagaacttcacaacttcactctagggccaacctcgaagggtttcctctctttatgaaatagaacagcagccaaccaccgaggttcctcactagatatataggactggtaccttcggtctcttgcgacactccgagcaatgttgccgctctgttcgcttctttttcaatgacggtaacagaccaaccttcaatggcagataattatcaatttgacttaggaggttccgatgcaaaggccacacctgtggttgattgcctccgccacctctctacagtcagtttaaaattccactctcacctgttggtgcttaaactttcagcagcccaaaaaacactcaaaagctccgcttcgaaagcagttgttgttggcataaaggctcttcgtcaagtcgaaccacaccgaggaggcacttgttaaccaccggatggagcaagttcgtgaacaataagaagctaatcgctggtgattctgttgtatttatgaggaaatcggctgatgagatgtttattggtgtaaggcgagcaccaatctctagtaacgtcggaggaacaagcttctacggcggagatgagtactgtagttattatcagagcaatggaggcgttgctaaggaagacgacggaagtgcgaagaaggggtttaggaggactgggaaagggaaattgacggctgaagctgtctctgaggcgattaatagagcagctcagggtttgccgtttgaggtggtttattatcctacggctggatggtcggactttgtggtgaaggcagaagatgttgaggcttccatggctatattctggactcctggtactagagtgaagatggccatggagactaaggactcttcgcggattacttggtttcaggggattgtcttctatacatatcaggaaactggtccatggcgtggatctccttggaaacagcttcaggtataagatccccttcactattcccttaatattcctctgatgttgagctgatgggaaaatatataaatctggttattcgaatgctaatttgggtttggaatgtgaggttccagttgtgtcaagtttggattgctgtgttggggggattcgtggtttgaaatcgaaatatgttgattggaagcagtattagttagttcattttcaaatgaatgccatatcccttagttttgttgtttgagattcatcttcaacaaagatacattggaaaaagaagtcggaagatcttggtcttagtattgtttgtgttgcactcagatacagtaaatcgctacaatctctcttctctcttctcctatccctccgcttgcttccgttttcaatctctcctttctctcagacattacggtctctttctctctctctctttctgagcggtgatcatgctctgtacattctagtatatgttgatgatcttagaatcacatggtccaatcctcttcatattgatgacatagtatgcatcaaaaatgccatcttttctataaagtatctggctcaatcttggtcaaaaagtgagtagaacttctgcttctatctttctcaaaacattactgatctattggtcaaggctggcatggaaataacctctcccttctcccatagtcacttctgggtcctctttgtctgctctgctgttgtaagttccactttgctgctaatcctcatctctatcgtagctagagcattcttggtggttgctagcataaccagacctgacatagcttactcagtgaactttcacaatttctgatgagaccttagatagaaaagaaggtttagattaaagtttctattccttcctattaaacgctttcaaaagattgttgagatatcttctctgaattgtctgcacttgacaccttcctctcaacttgctcttgttttagtgatgctgattggccttcgtgggaatttatagatcactctcaggatattggctttttcttgggagatcctacgggaaaagaaggaaagaagtcaaaataagagagtaagagcctaggttagaagtcagtttcagttctcttaggtctctttccacatatacaaactgagagttcagtctcatatagcatgaggggacatggcttggtaatcgattcaaattggacatagataatctttcaatttctcatattatatatgataatataggcgtggaaaatttattggggttataaaaaaaaaaagaatcctcgtctttacagtcttatcaattgtgataagaaagcgctcttagttcagttcggtagaacgtgggtctccaaaacccaatgtcgtaggttcaaatcctacagagcgtgattccgttgctcttgttaggtcgaaaattagactgaactcaaataattgaacagtaatctgaatttgatctctcgccagaattgatttaaccaatagacatatatattatctttcttacttctgaccagtggtgctctatacatattggtgaatttagatatgaaaatgaaatctcctttatttagaggaccactggtcaacagttccacagaaaatccaattcatatcctaacgcgagagaaattgagacatcagaccagtggtacaaactcaacagagaaagtaatactacctaatatacttcatagttatatcaaaaacctaaacttagatttcacatcaccatatggatcaactggtaataatgaagtattaagcatacttcgtagtaggtttaaacaaagcattttcccatcatctggattaaagtgtttggatactactggtgattttctcatcaaaaatgttttacataaaagatatgaaagtgttcagaagaatatctcaaatgcattatcatcctccataaattctcgcactgcagtcttcttttgtatactgttcagtataacagtgttaatggaaatagctcctggacctcttttgaagaaaccttcattattattttcagataatttaccaaatgtattgcaatatacacgagatgtgtatgtgaatcatgtttgtataatacacaaaagtttaagtccatgtgagtgcgaggagcctctcaatcaaattattagagatatgtttccgcaaaccacttttgacccacttgaactacagaaaccttcacccagtaaagtgaaaactataacctacatgcttggtactattcttcttgtaattacattaatggataagactggatacactcaattagttaaaatgtagatagaatgaaatacacattaacctccttctccatttactgttctttgattctaacctccttctccatttcccgttctgtcctagttctttgtttctaacattcttagcttaccgagataagcaattccctacctagaaaaagatgatcaaaggcattgaggatcaagctatccttcttttgctgttgaattgaattgaattatgttttggtaaggacatcagtattgatcctcgtctgatatagagactttcaggttttctagatcagctattatcctttgaaactcattaacgtcctcaaactaaggaaagaagtgctcagtgagctttaaatgattgaattggactttcggtcagaagtgagcctaagctttgttgtgagctgtctcgtttccctgtactcgcattcgcttacatcaaaccaatcaagctaggattcttgtgggattgactcctggtaaggaaccgtctttacatctctaacttgttggctcgttaggaagggaagttaaagcttgcctgtaaggggaaggcaagctctctaagcaagctgttttcatgcctatactagctttctttgtttgacaggttgggggaatacccaattcaaagagatcaagcttacactgcacagatttgaccttattaagaaagtttccgggaaggggtagaagatgctagatgtttccctagggtcttgactagttcctacttccttgcttccagtgtagaaggtgtagctggcatactggagtcaatatcttagttcagttgttgcctccggttgtcatactggaatgagtcaatatcttagtatcgtctgtaatgtggaagaagtagctagatgtcttccctgtggttctctgctagtggatacttctctctagcggtgtatcgggtgttggcacttcggttgttgccagtcctgtcatttcctagaatatgtgttagtataggctggaatatgtaagtattgtctagaagttccctgttggtcccttactagtctgctcttctttgttccagtgagttctgtcatgaagtgtagctcatgttaggattacccgggaagcgagcttgtcgacgacgacgggtaagccgtgtgagcggttaagggttgcttgttgctcagctgtctttagtcaatatcttatgaatgttccggtccagggaataatgtgaatgtagctagagtgttcctaaggtgcgtgcatactagggcttcttcctctagttaccgttgtagctgaaccagcacttgcagctgtatattctgggcgaggagcgtaagcgacatggcatatttgtgaaagaatctcccttctcttcgttcggactagccatgaataaccagttggttgcttccagtggaggaacccctgttcatgcatggcggggcccgggatcccttgctgctgcggtaaaagagtcttccttcttctgggcggaatgtgtatgagtaggcgtgaagtaggcgaagcagtcctcccgttgatacgtgggataggagaaggggtctaccactttatatcactaagttccccctctccgtcttgcaggtattgtttctgggttgtgtctgcttcccgctgtgcagcttccacttcctttctttgttctctgggaataagtagcatgaagagttcatctgttgtccgtaggtccctggctgagttatcatgtgtagctaagtacgatctgcgttctgctgtcagttaataatctcctcctctctttgttcggatgggaactattgtatctgttgttaacccttgtatctggctacgccgcccttagaagcagagtagccagtccagtaggtgtagttagttatctgttcaagtaggtaggaggaacccagcttctcctatctcataggaggaacccgtagaatcaatatcttttctttctttccacagaaggtcagcggtcatactcttcgtactgttgttagctgttcctgttccagacgaagtaaggtagccggctcagtctcttactcggagaggaacgcctactactcgactaataggagaggaacgcctactactcgactaataggagaggaacgcctttgacttctttctctttcgaaaaaaaggaatgtagttagcctaatcactgggatgatgattggatcagtttagctactctgttaaggtctacatcaggaggttcaactaagcccgcaggtatatttggcaggcacctgaagcgagttgactctagctaggaagttcttctctggcctgtcacctgagttagaggctaggctccgaagccttcagttctttagtctccctgagagttgttagagaaggcagcattggtcgagagagtgtgagcgaagcgtagtagcgctgctataccgagaaaagtaatcaaacctaaatctaggaaatacagctgggtgtgctcatgttggctaggtagcagggccagacaatccctttactttcactttcgtgtgtgcgtactattaagagttacgtgtgtgcgtactattaagagttaggagtataccagcacagagagaggagtgtgcttcaggtagagcacagaggaggataacagttaggagagttaggaaggagtaacccagcactgtgctagagaaagcagaggagtaccgagaaaaagcagcagtgtgctgtacagagaacagaggaaaaaaaagttcgcagcaaaagataaaacagagacggaaccttccccccttcatgctgtacaaaagcggccagcacaaggtcaaggcgaagacggagcagcactacctggagatgatcctggcgaagaacgaaccattaccattctaaggagggggaagcactactatatatctctttcttaagaagctatttctaagttccactttccattaaccgaagtctaatgatcgcctggcattagcgccatcctaccgtctcgtttatgagcttgcatcttgtacttctcctgcctctgaaggaccggaccaatgatagaccatgggaaacaggaaattgaccaatgatagttactcggaaactgggaataggttcggggtctagctatttaccatagtaagctatccttaagggcttcgatcggtccatatcaagaaagtcattccgcttacggctagcgagcactttcttttggtgaatatccggcgaatgaaataaccattgtaaaagctagagatgaatgcccagcactctcggactgatcatcttgctgcaagaaagcttcaggtcattgctggttcgtatgatccagcttccagtacaaaggcaatgtactaagaaagccaaacttggacaggggcccttacgtatctaagacatagttcgtggcatacgatcgaagaaagctgggcggaaagctcggacaccaacctcaaaaggcggtgttgaccctgttacagtacagggaagatccgtttagccaaaacgagaagatcttccatagtctagttagggggtggatttttttcattcctcaatgggtgctgcttttgactgctatctcgtatcgatctagtattgcggcttacgctagattgacacctttccttgaatacgaataaacgtgagagccaaccccataggtatgacccaggagggccaaaagtggcatttcttgcttcttaaaaagctgattgtgaagagggtctgccctttgaatctcctcgagccgggtctagtcagtctttttccctcgccctggggaatcgtagctctgtctctgcctattatgctggtacctaagaaggaatggggcgaccgaccccatgttactaatcgaaaacgttcgtttcgagacccccatgtgtcctttgatgctgactgagctaccgaagcgatgttcgttaggattgcaagacacgtcgttttagtcgggcaatatccgatgtcggaagaacaagaactgaataggctcgcagacctggtaccttaaagtcttcaccgtttgagaacacccgaatccgagtggcttagcaagagactctaagacagatcatccgcgccggaatcccctaacttcatttttggtattcccttttcgggttctagagtcgacaagcccataagacgataccgatgcccagagaccgaacacagacttatctttcccatatggctctataagacatccatggaatctttccacccccaacatctctattctttctattccgaatggcgcccagtatttttaagtatggttgtatacttttcctgcctggaactcctgaattaattctttttctataggaaggaactcaagcaatccggcatccccggcagctatgcaattacttaattcagtctacaataatttggtgtccgattttcggctagtggacagctataccaataatcctgtatacagctgtataatattttttataaaggattatcggtgagcaagaattaaaatgtagttttgagtttcgttagttaacctacctttttcttttggtggtgagtttccttttagggggttacgagcctttagcattcagattgggcaatgcgagatagattgatttacatttacctcgaggatagtctttcttttccaagcgcgctttcccaacctgccatatgtccgatacatagtcgagggctctatacgagcgcctttctttcaactctatctattcttgcttttcaaacattgtattccttatagaatatcatctcatgtctatctatagtataacgtttctcatagtggcatagcggctccgaggtgattctttctggtatccgtcctctctcatactgctttaaggttggaggatttagttcaagctagtctcctatggtgaagatctctatatttgttaagactgtatgaaagaaatcacatatagtaatcatctaagaatatatctatactataatggttgcatctaacatttctcatagtgtagataaggcagtccccggagctaagaaaactacgctattcaaagcaatccgcccaaggaaggctagctagtcgagtctaatgctaggctaggtgattcctctctatcaatgaccgaagcttaatccagagagagagctcactataccaccaggttgccacatttgcttatgaaacaagaacagcttatcccgaggctctgaaagactgagggtagtcactcaaaaagtaatccgtcacttcgcccgaaaagcactataggggattccggccaagcgagcataaaaatacaatacccaactttctgtttcagcccactccacttcattgaccgagactttctatttcgaaccggttcggttaaagacctagccacgagaccaactccgggctgtctcgtaaaagatcaattcccagatgctcttactcgacgcccacaggcaagcttgtttagagaaggagagttctcttcatcagggaaactgctcaacctccactatttccataagcatgattatgcactagcagacataaagtgccaagaagagaaaacgcataactcataagccaaagatgtattcgatcctgaattgaacgtaattttttccgattggttggaaggtaaggatagcatgattgactggttgcgggtcccttggatcatgggccacagctatttggatagattcagatcctttcatgtagtagagtctttgatgggctcggatccttttcatgatttcatgtgaggacacctttggcgggcttttttgatagatccaggatttctgtgcgatatcgatcttctctttatggctttggttaatctatcgtctagctgtcttggtcttccgaaaaggcgaagacaaacgcatggatttactttattctatgactaaaccagaatcaccccggagtgagctgttccataaggggctcatattatccgacagagcagagctatcatgccgaagaagcctttttctttctacgccccggtggcatcttgactttcctaggtctctaatagttccccataaaagagtcaatgggctgagctgatcgagtcccattttctggctgcaaggcccggcccgagtagtcaatggttgctaccgctcactgcgcttctctgtaccatttcatttctagtcaaaatggatgctgggcatatctactgacccgacaagctgacgtaattctatccatccgtagctgtctgtgccgctacctctatccagcagatccagtgccaaccgatctatatctagctttggccggccgggccaacccacctatacagagttgatgccatgcccgcctaaccacgaaagaaagcatccaatatttcaagactttctccacagagctctaaaatcctttctccgaagatccaggctcactttttcaggcaatggaatgacccgagcaaaggaaagggatcaaggcaataactacgcgcatcaaggtgatacctagaccgagcgaatctgaccgtagcctatcatactgagtgaaagcgtgccgaaccaagggaacttgcctttaatcttaggctcgcagctactaggtgcgtacccttgaacctagcccgccctagggtacaggcattgaaagacggctttcagaataggcttttttgtacgaagagaaggttacactactatataagataagtaattcattataagataagtaattcattgtgctaaaagaaccactttgaggatcaatcccttactgaatgaatgtccttttgatcagtgatcacagaaggagaaggcactgtgaatgagaacctctttcctttctggctaccaaacgtgctaataaaagagcttattctgagtttgaattcctcgaattctgtaagctagcttggtctacctgctttgttctgatttcattgtattcctccgtattcagcattcgcgccggtgtcacaaaaagcaaaagcatatcaattcgttgaggcaactagtcttggtaaggttttttccactgaatgagaagtttgtatgatccagatgttttgaaggcgtgtttgcccctgtgatacgcgtacgaggagtcgacggggaagagccgtgctggggttggaagaggttccagctttagaggagcctccctatcttatcccttgttggtcttatttgacagctcagctttgtctcgggcagattttggtccatgatggactctttttatttattttgacgattggatttctatatgaatggaaaaggggtgcttcggatcgggagtaaagtgatagggcacaaaatggggggaaaaagaaaggaaagagaataatgcccacgtttaatcaattgattcgtcatggtagagaagaaaaacggcgcacggaccgtactgaagttttggtctttggtttgctggttacacgtattatccgttttgtacattctgttttgtttcccatcccagtcttttgcagcataaaagtccttttagattccttttgttcgcttcctattataaacaaactttccaaaaaatggcaactgatttggttttatgttatttcagttattctctgtaaatctttatttgctgtaggatacttgtggatggacgacttaagtcgtgccatttctcagttctacccggtggtatccggaggactaggaggaggaaatacgccaatgcccccgacaaatccatctgagggtggtcttttagaaggatattatgctcatgagaatgagcactctcacgatcagcagaggggttcacctttctggtcgaaagagtacaaggaaagtggctcaaaacgccttttcttgaacctcgaggtagaggatcaaaacacagataccatcggggagcaagtaaaagcagagagtgataaatgcgaaaaaatcaaggcaaaaataatagcaaaaacacatgaactcttagtatccgaaggttaccatattccggatgaacgggatatagaacgagcaataaatgttgtgatgactgaacatgaaatgatcgatatcgatcggcgtaagaaaagattctactatctttattcccggttaggaaaaaacggagacaagttttgggtggagctactggaattgctgtctgactacgacataaataaaagcgattccgacgactaaaccgccatttcaggtttacgtcttttgttaggtctcgacttcttcgctatgatcttcccggtagttcatataggagctatagccgtttcattccttttcgttgttatgatgttccatattcaaatagcggagattcacgaagaagtattgcgctatttaccagtgagtgggattattggactgatcttttggtggtgagtttccttttttctttttttcgctatgcgccgctccgccagcaaggagtgccacgcacaagcagagcgaaaacaaacaaagcaggggagggggaattattcgttgggggaaatcctttgattgcgtattatagatccatgtctttcttgttccactagctaggacaaaatttgcacatgtccgtttcgttattacaaccttcttttttgatgtcaaagaccagaagctacgcgcaaattctcattgggtcttggttgttcttaacagcgatggctattcatttaagtcttggggtagcaccactagatcttcaacaaggtggaaattctcgtattctctatgtacatgttcctgcggctcggatgagtattattgtttatatcgccacggctataaacactttcttgttcctattaacaaaacatcccctttatcttcgctcttccggaaccggtatagaaatgggtgctttttttacgttgtttaccttagttactggggggtttcggggaagaccaatgtgggggaccttttgggtgtgggatgctcgtttgacctctgtattcatctcgtttcttatttacctgggtgcactgcgttttcaaaagcttcctgtcgaaccggcttctatttcaattcgtgctggaccgatcgatataccaataataaagtcttcagtcaactggtggaatacatcgcatcaacctgggagcattagccgatctggtacatcaatacatgttcctatgcccattccaatcttgtctaactttgctaacttccccttctcaacccgtatcttgtttgttctggaaacacgtcttcctattccatcttttctcgaatctcctataacggaagaaattgaagctcgagaaggaataccaaaacctagttcactcgctctctttgcatccatggctgaatggttaaagcgcccaacctaataaagaggcaagtaggttcgattcctgctggatgcacttggaacgttcagttcaatcgcagctcacagaatctaaagagatagctcgcccttatagcttatggggcatttcactcgctcaacactcgttcaaaacatccactcgttcaacaggaaagaaaaggtccaaaggatctacttctcaggatggaaagaagcaagaaagtctagagagtcgaaatgaccttggtccaaccatagtaggactgattcggaagattctatcctattcttctaaaaaggagttctctaatttaactggacttgaaagcggtggatcaagcccccctttttctttggctgtgtccaagtgaagtgaaactcgggaatgaagcagataggtctcagtcgaagaaaggtagccctattgggtctgggattgcttacctttctttccttctacagtacgccttaggttattctaaacctccactctcagtctacttttgaatcgattgccttacctataccgaccctactcaacaggggccgtgaactatgaaaagcctgccaggcagagaaaaaagtgcaaaagcgattgaacaaagtcgctccggtttggatgcagatgagggagagggtgaaagctttcatttaaaggtaaagggaagggaggaggacaagtagatcttatcctgcgtgcagtaagtatgaagaagagagccaggtcactagctaggtaagggtctacgattgctctgcctaccataaataattttaattgagcctatactctttggaaattactgaaagagaggcctaggattgctcacagatctgcttaaaggaacttaagataagtgctggacatgctttgttgaggggctcaaccaatcaatagcttcgcttacttccccagagtcttttgcctacttattgaccactgactcctagatcagctaacgactcttttgaaagcatacagatccccaatgacaatatcgtcacccgtgggattgggggctatgagttgaactatgcctgcaatccgttgacatgggtactattcttcagggactatcccacatcgacgacaactactctcttttctgtaaaagattgctgcttaaaaagaagtctgactcttcttatatcaatcccccttccttctggaatacgacagctactactttgattgaaaaattagaacgactgctgatgtgtaagcgggaggcatactttgatgtatcaagcgctacgcactaacttctgcgtccttcttcagacagaatatccttgctcccatctattggaaaatccactcagagactcaatagttgataatagttgaatagctcctccggtagccggactgtcattcccacttttttctgaccttccggttctgaatccgtaggacacttctctgttctcatgtatacctacacgagatctcgaacttgaaacgaaacatcactctcctctttattttacctttctctctatccaggggccaaactcacactttcaggagctatagcatacatggagccagcagggagagccttcttgaatagcaaaagccttaagcttcagactagttctaaccccgatccttcttcggcggatctgtccttgcctctttcctgatacaaaaacttgcttttcattttatatagatggaaaagttagcaatcctattttccttcgtaagagcacatcttacatcgcaaactttctctttatataccgacgatttctatcaaaatggcatcaatctcacaatgtggtttgagcaattctatgaccagcaaagactagaattcccttgtcatgaggtagtcttaggttcatgaatttttcgggattaaacaatgctaacttccttgctactagctgcttcttaaagtgtgtttgacacccaccagatccaatgaaactcacaagcttatcttcgtcagtggagttaacttgatcaatccacaacctcaaaactatacccatcagctttaccaacaacaaccaatccgtaagtaattctagagactgcccttgtagctttatctagttctggttgaacgagaactttataattaagcctactaatcatacctccaaccccccaacacagggaaaattctggggttccaaagctggcaggctaggttcccgtttcttcctcttcttaaccttctttcccttcacagctctaatgcctcgccagagctctttgacgaactcacttttcagcacaagttcttccaggatcaaaggatgccaaaaatcagatcttattaacttcctcgtggctgatctcgttggtcccatcttctccgcttgtttcagctgcaagcggaaacgtgtttatgaggaagatccttgacaatctaagatccttaccgtcttcctgattccctgtaaacccaattcatgaagctctcccattagcttcagaactctatcacgactgtaaaccttccctacccagtcccactgagcttgttcaggcgataatccacccggctcccacacatggttagctcgtccaggatcgcaaggtcgttcactcgctacacgagcgctcttcagcgacatactatcgtaaccaagatcaagcagaaattcccatgtccgaggtctagaacacaagggcaaagtaggagatcggaaacgcataccatatctcgcagaaggtcgtgtagagccatcgctagatctaaccttggacgagtgagctctgtcacgcttccctggttttcttgcccgagccctgcggtagttgcgcttgccaagaaaccttttcggaccgcgagatcgtcttgcccgaggagtcgcaaaagctccagatgcaggaaatcccttctgagttggaccgctcaccacctgctcgatgaatttcccaagcgacggatctgggtcttcctcagcttcaggatcggcggatctcttcatcgtcgtcatgcgatggaaaaaaacatctgctccacccgagcgagaatccgcctgatcagcgctatatcgttactatccaaacccattgtcgaaatcgtcgttggatacccacagtcagaagaccgaaggctctgataccatctgataagacccgagatggatcttctcggtagaatagagaaagagatgaaaatatagaagaaattgggagaaagcttggctgattcgagacgccactcttccatctttacatagcagcccctcttttttccgtataaccagattccaggttctttccctatcgggcttgttgtaacacagttcttaactccggatcagcttcaacttgagatagtaattctgctgcatcgaaagagggaggaggtgcgaatacaagttccaacagacgctcaggttgcactcgtcttgacaacgcatcagcagccttattttcagttcccggcttatactcaatgagaaaatcgaagcctaacagtttggtagcccatcctctgttgttccttggtgacaaacctttgttccagcaagtgctttagactcttctggtctgtgcgtatcgtgaaacgttgccctgatgtctccaacgttggactgccaagactattgctaagagctctcgttcgtacactgatttcaagctccccttttcagaaaacccttggctgagatacgcaacaggcctgttcccttgtaataaaacagctccaattccatttcccgacgcgggtcacaaaaggtagcttcaaatctggcaaggctagaacaggaagcgtcgtcactgctcctttgagagccttgaaagctagtgctgccatttctgtccattttaaactgttctttttgagtaactcggtcaacggtctcacaattttcccataattcttaacgaatctcctgtagtaccccgtcaagcccaagaagcctcgcaattctgttgtgttctttggttctggccaacccaccattgcttctaacttagctggatcagctgacaccccttcgcccgatataatatgtctatgtcccaaatatgcaatctgtggttgtccaaaagcacacttctttctgtttgcataaaactggtgttgttcccaaatctggagcaccattcccaagtgattcatgtgttcctccgtgcccttgctatagactagtatgtcatcaaaaaataccaacacaaacttccctgcggaaaatatcgttcatcacggattggaatgttgctggtgcgttggtaagcccaaatggcatgaccaggaactcatagtgcccttcgtgagttcgaaaggcagttttcttcacgtctgtggctcgtacacgtatttggtggtacccggatttgagatcgagtttggagaatacagaagctccttgtaactcatccaacagttcctcgatcacgggaattgggtacctgtctggtaccgtgagcttgtaaaaggctcggtaatccacgcgccgtaggccatcctccgtccttcttttggacgagcaaaactggacttgaatatggactgatgctcggctggatgatccgtgcttctaacatctccctaaccaatttttcaatctcgtccttctgagtatatgtataccggtaaggacggatgttaactggttctgctccttccttaaggttgatagcatgttccctgccacattttgggggtaatccttgcggcatctcaaacacgttttcatgccattccaacaactgtttcacttgagcatcctcaggaaaattttgagtcttaattcctcctgcaaaacagtgcggtgagctctaggagataataagccttccttccctctttgactaccgaattgagagagatttgagctcgcaccagtgacggatcgcctgctaaggtgacccactgatcttccctacggaaactcaaggtgtgtcttccccaattcattctggtgtcacccagagtagccaaccacgcataacccagcactatatccatggttacaggaagaagtccgcacgtatctgcacatcttggaccgttagctctactccgctgcatttcccggcacttggaacgacttgaccatttccaatagaaaccccaaatccacgagtttctgtgatttgcagaccacaccgatgtgctacactctctgctatgaaattgcttgtagcccctgaatcaattaaaacaatgacttcttgtcctgcaatttgtcctctcatcctcatggatctctcagttgttaaacctgccatcgaccgcaaagacaaccagagtaattcctttacttcatcctcatctgattcttctatctttttccctgtttcagcttcatcagcctcatccaactcatctccttcatccacagccatatactttaattctctgcccttacatctgtgaccaggattccacttgtcaccacaacgaaaacaaagccccttgctctttctatcctgatcaaacggtttccggtatggttccattttacgttctggggatcgggcgggcccggtgaagaagcattggatcccagagatggaatgggaaatggagatgttgaagaggcgggttgattagttctggttggagggctacgaactccttctcattgttccgctcctcttctcttctttaatggttgaccaggcactgaaggtcgatcatctgtgttcacctggtatggatataattgaagagtggaggtaaagggctcctgtcatccggcaatgcaagacccactccagatcgatgcctcttggtcagaccatttccgtatactgagattgacgacatagcgagaacaccgagatcattccgtaagagggtattgcagtggttattgaattgtcaacaatcctctcttcacatttgctagaaagaattttgagggcttctttggagagtgaatagctattctttttctcacatctcgatttccgccttctttggaaagataagagactttgctgctctcctcccaccttcaactaaggtagtcgcttagctaactaaaaaagcatcctctaacgagcacaccactgtatattttttttatttagataccctcaaagcaaaggtgaggaatagggctagctaacaagtaaacgagagacgtaagtgaacgaagttggcatcttctagctaagcaagcaaataaacaacttctctttgttgcgaagtgagccaggtaagcaaggaagtaatagaaagactctcaagtgtagctctatctaaacgcttcagcaaacccttgcgagcccaagtcaacttcggaccaacgaacttcatgtcatagagactagaggaatggaaccaactcaaacgacacggccgattaccactagctgagccaccccggctatctgaactacacagaatggaatgaaagtccccccacctattagccaaggatcagatatcatagatgccaagctactcaactgctcccagagagcacgccgcaaagtagcattaggactagcatagactgccgttacccaggacagaaaagcattattccgataaacactaaaatgaacatactggcgatgaacaatcttcacctccaactcagctttccaaagaagccaaatccccccagaaaaccctctatctccaagcccctttactaggttgggcaagcttggatgcccttactcccacaacaagttgctggtcgggatcgtgaaactctcgctcgaaaagtaagctggtccttgtttggtcataaggataatcgttcttattaggttaggggcggccggtccgggggttacccgcgattggtaatggcataagcagaagagggatagggggacaaggttacgcgctgggtagcgcagcgcatctgtttcgggtacagaggcgacgagggcgaagcaggccacccaacccaacaggtcagggttgggccggccataggttcgaatcctgccacctttcttgtggatcatcctgtggttaccggatgatgggaataacgaagcagaaatcttgaaatgagcacgaaatgtcaatatcaatatatgaattctttcattattcgttatttccgggtcttttcgttgcattcacttacaacaagaaacaaccaccagcgtttggtgcagcacctgcattttggtgcattcttctttctttccttggtctttcgttctgtcatattcctaataacttatccaattacaacgtattaaccgctaatgcacctttcttttatcaaatctcaggaacatggtctaatcatgagggtagtattttattatggtgtcggatcccaaatttttatggattttttctttgttaccggggtcgaccccagagccataatgtcttaaaacaaggaggccatagggaaagtcttttttttttttttgtctcgaacttcgtgaagaactcaattttatctctccctcgttacgaacaagaaagtggtttgaaaaaccagttgtacactcccttcgttctacgaacccttgttgattctgaacttcgttcgcgaaggaaccggacttttgacggaccagcccttttttatgcgccgctttatcctgaaaggaaaattaaaaatcctctggacgcttggcgctcccgtggttcgcgagaaggaaaaaggactcatcctttgttgcatctggcacgagatgataaagagagagcttcgtctatcgatgaacagcgaattgacggagctcttggcattgctttgtttttctctcctttcctatcagcgagttccgatccttttgttcgaaatttctttgtttgtaccgaaccgcttgcagaatcaaatcctgttccacaagatcctatatcagctatacatcctccttgcatttatgccggggacgtcgccagtgcggagggctttggcttatgtagatcaaaaatgatgaatgggattgtggcactccactcgccgccaatgcggaaggatgccgccgaaaagaatggaacgctgcttcgctctgctggatgcgtcggatcccgtataacaagcgagctttttaccctaaaattcaaacatgtgggcgcaaaatgctatcctgctctattgttacgtagcaatagaagcccgctcatgctgcttcggcggcgctttttcgccttctcttcgttctgggcaggagcgagaagccactcgactaaaaggtactgacgtaactctcaactaaaaaaaggagaggaaccctaatgactcgactaaaaggagaggaaccctaatgactcgactaaaaggagaggaaccctaatgactcgactaaaaggagaggaaccctagtgactcgactgaaaaggagaggataggagcgctagtggacacggggagggaaagaagactggaaccgtgcatctttgcttagcatggttcgacaaaagaaagaggtggaaaatggaccgagaaaataatgctttgtgaacccaattgctttgacaaaaatatatgaagaatcagtgctattgaggaacattttatagaaagaaaagaaaaagaagcaatagtaaagagagaagaaagcaagacttagaaagaagacaataagtaagagaactacgatttacttgattcccaaaggggtacgtaggcagccaaggacgaatcctggtccagttctttgctagtaagtgaggaaaatatatcacactttttttgaaaaaagttcgtagttaatctacctcggacgtacccatggcgtgtggggttcgcgtggggaaccgagtaaccaaagtcacgatcagtctaaggttgaaatctggatggtctttttgccagacgcgctggttcgagtccagctcgtgacaaaaggctaccctttctcttaagagaatatcgatatcctcaaaaatgagaaatggaaagcagcttcacatcacaagtgaggaagccaccggtgatcagctcaatgatcgtatacgctcaatagaatatgtacgcgcgggcgaaagaattaatgctgcttctgcccgcccctgcttctaagcctttgtcaccctcgccgcctattcattggattaaaggagcggtctgtataacatgagagaggaaacactagacgggaggatcaatttatagcacatgacagtagcatgacggaaggaatgacaagactaagcgaaatgccacctgaaaggacgaaaagaagagactgaagcaaaagccgaaaagaaaagcgtgactggactgaaggaatggagggaagctcttattaacggccaaagctaaactccgcttagcctggacagggacaaccaaagcaggaacttagagactcctagtaatacatcatacctactaaatcagtctattggggctataggtgttcccccggggaaaataaccaatggagttgattacgttgtgagtaaccgaggaaaggcgtaacattccatagttaagggtcgttcattagccctactagtcaagcacgggaagctaactttctatcaacaaagctagcggggtttccgggccttgttttggtccaatgtgaaaagctacatccgaggaatcgtatgattcagatacctgacgaaataaagagagaaaagatcgggatagctgggatgacctatttcaagatcagatgatccaccagcttgtctgcttgtgaggttgaggatttgactgttatgatctcttggcccgtgcctccgtagtgtagtgtaagttcttagaccaagattcgaaaccttgtctttcccgcttcccttcgcaggaaattttttacagaaagtagcgacactgataccttagaactaacaagtaccaggcctagaccggggagtcggaactaataacagcttttataaactccaaatccaactcttccaactccaagttgaacgcaggaaactctacctacaaccctcaattccggaggttggcagctcatcaactacgagaaaaatgtgatcgcaatcaagcacataacattgaatctcgtgcaagacattctttagctaagtctatagcagctgattcaatagcggatgtggtcttgttgaaggctttttgacttctattgagagcaaagtccttacttaccagaccgggctacttgaataagcagaaagaaaaaatgtcacgaacccaactcctaggtcactaggaagaagaatggagggaaatagaagaggtcctgtaaagaagctttcattcgatgcttctgattcaactcccagacaaacaaggaagtatgcgcgaagatagggttagtccctgcggcaggcattatccgggaacgattatccaggaacttacagaaggttggcgtgacacgcctaaatccacaacgcttcaggcgaagagatatatctttccgctttagcggcttgaacccttcgatcaagagataccttaaataaaatcaactaagtagctgacctcttagacgttcgtgggtattcaaattcatacataatcttctccgacatgagatagagtgagagggcctggcctattccatagaacaaactcagcaaatcttgatccgtattccacctcagatggtagaaggggcaactcagccttgtctttttctttgggctaggaacccaggagaatgttcaaagcgataagagaacaggtcttttcagagaagctcttgccgctcttctgttagagctctttagtcccattcctaacaacaggggactagctacagggaacaagggaacaagggaacaagctacacaggcactagcaactgggaacaagggaaacaccaactcccaacttccctagcccaaccttctcaacttccctagcttgcctggcccaaccttcccttcctttcctcacatccctaaccaactgacctaatccaccttcccctaacccaccttcttctttactaaacagagaaccagacccaccttcctctccatgttcttctacttccctctcaaataccgctttcttcatctacagttcttccactacctcaaaaccactcctctcaccccatgcttaccagatcaaaggctggcataaacaaactaaatcccaagtatagtctcactattactaccactattaaaaaagaaccaaaatctgttatttttgcccttaaggatccaggatggtgtcaagcaatgcaggaagaacttgatgctctctctcggaacaagacttggatacttgttccacctccagttaatcagaatattcttggttgtaaatgggtcttcaaaaccaaattacattctgatggtactcttgatcgcctaaaggctcgcttggttgctaaagggtttcatcaagaagaaggtatttactttgttgagacctacagtccggttgtgaggacagccactattcgtactatcttgaatgttgcacaacagttagaggttggccaatcaatcaattggatgttcaaaatgcatttctccatgggtatcttcaagaaaaagtttatatgcatcaatctcctggttttacgaatcctattcatccatcccatgtgtgtctgttgaaaaaggctctctacggattgaaacaggcgcctcgtgcttggttcgacaagtttagcgattttcgattttcttctggagtttgggtttgtctgcagctcagctgatccttctctgttcacgtatcacaacaattctgatgtcatgtatctgcttctctacgtggatgatattcttctcacgggcagttccaacactctgctcaatatgttgatctttcagctcagctccaccttctcaatgaaagaccttggaccagtccactattttctgggaattcagatcaaaactcatccttcgggtctgtttctatcccaaaccaagtatgctgaacagattctgaacaatgcagggatgttagattgcaaacctatgtctactcctctgccccttaagctcaactcctctgtttccactgctaagtatccggatccttcagactttcgcagcattgtaggtgctctccaatacttaactctcactcgaccagacataagttatgccgtgaacattgtctgtcagcgaatgcatgagcctacactcgctgattttgatctcctgaagcgtgtccttcgctatgttaaaggcaccatctttcatgggctgtatattcacaaaaatagcaagctcaatgttcaggccttctgtgatagtgactgggcaggatgtacatccacgaggaggtctacaactggattctgtacgtttctcggatgcaatattatctcctggtccgcaaaacgccagcctacagtgtctcgttcttctacggaaacggaatatcgagcccttgcactaacggctgcggagctcacttggtcatctgcttcgagatctcgggatccctcagcaatgaacactaactgaaagcggccgagaatgagtacctatcccttacgggaatcgaacccgtgtcttcgacatgaaaagacgatgtcctaaccactggacgaaagggaccaaaaggccattcttcatatacctcagctccgagaatagaagtggttgtggattcgaaccactgacacaaggatttacagtcctttgctctaaccagctgagctgaaccacttttccaaaagtctcttcttttcttcatcgaagagcgccctaccttaccacttgactagtaagggaaaagccctttactaatctaattaatagggaaaacttcttcgtcaagctttggagcagctctttcaattgacgactaatctcccaacatgctcaagaaccgagagccgcccagggactggacggccatagggagcttacttatgaagataggccggtcaaacaaaaaaacgcgcaacgggctccccgctcctagtcactaagtagtgctcttctcatttcgcccgcccgtttcacttccgcgccggaggaaatgggattcgaacccatgatacaatcttcttgtatgtcgatttagcaaaccaatgccttaagccactcagccatccctccaagttgttgatcggaattttttgtgcggttggttgcccgaagggggctatctgacccgatcaacttcgtaagccgtagcgcgctagcgcgcgtactcttcctctatctatgagcgagacaggcgttcatcatccagaaagatgcactgacgtcgtcccattgaatgaagatctgggcgaagtccgttggaattagccttgataaaaggtagctttttatttgacccctttcccttttttttgagagcaagcgcctaaaggaaggaaaataagaaaaaaaaagaggacgaagcaaactcgacaaaacacatcttttttttctatacgaaatttgttcgaccgggaatctcttggtgcgcttcgatactgttagcattcgcagtctgataagtggtggatttatgagggccccccatagctttttagaaccttggttattttacctaaaacgaaaagaaatcaacctaagattctgggagcggcgtcagtgactgactccttttatgcaattcgaaattataatgatggtcacaagtcactcaactcacttctttctctttcctcacacgtacttctatagcttgcttgatgactactctgaaagactgattgattctgatggatgatccatacgcgcgtgtacagttctttttgaatggcgaaatggctctcctggagtgagaaggcagatcgatgaggcacaagagtgctagttggactgaggtgggtgaaagattcaattcattctccatcttcaccgttaagcttcttgactagactttttgatctttctctgtctgacgctcgtcatctcatatcatcagataaaacgactattaatttcaagtcagtcagaatttgcgggatcttgactgtgaggagcaagaaaagaaagaagaactcatcaggcaagaaggggacttttcactctttcggagatgtaatagaagatgcagacttcgggcattcaaatgacttcctgttctggaatgtcaagccattagtagtagatgtcggcatttcctaaagaaagctgtttgagtagcaggaggacccgcggagcgctaatgaataatcgaaggcggattaagagaagagagctgttagcgtagatgaaagttgcgggttagtgctccaatatcctcagtagatagaggtagaagaagagctataacagtatacatagtaggtagcgagatcaaatcaaacctagtgcgtcactatcatcttacgcaccgatcggtctatctgatcaggttcagtatccaatcctgtgtagggcgggggagctgctagttcgctaggaaaatagaaaaagaatatagaaaatctataatcagtcaattgcaattggagaagaaagttagatatacttctcgctaatccttcttcttttgatcagcctagcatctccctcgtgcttatttattctttaacttttacctactgcaagacacatgcccatcccaagagcgctatgagttcatagagtggagaattcttcatggttcatccttttttcatgcaaggctagtacagatggtgagaatgctctggaagaaggtgtcccagtccgtaggggcactttcaatcaacccggtgggcgctcagtgactcgactgaaacgagaaggtacttaattggtccaacggaattctgctttatcatgaaagttatcgaccgaggaattccatttcggtagcaggcttctaaatacgctgcttgcccgaaccaaggaccttcacattctaatcaaagggaagatgctaagggtaccgataacttctgattatggattctatccaaggatcgggttctatctatgattggtgcgacgaatgcgatgactcttggttaaggccttgccttccctcatcgatcaaaatggccagtcacaattgttgcgccctgtctccctgccctgagtacgtcctggaaagcgaattcttaagcttggcccctctctttatttgaaatgctttagtgagattcacatctcgggaatattcttcgatacgagctactgtacctttatcttataagaacccttctctacaaccttcactattttattagtttctagtaagtaagtctcctgatgctacccagaagctccctcctgattctcgttgttaggtattttacttaggaaagagcagcactaatgggatatttttattaatggtattctgctaccctctccttttagtcgagtaatcaatccctctcctcatcaacaagtggaagagtcacgtcagtgcctaaaggtcagttttaaactccgagactgcagctccagcagaatccttccttggttcagattccttccctgccttgggatgccttactttctttaagggaaaagacagtatgatggtggtttttttccctgacttctgttttagtcgatcgagtagtaacccactagttattcaagcagttttctttcccctatccctttagctttagtcggccgagcaggttctaaccttttcttttggtcgagtaccttcgttcctcttccgagtggtcgagtaactcaagttcctcctctactaattagttgagccattcaggccacccgatccctgtccctaccggaagcctactgtctgactcttagcctagctacttagattagactgagcgaaactctgcagctgcttagttaagttctgctactgactctctttcagttgaggtggaatcaaacccttctttggcttaggaaaaaaaccacctctacttgttagtcttgctttttttcaattcttttggtcgaggagtaagcctcaccccaaaccgacactctttaacttaattacttttcttccggcggggcattttctttccttgcgtggatatcttttactagtgaaagcggcatcccaactgtcgaatgattgctaatcctcatttccaaaaagcataactcctatccgttgcatcagcctccatctggttccttcatttcagtcttagtccagcttgtaactaactccaaaccctctttctttcgagcgatgggatttgtgacgaaagcaaggaaaactcttagttgttgaatgcgagtcattacataggtggaattttataagcttctttaggcccggctagcccgtagagtcttaggggtttttccacttttcctgacgcaaggtcggggtctttacgaataggacaaatatacaccaaccctttgaaggatgaggttccagttcgccattcctattatttataggcttccagtctcctcagaagtccgctcttctatcttcgcagaattcacttgggtctcttactaaccttcgcatctagggcatgatgtctttatttaagatgtcaatcgtcttgttattttcaataaatttttccaggcctctctacgggattggaagaaggagaggagaaggagagagtgaaaggagataagtagatgttatcacagacggagatgccagtgagaatactgaacagacaacagctgaggatacacagcctaagctttttgaccataaaccatccaataataaagagaagatgtggaagggtgaaagatagtgtactaacgagaaaggtgaaaagctagggaaatttctgttcaagtttcagcttgatagctatatctttcctttcttaactgggttttttaacttcacatatagcccatcagcttgtgacttcgcacactctcagtttcgagattgggaatcgacaaaactgccctttcttaacttaattataaagggtagcttagctggttagatttactgaaggtaattcaatcgctgaacgttgataatagctttcgagaagagatccttactctccagctagttaaaacttccccgattagtaatgctctcaccctggggacatatctcacctttgtcagcaaaacagtagaaccatcttcatttctcagtctcacacttcctattccctttactgttgacatggtgtcatttgccatctttacttgtttcactaccagcatctgataaacttacaaaccattctcttcttccgaaagaacaacctgtgtcaagtatccagacttccctttgttaggaatccctaattgaaagtgagaagggacctacactagtatataaaggacatgggcctctccactcattgccaattggtttttagttggaagcccatgaacactcacatggtatcaagagccatggagggttctcttaagtcttatccttttccttccaatatcaatattactagttgtgtctccattaaactcaacgatcagaactatcttttatacgacgaaggaagggtgcgattgagtctgctgaacttgggcgagagatgtgacttcgttcctttcctttcagtcgagttatttaaacctctccagagctctggtgtctacgagaagcttcatgagtcaaacaattgaggaagccgatacttatactttggtagagaatctcgcataaagcaatgggagtcatggctcggattatgatcggactacaaggaaaaacaatgatgaatctcatcatgccatccaagagctgaatgcaaaaatggataagatattgaagcgtgaccaaaagaaaagatgacggtaaactcttgt

SEQ ID NO: 43 - DNA, 82189 bp, Arabidopsis thaliana
gatcttcttcttgaccacctcctgaaatagaaattttagggattctcttagcctacaatgtatatatggaaataaagtatcaaagaacaaattcactataaatgtaattacagggaactaaaagttgccagagcagatttcaatcaaaccaaaaacaaaatcattataaggaagtaaaaaacaccatgagcatcacttttgcattgattattggtctcttaggaaaaaaagtcagaagctttcaagcattagcgatcttacgagtcaaaaaggctctgcaaaaaccgtaacaaaacccctaacaccaaaactccaaaatcaaaattcaccataaatgtcattacatggaactagaagttaccaaaacagatttcaatcaaaccaaaaacaaagtctttctcgatataaggaagtgaaaaaggaaaaaccaccaagatcatcactttttcactatttcttgttctcttaggaaaaatttgggaactttcaagcattagcgaacttatgggtcaaaaaggctctaaaaaacactagcataaaccctaataacaaaaaccctgacaacaaaatcagacagaaagaagagaaacaaacagagaaacggcattgaatgtaagaaaggaaaaatgggtaagacctagaagaccaatgcgagatcgacgaggagatgctgctatagtcttagattttttgagaagacagtagtaacgcaggcaaaagttcggaaagttcttcttcagtacctttttagtaaatggaaaacaagagagacgaagaagcaaaccgggtttagtggaatttttttacttaaaaacaatttatttcggtttggttctctcttgttggaccgtgtttgttggaaaggcccaggaagtcgaaaagcccaaaataaaattaaataaaatggctttatgatcatatgcgagtatgtgactgtattgagaaaacattacaagatctcaaccaaccataagttcagacttcagactaatctcattatcataagtgtaagtaatcttgaaaatgtgaacattgttaccttttagatccatcgagtaggcatccagaaaattgttgcctttagatcaatcgactatggatcttacttcatttgttgccttttagatattttaggtagctaaaatttgggttaagatagttggctactaatagtactgtaagtacatatataaaggtatgtttgtacgataacttatataataagtctatgatccagaaacttgactgcaaaagagttataagcactaatcaataatctactcttcttgtaaattagatttgttggaaaacaaacaaacatgatctcgaaatttgaactccatctgagatttgattaaatacactggattacaacaaggagaaaagagagaaaaactttaaaagatctctctaatcctaattaaactcactttacataacttttatgcaattaattattgccataataaaacaaaaattagtgttaattaaggaagaaacgtaggaatggtagtagaagagtgttggtgatgttgatgacgatgagcttgatctttcatctccgccgtagaagcatgaccacaccggtcacatctcaccggcgtaagaatcctgcgacaagaaggacaagaagacctagaaactagccatttgtcaatacactccacgtggaaagaatgaccacaaagaggaagcactcttatttcttcaccgtcggcgaagtcagtgaggcaaatagcacattccgtcgagtctccctcttcagcggcggcgccggaggttgattccgcggcggtgaaagtggatcttggaagagactgaagagctttctttttcaagcctttgttcggtgacggcgaatctcctccggctgtaaaccgccggagccaagcgcatcgtacgacggcggcgagaccagcaacgcagataagagcgcaaagaagagccgacaagatcaccaccatgtcggattccgctgcgatcatctcctccgacggttgtggtggtggcgccgccgtctcaagtaatcttgacggtcgagtcattgctttttgagctttggagacttttctttctttgtgtgagtttgaagacaagaaaatgtgtggagtgatgaagataagaaagaatcttgatccacgttataatagagacacataaaggatacatacattatgatatacatctttacttatataataatattgcaaacaaataagatatttgtaatatttaatatcaaatctgtatgataataataatacacgcagaaaagtttggatgaagggaaacaaaattagtaagtattattatttggttgtttattcgaagttattggctgaattagtgtttacatgcaatttgcatctcctatttagagtattgttgtttcgtgtggacacatattctgtttaaaaacaaacattttgctcttaatggagatgcatctatctatctccaacttcttagatcacaaaccatttttttcttaggattataaataaataaaaaagtttattttcttttcttgggtgtgtgtatgttcaatttttgttatgaaattctcttatgactagtcaactgatgttgagatcatgatgacttattttgattttattctatatattaaaaatatttgttgtatgttatttaaaattcagatagtgagagagatgattatattttttgaaattggaaggaaacttggagtaaataatataagaagaaaagatgggtcggtggaggttggctttataggttctgttttgacgaacacattatcaaaaggtataagtaagctcttttctcacctaaacggctaaacctaccttcgattagaccattttatttttaattctcttacatttatttaaaaatattttggataatatgattttctatcataataaataaaaatagatggaaaaagacaaatgagagatcaaattgtggaaatagtatgttattttttaataacaccggccaatattagcttattgcacttttatttcttaaaatatttttaaacattctagtttcttaatatcagtttttttttttgaccagccatttaaccgaccattattagtatatacgatttatttttaagctagaacctcgaaattcacattttgcttctaatgtatttggtttttgtttaaatcgtcttttaatatattttggatcttgtaagttttgtttttgtaagcctaggtgagatctggattctaaatctattaccgaaaacagaatctttgaaagtggatcaacgtgtccataaatttggtagcgatgcatatattataaatctaaatactgtaggatacaatttgacacgtaatgtattggtgaattttaataggaattattaaaccgcaggtacacgtctattctatatacttttgatattcgtcactttaaatatgaagttcacacctcaaccacttgactcttttatgactaaatcaagctctaaaccgtgtctaaaccgtgtctaaaccatatataaagtcaatctcaaattctcaataatcattctctttacttataagtttataccaaaccatattggttcaaacatatattaattgtcacttggaaccaataccctcaacataaacttttaattactagaccatgcatgatgatttttttaataagaatatctatcaaaatatattggtttgatatatgtacctttaaaactaaatgatacattagacactataagatataatatattagcatctttttgaaaatgtcgtcacttgtttataaactgataatgttttcctcttctgttagcattttgggtagctcataacattctataggaaaagaaagaaatacaactttaaccaactctagtttgtgactttagcagtataaggacacccgaaatggaatctccttagctaaaatgcttttttaaacgtctctttatctgaatgcaagacatgtgaatcttactaaaatacaaagcaaaagacaaaactaaaataaacgaaaatcaataatggatgaaagaaaaaaaagccgttttagccaaagttttttggtttcagctttaattggtcttggacagaagagtttatgtaacgttaatagcttttaaattgttatttgaaatgttttcatatgttatgctttcggagaaattctatcaaattgagtttctattaaatctccttaattatgaaaactgggtgcacatgtgcttgtctgtctcttcgactttatttttttttgttaattaaccaatctttattgttgttgtgtttaaagtgaaaatgccttttagttttaagttatctgtgaagtaccaatcacagggattttgtaaggaagccttttatcatcttttagatatcaaaatgatatttgtatatcccatgtgctcccctctctgtgcatagcctatccatcaactatctcaattatttagcaccattataatttcatatataatgcccagtcccaaaaatatagacaataaagcaaagcgaaaattatgttttttttttttcctatcataatactgaatttttatgtttctctatcttcaacaaaaactttaaaaaaaaaaaaaaaactttactagatagaataagacgctaattaattgatcatttgtaaacaatgaaattagtattgatgctttctctgtttattttcatttttgtctgtttatgtagtttaatgcaaatttttgattttcttctgaaaattagtgtacatatatatattttagcgtcactgtaatcttatttcaattataaatatctggtaggggatgttattattttatgtatctatagatagagttataaagatagaaatgttatgaagattctattgttattcaattaagttttttaaaaaattctaccaaagtttaatgttattagtttctgtatttataaaaaaattgtactcttaactttttcataaaatctaaatttattggattcataattttgtacggtcaataatatttgtgtgttttcaaataaaatgcaaataattcattctgtcattatgaattaaaatattcagttatttttttattaattctacaatcccgattctataaaatattctctgagttcttttaaaaaaaaaaaaaaacagaaaaaaatcgagttgagcttcgcaatgagactccgctaccctatggtttttttgtcaaagcggaaccgcatgatggaggcccacgttttctccttaagagatgtttgatatgaacacaaattcagtcacaagtgctaaatgcaaaatcgtacacgaacaagagaaatctgtagacaatgaaacatggtttgggaaaaaggtcaagaaatacagtagtgggcaactcttttcccgagcaaaaaaagttttaaagcattattaataaaaatagaattaattgtctgaataaccctaaaaaataagaaacttatacaaacaggcatttgcgtaatgacttatagaaataggtacttttgttcttgcgaaatgacggatttaccctcattcatctacaataataatagctgagacttttgagaacgacatccatggtgaactcaggcaatagaaacgacggtgtgtttttttaactcagcctctgcatttttgttgtttctattatctacaaataaataataaaatcaaacgaaagcaaagagaacgagaaacagagtgattcaaagtggaagattcacagataattcacaatgaatatcatttccgatttcgattttgcaaaataaaaaaaaaaggaggaaaaaagctatgaagaagtctatgctattactaattcctaccatataattttcaaattgggtttaaaattgaagatgaattagagactgttattcaatttgtaaggagtaacataacaaattagagttcaagttaaatattttgggaaaaattaattgatttggtaagtggctaagattggagtccttgggtttcatagatactatctttttagggtatagatttcttctatgagaacttgtttaatgggaaccatcaacatgattaaactagattttaagtttctagaaaaaaatgaagaaagaagaagaacacgatggagaagaagaaacatgaagaaaaagtaaaacacaagggcaaatctgtcaattcgcgtgtatgaaagttccttttttcaaagcccaacatgaaagtggctatattcaaatatttttcataaaaagtacctatatcaacaataaccccataaaaatattctaataacacaatgttcttgttttggcaaaaatgtaggataataataaggataatttgcaggccacaccctttgaccatgttttattttcagggattggcaaagtcaaatgtggttttcacgttttgtcttttcagctgaaatttgaccattttacccttgctgctacagttgagaaactattgaatgtacggtttagttagtcaggtttagttaggtacactgttccggtttagttggagatatttttgtttcactttgaggagtgcggctgtacagttagaagggagattttttcttttaaaaactaaatgacatcaacatttaatggcccaaaaagtttagacgtgactcttgtcacaattaatgcaaaatcatcattacatgttataatattataaaattattgataataattgttgagttaaagatgaacccagaaacaaacattaattgctaacgtacattgatgttgaagatgtgttgatcttgtttatttacgaagtttggggtcaagacaagcattatcgtgtaagtaatgaagttttaaagattttttttgttataatacactatgatcttcattgtgttcgaaatcaattttgtttttttataaaaaaatccagaatttttttatttctaattttgttggttgaaatggtaaatgtgtagatatttatgtttataagtgcgtataacgaatttctatttgtttttgtcgatataatcatgttttcagttgcatttattgggtttctcctgaatttatgaagcagttgggtaatggataatctcgtatttactatggtcggtgagtggagatacaaagaagaaaaatggaaatttgaaccagaggaaaacatgtttggtcgctgtgtacgtgttaaggaaaacatgacgtacacggaatttgtatgtacactaagcgagactttcagtttgaagtccatagatcaatcccataattagttactggatacgggagagatgttagtgatgatagatactaaacgccctcctgtctacattgacagtcaagtgagggtgggatacgattttttttattcgtggtgggtatccttctctcaacttgtttgtctctttcattacaaccgtcaagacactcgggaataatgtctctaggactcatggtgacgatgctgaaagtgaccgtgtgtgtgatagtgttttaaatgttgatgaaaataatgaggccatagattagtaagacgagattgaagacgataaaacagatgaggatgaagatggggggacaacgaagatggtgatgggtatgatgattatcagggtgacgatggatctatgggggaagtaccatcgatcctactattgatggtagtgaaagtagtggcgaagattatgattacaacaagtggaacgatgaaattgtagaagaatatggaatagggaatgttgaggagaacgtcattctcacacagctgattgttcaacatccaagggaattcagtcttctgttggcagagtgtacgtacacaagtcagcgtgtacctggcggagataacatttctcacccgggtgaccgtacaccagctgtgactccaagaagtatgtgtcaacatggtttgtaccaatgtacgtacactatagattggagagtgtttttaagaacagaaaagtcatacaacaaacaatgtcttatctcgcaatcaaacaatctttttgctacaagcaacctaggtcatatcctacaagattggtgatggtatgcgttgatgatacttgtccatgacatttgactgctcaagtcgtcaagaattcagaatatttcaaaatcacatcgtatgaacgtcttagaatatatctcgcccactgccaatattggtttaatattgtaccaataaaattttcttaataatttaatttacaaacaaagatgtacgtatattattacacatgtacatacattaatttaccaacaaaaatatacgtacattattacacatatacgtacataattttcaatatgaggaacaaatattatttcaccatctatatctatttaattattatgtatgtatggagattattgagatataagaatacgtaataaaatagcttgacttattagaaatcgtaccatatacgttcgactaaataattttgtgtacgtacactgtaaattgaatatacgtacacagaagaaatttaatgaagggtataattataattttccagtcatcttcaacctgtgtatccttttctgcaaacctaattttgcggccatctttagcagttttctcaaaatctcattttttatacgttttaattactatttatatataaatcttgtaaacctagagtatctttagtttaaaaagctaaattgtttgaatctgtgatttttttttgcattttgttcatctctgaaaacaagaaatttcttcctcaattttggagttcaatggagagatgtcgaaatatgaagaagtggataatgaagtttgaacttctttctacttctctttcaaatctctccatctctttcttttcctctttttcttcttctttggtttcttcgtttcagtttttttttcttttttttttaaaactgaaccgtagaaactaaaccgaaaccaactgctgtggggtggttgatcctattaagggtattttggtctaaaaaccattcaaaagacaaatggtgaaaaccacatctcactttgctaaatcatgagagcaattctttttttagccacttctgtgaaaatttctttaataataatctatgagttttgctcaagataatttatagaagattggaaaagcaataaaagtacaatataataatgcaacatgttggagatactttataaaagtttatgattatcttttaagttaagaatcagtgagaatatgcaaaagtttccacgagaaaatgcaatatgttttcggtcatgaatgaaacaatggaaatgtcaaaaggaaaaaccctaattaagggtagggtaatgtgctagtcaagattttacttcttcaccacggcagtgatttacaaaagtattagacaaataaaccggccctaaaccctaagcgagtgatcactttggaatttaattaacgacttaatgatcagatagattaaaattcgttataaaatcagacaacatttactacatcttggtccccttaagattcggttttaacttctgccaaaatatctcctaagtctcctaagtctcatgagtgttgtccataatccttcttgatccactacgttaagaggaaccgggtctctgaaatctgcttttgtgcttagctcctcaaaagcgtttacaaggttctccagccttgcaacaaactcgatgagaagggaagcaaacgtagctaaagacaaagaactcgcgctttcgtatactttatatactgtctcatttaccacagaaccaccaatgaaggacacacttggccatgtctcacggtttcttaacatcatactctctgttgattcccatatctgagattcatcattaccactagctggattctgattgttgctgctactgttggtatcccaaatctgacttaaggatttgatcactttggtctcgtgagcttcttcttcatattcttctgcttcagctttctctttagtagctgcccagctttctgagttcacaagaaggtaggatttactgtctattttcatctgtagctcctctgctgcacgttgaacgtcatttagaatctctcccgggcctagattctccattttctccactttttctccaatcaaacgcagaacttttgcgccttcattgccaactctttgaagctcatgacgaaatgcctgtcgtttctctggagctgcctgtcatataacaaagccccattaatttgtaagaggaataaaatgttcttatatcatgcatgtaagtgtaaccaaattaacaccaaacatttttatttgtctattaactaagggcatctccattggggggtctctaatatagagactctccattaacatataagaaaaaataaaagaggggagaactcttggatactgatgcgggtaatactaaacaatcatattctacacacaagcaaaatccatcaacttgtaacatgaaatagtaataataaggaacctgtatctctgaaagtatgcaaccatgtatcgccatgacggtgaaagcacaatgccttactgcaccactaagtttgacatagtttttccagggatggttaaacgttctgtaaggtccatgtggaggctcccatatggcaaaatcgagctgcgaaaaaagaggaatttcttaaatctcaatgctattaacatgcaaattctttagttgtctcaacttcaaacatatgtaccagagattcttcctgatttgtagattgaatagcggacctgtacccactgtataatggatcatcagatgtttggtacgtgagaatcttcgagggtactctctcatattccacacattgcaagtagccatttacacatcctaattgtttaatcaaccaaaacctgaaatatcagttcaaacccgaaaaggaaacaagggacaagtacataaaatgccaaaacctgaaaaccccgaaactaaactaaaccataaaccagattgcccaccatttccttttcaccgtagagttcatattaataagaaacaaattccaataactttatgttaaaattcataatcaaactaattgtaacatttatttcttaaaccatttgtattcaagatcttcatttcatatatatacacatctataatatgattttacattttacgaattggattggtccatcataaaaaaattccatctttgttttcaaggaccattgaagtaatatttgtttaccttctagggaatttgccacactcttgaaattattggccaccagtttatggagatcctccccggcccatattggaaatatgaatatattcacaaccaaacatgtggttgcaccaacaacaataaacaaaaacctgtaatacgccgtgctgaagaagtctccggtattgttccccgaaaccagaacaatacagaatgtcaacaagaacaccctgaatgcgtattcatatggcttcatggccgggtggagttttgaataactagcaatgaaacctggtaggtcaagttcaaagcgaaaatgttactatttatcttcaaaacctcatgtagaagacaagaagacaaggaaatgcggcaacctgctaggaaaatgcaggttatgatgatggtttgctcgaaatctcttgataaaacagagagcctcgcgatgccaagagcgagccctccagcagatactgtgcctatcgctctgttgaatcctttgaccaaagttgctcctgaaattaaactttgagttagggaaatgaatttaagtcgcccaaagaaaaattatatcaaagctcacaggctacgagaaatttgagcgaataaacgagcaaataaagattaaaatgtgataagcattatgcatatgtcataaataagaattagacaaaacaaattcatgtgataaaaaagcagacacaaaattcaaaaaattattatccaaaaaagaataaactatagttgtatcaatttattaatcttattataactcagcataaagtaactatcaaatcaattcagtatacactaaatactaaacccatagttggataaaatgtatttatgaatttaattttatttaatttttaaaattgtttataaagtattttcaaaacttcataactactgaagtattttcaaaaatacataaaattatttatgaagtatttatgcatttatgaagtattttcaaaatatttatagttggataaaatgtactcaccaagtcaaaacttataaatttaaattaacttaatttttaaattttaaaaactcgagggaaatgaaaattaacaaattgttaaaactaagataattgattaatggcggaatatggaactgcctagtgctgctgattaggacctgcttaatactgtttaattaaaagtaaacaagcaaaccgtttttactccaacgcttaagatcatctccattgccttacctctcatgtgtgtctgaaagactaatcataggaaaaattaaagacattctctttttggatgtctaaaatatctttcctaaaacattttagacatccgaaaagaagaatgtttttaattttaatcacggttagtctatttttaccatggttggtcttggagacatcaatgagagattatgcaatggaaatgttcggagagataatcatgaacaagaaactagaaaagtccaatcaaacaagaaacatgctcgcccaaattgaatgaatagtaagaatcaagaacgaatgaagtacgtaccaacggaatactcgaaaaccacgacgacagtaaggatgccccatacagagtatttactagcatcatgcaacggctctttgaggaaaataacaacggagcagagggcaagagccattcccatcttcaccgcgaagaagatccttcgacgatcggaatgtcccaactcgcacaggtttgtgatcttgcggaaacacatatctgagtattcattctgcgagagaagcctctctctgctttgctgatgaaatggacccattttttcccctaaattactctgaagagaacctttgttgtgtacattaaatagaaagaaacttttcatttgtgtcaatggattaatctatacgtacgttgcaattactttcttttcccattattccattaatgcaatacttcaccacatcatctctaaaaaactttgtaagtttttgaattttacctttttcggttccttatgtgtggacctgtgagtgggtggacccaattatgaagaggttatttattacgcgggtattttatacctaaagtttaggaaaatgtcaaaacaaaagttgcatggttagtgttggctcgtgagtaatgtgacttgtgactttgacattttgaaagcgttacaatttattacatatctatccaccgctcgctcaccattcttcctttcaaggtcaagcctacccgctcttcagttgatatttttcctatagattcttttttgggtctgattagtaattcggtatccggcttactgttttaatgatttacaatacaaaagcgattaaaagcattatcagaaccgtcattctctttttagacttcgaatggtaaccgaaccgtaccgtgcaatgtataatctataaaaacctttcatttaatgaattttttagggaagttgtactgttttaagttattcgtagacacgtttatcttgattaatgaaacacttagcatgtatagtacaaagatacacatgcatgtgaaatggacaagttattaaaaaatcattaacctactgtaaaagttatttgtaagaaatttatgccctcgttttgcttgattaatgatatacttcttctgcaagcagatgactagtgatcagtgtaaaaactagatgatccctcgtttaatctcttgtccaatttatctattcatgctttaatcgcttccgcattttaattcattaaaagtttcgctctacacaattttctatttatctaatcaacaaaaagaaaagtttacagaaaatatcgtggagagtagatctccatgagttaaacgaatactctcatagagacaatacatcaatccttagaaagccactcaaacgcagtacatgtatagcccatatgggcctttatgcatcaaacgtaatgcccatcgaaaatacgatgaattaactaaaagagacttttaagacaaccgtcacctaagccttcactttcccgaatgttcccaagaagaagttgtcacctattgacaacaggtggtggttacaccctttcagacctcatcactaagtgttcatgagtttatagtttaagagtttttggtttttgttttttaaagtgtttttttttttgtgtttttcttttttacattgttcgtttatgttatgttgttattcagtttttcataaatattcaaagtttctcattagattgattgattatgagaatgccaatgcaatgatgtttagaccagttggccaatgggaggcagccaaaattttaagcagctgataagatgtgttacaaaacaaaaaggcttgctcaatcatgtggcctataattaacttcttaattaaactgtggtttgctaccactcatctcaattcgactttagtttaatattggttaagtagaaaactgaaaaatcaaacaaacgttatgatttatctatataagagaagattggtttagaggtaaacgtgatttttttttttgaaaaccctaatgaatttagggttttggggtatgaaatctatataagagaagattgtaccgtttcttactttgggagaaacggtacaaaatgatgatgccagacaaccaagttttggggtatgaaatctatgagcttagctctgattcatggaggtttcttgatgtcctccctccgactgctttccatcatctgctaatggtttgtctttgaagggatcggaaatgcttattggcttaaaaggtactgcttacacagttttgattttacaaccgagagatttatatgaacattttactgcttaaacatttttgtcttccgccatttctgaaccgtgattatatggctctatcagttgatagagaagaaaaactctcactgttacatcggattgatgaatcgaagatggagatatatgtaaccaagaaagtacgtagatactgatgaagttgctttgttgtggagcaaattctctacagtggatttacccattggtggtaatggtttcgagctttacacgagtctattaattgacgaggagaagaaagtggccttatgttgtaacagatatttgagaaccagctggaaaatcgtttcgagctttacacgagtcttttaacctttttactaaactgattcttaatatttgtccctcattttcttcagcctattttaattaatatggtcatcaatacattactttatcgccacggcattgatttacaatagcattagataaatgaaaccaaaaaaaaaaaaactctggagtgacacatctttactacgatggttctttacttggcgcaggcttaactcgaaaagaagtctttacttggcgcaggctacaccttcacaatcctgactagtctcaccggtcttgagatgattcattactcggagcaggcttgacgaaagagaactctttagaatcagtttcagtgtcacggctagtctcaccggtattggtcttatttggttcaactttcacaacaagctcgaagcttggaggagatttgggaggagtcaaagcttcattatctgtgtcgagatccgatgtttcagggtcaagtccttcgtatctcatcgaatgtggtgtggttttgtaacgctgcaatgaacgtacagacgaagtagacctaactgtcgatgccgtagggctcgcacttccatctccacctagtctcttagtagtggctttcacacctttcttcttcttcactgccattctccatttcttgagtgcttttgacgtttgttcatcgaataccgattttttcatccgagaacccatctaaaagtcacagagctttcttagtttacatatttaaacagatatgttcagtttcagtagcatatgaactaaggaaatttacctgagttacgagtgcgtaaagaggaagtgtgatgtagctgcaaagacacaatactcctaaactgcaagagaaaaaaggaaacaagattagtatatgatcatgttgtgtagagaatttcaagattagataacacttacgcaatcgctacttttacaagtgcaatcttgaaattaggatggtagcaagaatctgatccaaaggaatactgcattacatcaatggatgtaaacagaggattagctactcttgtaaccaagaaaatgcattaaaaagcaaaggaaaatctaaagtgttacccatatccagaagaaataagtgatctgaaatgcgttctgcaaaataaaaacacgatttaagaaaataatcgaaacagaaaagagaggatttgttattgtgttgtgagattttctctgtttattaagtacctgaaacaaggcgaaatgcatgagatggagaatcaaatggggacgaccgaaccagaaatactcatcgttgccttgtacaagcggcattccttgaactaccgcatgtctatctgtgataccaagagccatccttgtcataatcgcttgaagctttgtccctacagctaaaatgatcttgaaaacaaaaaaacaaaactagtttgtcaaaaactgtgagtccttaaagatattattatttggaagatttcaacgaattacgtgaaagataacttacaataaccggtattgcagtgccgatgaacatcatcttgaagcctgaaataccaagcaagaagattagaatactgtccattgaacaatgttttatacacttagatactcaccgtcaatatttaggaggaggaatagcacaaaagatccccacaagacagggctgcaataagacactatcattagtgttgaaagaaaattattcaatgtaagtaagagagtgttataagtttacctgactccaacgactaccttgaaatcatcctccaacgatcttttaatgtatttttggaagttaaattgacttcctggagctaaatgaaccttcataaaccacaacaaagagactcagcaagatcaatactatatactaaattgacaaatggacccataagttgaaaaaactcacagcgatgaaaccatttctcaatgtcaaatagtcagttctcccaacggatctgaaaaactgtctgaaaaagcatccctgaaacatattgtattaacccaaagtgagaaccaggttaaaaacagttcccaactgtatttttgatatgtgtaatgtgtgttacattatctagagctgactaagaagagaatagaagcaagagggtgatgattcttacaacatagaaaaagaatggaatccgggtccagaaactggtgtgcgctctcacaaaagatgtttcatgagttagcctgaatctggaagtgtctataaaaagcaagaacacacagaacacagagtcactaaccagtgccaaagacaccccaaagatttcgaagagaaactataagaccagatttaagatagagaagactcaaaggtcaaaggtagtgcataagtatacctgttgaaaactcgtaattatgggatgatgtctcattctcccaatgcttccatccgcgaatctgaaaacaccgattatctttaatacaaccaaactttccggaaacgaaaccgagatgttgaactataaatttgaaatggtaaagtaccttcaaccttccaagcatcatagttaagaagctgtaaagaacgtggaaaatggctaagaagaatataaggatgtgcaactgatggagtgcctcggcagagataagctctacataaccctaaaccatcattaacatcacacgcattgtatcatttctcacaatcttcggatcagcaagacaaatatgtgactgaatgaaaaaacagaactctcacctccttcgtgcatttagtgggagatgcttcacctccagataaaaatctgtgctcaaacgacaagagtctcctgtgactttcaccattgtcatcatcctcctttttcaagttaggagcaggacacgggagcatcgtacgagcaacatgtgaagggatacaaatatccaaaatgtaggtttgtccaaatgtcagaagcaaagagatgaatccaagaaccatcagctctgcaacacaaaagaaacaattcacatcacgaacttaatgttctgtcaaagcctttggctaagtaagcacacatgttcaaaattccaagtaatcagaagaaattttcacctgctttgatcttctccaaagcgtcaagaagagctgtcttgtgccgatcccatagaacctattaatcaagaacaacttcttcacttcaagacaaatttgccaattccaacattaacataaacacaaaatctcagacaaagacagtcccttttcacaaatcaaacagaacccatctccaatataccctcaaattcaacacaaacaacaaaagtacaaagatttagcaaaaacccagaaaaaaaagaacacacctttccaactttgtgaagaagtttttcaagaagaacagaaacaacgatgaagaaagtacaaacagcagcaacagcccaagtcggagtttgattaagctgtttatgtaccactttcttctcatcctccgccgtaaccaccgtcactcctccaccgagaagacaccagagacagagacaaatcaaccgccgaagcaaagaaccgtcgatgattcccataactccgcgttattttagtttggctgtacctgcttcgttaacttaatactgtagaagtttgacagagtgatgagctgtctttaattcacatttgcggaaactcttactataggtttcttggtggtttcacgcggttacaagaaaaagactcgaactttgtacctatttcgagaaacttagatcaaatggaataagaagaagacgcaaaagtgaaatctgtctactgggaaattgtagattcctaaatctttagattgatgatgattaatctttttctctttcttttggttttacgataaaatgactaaactctttatttattgtcatttatggtttttaggacagaggaagaagaaagagagaggagagtgcgaattaaagcgcgtgagatagttttttaaaaaaggttgaaagcagtgaattgtggctttgattgagaaactgtgattgtctttgacttaagcaatatcaatatttggaaactataagaaaatggatgttttgatacatacatttttagtagtttttgtattcgaatatgtaactaaatttcgtaactttggattcttagaaatttgattgcatatcgaaattaataaaatagttatttaaaaaaaaaacaatctagggaaaaatgatgtgtgtgttaaatgatacctctatttataggaaaaatatgtatacaattatataatttaggaaagaaatattttttttttcaattgaaatactcaatgcacttaatacagaataaatatttttattttttgataggaatagagaataaatatttatatataagactaaatatttgaataaatgtctttggtaaaaagaagtatataatgaatccaaaaatgaaaaaaagatgttgatgaacaaaattatggacttgccacataacaacaatgactctcttttaatatataaactatttgtattaagttaatttttattgaaaaatatcatagttaacaagttcttaaattcttaaaaatgttttactcgtatgtcaaatgattcatcaaactattttaattcctttcttctaccacatatgatagagcaatttccacctttagaccttgatcatgtctgacatacatacttttaacatatgtgacgcatcacataactactagataggctaagattgacatcatgctacagccatcgaaaatatgtaaaggagtcataactaacgcgattcgatctagcatctagccattacataataatataataaataaatccgtgttagataatcttttttatacaattttttctcatttatacttttaaatcaggactggtataaagttttttaaagatatgaaataagacctaattttttgaacagtagaaaaataagatcaaaatatgatagggaatctcacttctaaggaatctcaaaattgatggctttgattaattgtattttgcacaatctatgttatataacttcaacaaaatcgaaagttttttcccttaatacagtatgttttgctagttgatctacaatttaatttactttcgatacttatgagcaatgaatactaggttcgattcataacacaaaattgtccagaaatttaagcggttaactggagttgtaagctttttcagaatagtacaaaattgtataaaagatttgtaagagaaaattgtacaaaaaaaggtaagagtaaaaaaatttgtaccgtatttgataaaacttttgtggttgataactgtcaaaactattcaaagtggtacctctttgataagggcatcaccctaacactattttagtgttgaaataacactttatttggtgtaaatttagcattaatttttttcccttctctaaccacaacaccaaaaatcacactaaatataatatcctctatcattatattactaaattaaaaattatccttttttacttattaattaatataaataaaaatcaaaaatcaaaattgtacaaataaattacatcatactattagtctatgccgaccagaaatagtcaattaatatttcaaagtttaatatgagcttcttgatctttaatttgtttatgtcgagttaaaagttctatgtttttaatgattaattaaaaaatttatgtattgttaatcaatttcgtacttattttaatattttttctaattataattcagatatttaaaactaaaaaatacaaaaataattttgatacattgttttttagttacaaaacttaattagattattaaataacaatacaaattatattttatctactataattagataatttttttaaatatataataaaatgaaaaggaaaaaagaataagttttttaattatgcagttgttacagtcacacaccaaaaataccatttggttggagacaaaaaattaacattgccacgttaaaatagcgttttgcctttccgttggacataacctaatggttaccatttaaacctactatatggaatttcttgaagagcattttaaaatcttatgtcgttaatattaagaatactcatttaatctcttcattcaggtcataattgtattactttatggctacgaacagcataaagatagcagaaagttagactgttagagactgggaaagactattggtgttctcctttaaatcctttcttttttttttgctttctatgctttattagtttatttgatatcactttctaatttgtttcacattctgtctagaacataaatctttagcatattttggctttctttttcatatttcttaatcaaaatctaaaacctctttctgacaaaatgattatattgttagtatattcaaatcagttaaacatacataattattttccaaccaaaaaaattattgatattggtacactttattttgtctattcctgcggatttgtggatgtcttatattgaaagttttggtaatgaaaaaggcaatgttgcttttgtctttcttcacctaaccaaataaagtaaaacaaagcattgcatgttgataattacgtcaacctcattttgataataggacatttctaaatttctatacctgcctactgatacgactatatggatacgagtctgagtgtatgactatgagagaaatatatatatatatatatatatatagtggtaaaatctgattattgttttatagaaaatgaggggacattgatgaagagtaaaataaatgaccaaatagaaactggattttttttttattgcataaacttgtttttttttttttcaaaatggatctttatttgaaagttgaaaccctttcttttaacaataattcgtaaacttaattttttgctatcgatcttgtttaactttgagtagtatttgaaactttgaatactgaaatgctttcatattgtccctttggagacatccaataaagaataaatcttttcatatatatttcgtaaatatttatggaactcaatattaatttaaatgtattaaatgtgatactgactgatttgactaaaatgagttttagattttttgttatttataaaaattgataaaatacctgctgttgtaagtagaaactttagatcttgcaagcttgcatttgtattgggtacgaaaataaacaattgcgaacgcatgaccccatgctactttaggcccatatggacaatgtccagatagattaacagcaaagaacgaggcgtccattacattcagtcaatattaacccatactgggcctccaatgggcctccaatataggtaacacattttgagaaaaagaatttgcgaaaatttattaattgtcgatttgtttgtttttctctttttttttttttgtgaaccaaattccataagttgttttgattcgaaccaatcttgatgatactcagttttggtctgtaaatcattcctcttcaaaagaaaatattcaaataagaaaacataaggttcaactttttctagaagaaccgagtaaactgcctcacgggtcaagattaacacatattttgttttcatcttaagtgatacgataatatatttttgatttcactactctataaatgaaaaatgtactctatagtgaatggttaaaaatgtaacaaaataagaatcaaaccaggatgatacggattgtcttatactaacggtttagaacttgtatatttttgagttttaaaggatcccaaattgaggaatatactatagcatggagattatttatgctaataaatggaattcttatttatatcatggcacaaacgatatacaggggtgaaagtatgaatttcataactttttacaaatacattattctaaatgagtaatgctgtataattctaacattttaagaaaatctactagtaaaagctccttaaattttataacttgtgactcattgagaataagaatattaaattacatttgtaaatatgttttgagtaaagatttgggttttagtaccaacataaaagcaacgcaaaataaaaggcttctctctcttatctctctatatcttttagagagaagaagcgactacaacttcttccggcaacgatcagtttgtgttggccgttttttatctggcatcgtttggttttcttaactacgatgaccgactctcttctagcattggtggcttaatcagcatcattggctggctcttttctggcatctctcggctttttcagcgaggttggccagcttttgtctaacatcgatcggttctcgcgacgatggctagctctagtttctcttacggtgcttttggtgccgttgtttgtttttagttttcatctcgttggatctgtgttggtggtggtgtttgtggcgattttcgatcataagtgtctgtgttgtgattctcactttcactcatgttttgtgaattaaaacaatttagaagttgagagagagatgcataaactctgtttttcttagaattttcccataattctttcttacacacacatacatccttatagcaaaacataaagtaaaacacaaaatactagcttctgacacctacacgatgacacctacacgattacactgttgcaggctgctcccactactagcatgcttactctagattatagcttagttttccaagtaaacaaaagcaactagattcaaaccaacttctttcacatgtaactacttgttctctctttgacttcttcagtatggtttgaaagcaaaataggcattattcaacactccctcttgccattttgcaactcaaaccaagcttttctcgaaatccttcaaagctctgtcttcccaatgctttagttagtatgtcagccaactgttcttcacttctgcagtataacagtttgatatccccatttctttctgcttcccttacgacatgatacttgatctgaatgtgttttgtccttctatgctggacaggattcttaccaatggcatagctgactggctatcgcagtaaataggtactccctcttgagtggtgaacttcaagtcttctaacaatcgctttaaccacattgattgatttgttgctgcacacaacgccatatattccgcctctgcagtggactgagcaatggtctcttgcttgctggtttgccatgtgaacacagctgatccaatactaaaacaatatcctgtagttgatttcagatcttctctgcaacctccctaatcactgtctgagtgaccaatcagctttggctccatagttgaagtgaacctcattcccatatcaattgttccattaatgtacctaagaaccctcttagcttccttaaagtgtttgatttttggttcctttaggtacctagacaagtatgatgcaaaaaacattaagttaggacgagtgcttgttaggtataacaaaccccctaccagacttctgtaaacttttgagtcggccagactctcatcttcttcttgatcttttctttgaggcaacagtggtgtactcatgatcttgctgtcttccatgttgaactttttcaacagttttctcgcatagcactcttgagatagaaaaattccttcaagactttgcacaatttccattcccagaaagtagttaagtaatcccaaatcagacatttcaaactcattcttcatcgcagtcttaaattcttccaccatttcctcatcatcacctgttacaatgagatcatccacatatatgcacaccaccaatagctttcccagaacttctttagtatatagagcatgatcattgtcacttcttgtgaagttctctcgctggaagaattcatcaattcgactataccaggctctcggtgcctgtttcagaccgtacaaagctttgtgtagacgcagaacatgatcttcttttccttcttcctcaaatccaagaggttgttctgcgtatatctcctcttcaagagtaccatttagaaatgcagacttgacgtctaattggaacaatttccatttcctctgagctgcaacaacaagaatcaacctgattgtttcatgtctagagacaggagcaaatgtctctagatagtcaaccccatgttgctgagtaaacccttttgctacaagtcttgccttgtgtttcaccacattcccttctgcatcagttttcagcctgaatatccacttaacgcctaccacatttttgtttgttggtcttttcaccagctcccacgttttgttcttctcgatcattaatatttattcttccattgcttgtgtccattcctcatgttttgcagcctcttcaaatactgcaggctcttctgcaccagtatagcagctttcacatgctccttagtattaaacatctgcaaatggagcagtgaggagaatgtcattaatcgatctggttttcttgtttggctgacttgtgctgcctccaggactgtcaaaattcagattcaagggacttggtaaaacgtttcttctccctctagcttcattatctcttgagttctgctcatctgcttgttggtctcctctgtcttctggttcacgtgacatatcataatgtttgattacttccttcttttcccagtcccatttactgtcttcatcaaagatgacatctctggaaatgtctatcttgttttctttcaacaggtacactctgtaaccttttgtttgagagctgtatccgacaaatatagctctttttgacttgtcatcccatttcctcctcttttcatcaggtatgtggacatagcatatgctcccgaacactttcatgtgacttacagacggttttgagtcactccaagcttctagaggtgtcttgttcttcagggttcttgttggtgttctattttgagcataggctgcaacatgaacagcttcagcccataattttaatggcagatcttttgctttaatcatggctcttgccatctccactaaactcctgtttcttctttctgagacttcattttgttgtggagagtatgctgcagtaagttgcctctcaatgccattcccttctagaaactctgaaaattctttcgaaagatactctgttcctctatctattctaagcttcttgattctgcaatttgcattattctcaacaagattcttaaatttcttgaaagtctgaaatacctccgattttgctttcaggaagtagacccaaaccattcttgtagcatcatcaatgaaagtaagtatgtacctgctaccattgatagatgagttttgcataggtccacacacatcactgtgaatgagctcaagcttgtgttttgctcttgtttctgattcttttggaaatggatcacgactgtgtttgcttaagatgcagctttcacactttccttcttccacgttaaacttaggcaagccagttaccatttcttttgactgcaggatcttaaggtttgagtgtcctgtatgcccaagtcgcttgtgccataactctgttgcttcatctttagccaccattgctgtttcttcgtttgaaagccaccttaggtgaaaactcttgttcaccatctctacttctccaattttctttcttgcactatcatgaatggtgcagtagttgttttttaatgtgacttgatatccgttgatgatcatttgaggaacactcaacaaatttttcccaagtttaggtacaaggagaacatcacgtatgcctcttttatctttccttgtcataacctcaatatctccttttccttcactcatcattacagctccatttccaactcttattggaactttgaagtctctgttgatttttgtgaacagcttctcatttggtgtcatgtgatttgtgcatccactgtcgatcaaccaagtgtttcctccacttggttctttaatctcttgtcttgcaataaacacaagatttttcttcacttcttctgctgtctctgtagccattcccagtttgctcttttgtgagccttttctttctttcttggtgtccctcttggtcaccggcgttttcatcccgagatcttgagccatttcgtttggttccagtaatcagcgtagctctgataccatgttgtgattctcactttcactcatgttttgtgaattaaaacgatttagaagttgagagagagatgcataaactctgtttttcttagaattttcccataattctttcttacacacacatacatccttatagcaaaacataaagtaaaacacaaaatactagcttctgacacctacacgatgacacctacacgattacactgttgcaggctgctcccactacaagcatgcttactctagattatagcttagttttccaagtaaacaaaagcaactagattcaaaccaacttctttcacatgtaactacttgttctctctttgacttcttcagtatggtttgaaagcaaaataggcattattcaacagtctgctttctaattaatcctttgagattgcagtttacgaaaattatccaagggattcataattttagttgaagatataaagcaatttccttagcagattacaattacctttagctgttacttgtctgtttagcttcgattggtctagtaaacagttttggtttggattaatcatatttcttattctctgttaccgttttgttggatctcaaatttctttgatgattctagcaagtggttgagtttaattgatctgtattttatccattaagctgttttgcagtagcaggtgaaaaacaaacgaattcactgtgttgaatttcattcaccggaataatcagaggctacgacggcgaaggatgacgatggaaatcttttgattactcatcatacacgtgttgataacatgtggctttgaaaggaattatctgatcaaatcttcttcttcaatattgagtttgagttgggatttagtttgttttcgtaactggttatgttgtagggcttttttagcccatgtttgtaatgcttacctcaataaaatatgaacttgtgagaaaaaaaaaaagatttgggttttagttaaaagaggagaaagaaatgtttaaaatgatgagctaaattttaaataagttgtaagattaagcaacaaatgagacttgtagaaattgcaaaagttgggacctaaatcttgagaagccactagaataaggaccttattttattaatgttgtggcccttgagaaaaataatattgggtaagaaaataaacaacttatagttttcaaaaacacaaaaacacaaaaccctcaatagttggaagagggctccccaagaccgtattcgcgtccagaatcgtaacattttcgataagattaaaaaaacctgcaaaatctggtccgcacgtttttagcaacacaacaaagtatgacgagaagttccacgatttttgcaggtatagtacattcgcttttcgccacctcattgccttggattcatacactggatcggtttaatcttcttctctgtttttccatgtcaactattatatagtcattgtatttgtatttattttctatatattgcaccgaaaaaagcaagagagggatatggttcacatgaactatgtaggaggtgaataaattagacacatgtattcttaatttcaggatcacatgaattgtgatagttcggtgctcagtagaacttataaaaaagcacaacacttattctttttgtcggatatgataatccgcttttgattttttttaaatatatggagttttcgatagtccaaaaaaaagtttcatgcttaggcagacaaaaactttaatctttgtgtgtggacgacatatttgttttaacttgctagtgaatttttctttaatctacctttgttttgtatatatatctaaccattataattatgtatatgttagctgattccaaacgatatcataagttctaatgagtaatgattggtcaatttatcttgttgtaaattgttcaatatacgtgacgtggtccacttctatcctccaagactccagctacacaaagacacagtaacacaaacgcatacgcatatgcatgtgtcgtgtctttgtgtgtgtatgttgtatatattaatatattatctaaactataccattttcatgaaatttataatatattttctcaaatgatttaagaagataatgatatgtttacgagagtaaaaaaattaatgatcttccagtaatcaataaatatagtaaattgatatcagatcttgttgccaactatagaattgaacaaaatacaaaactgtcatcgccatgttatattatcgtaaagccagcttatatatccttccccattggtgttttttatttttactttgtttggtgaatattaaagcgcttaaaacacgttccaacagaataattgtttgacctttttagtttatctgatttttaatatcaattcttaaaaacatctcctcaatctttgcgtaatttgtcttttcctaatgcatcggatagagatagattcttctgagttcttgcatggttcaggtactttctattcgtttcttaatacgtgttctttcttttcggatgaaacataattcatcgatcgatcgatatgtataagtctgataaaaacttgatcgttgcttttgatcattactagtaaaacatctcaataaatcacataacatgtttcacgttttgaatcggtttttcagccttgttgtttcagatttgattgatacgaattttaatcattattattgcaaaaattcatatttaaatttgagatgtttttataatatacatgcttaagattcataccaataattaagttcaataatctagatatggtttagaaactttagatatatagagatgctgatgacatgatgaaggtgatgatcgattgatcgtttattcatttgtcatatatatgagttgtaggaaaaacatcttatgaatttagatccattaaatacgcttatatgcatgtgtgcatgttcaatgtgtagataagttctattctgaataaattgacgaataacaattattgatttcaatttcgttttgagtgtgcatgtcatgtgtctgagatatgggaaaatgaaaaggaaacttccctatatataccgaaacaatagactatcaactttgatctatatatacaaattgtagaaaagccttggatctaactgatatttccttatgtgagatacacattaatgtcttttgttttgcttcttaagattaacgtgttatatattatctctttattttaaaacatgttgaccaaaataatttatgtcttacgtgttgcatatgaaatagatccaatcgaatcagcctcccatatcttgaatctttgatatttggggtctaccattgatatgatttactttgttaattacttgatgttaatatttcattttttcttaagaaattgtaaactaattctttacatatatgcatggcaattaacttagtcaacaggttcaacattttataatgtatccagaatcccagatagtacctgtcctgataaaaccttttcaggatctcatgatatttcttaaaatataacagcttagtgattttaaataacataaaaattagccgacaaaaagaaaatatcataatataattctgaaaataactaataatttactcttttcaagtaattattcaaaataaatttagaaaactaattcaatgtatttcctcattgtcactcttttatttccctctacaaaattatatatatgaagtagttttttttaaaatagagccccataactaacattaggggtccatatatttgcattgtaatttataaacacgtgtagaacattataattatttaaaataaaatttagaacaataacttaatgtatttcctcctcgttagttttcctttttttccctctacaaaattacatatatggaatagttgttctttacttcttttaagtagagccccttaactaacacattaggggtccatatatttgcattataatttataaacacgtgtagaacctggcactgaagtctgatgaatatatatccatttgttttcacaactaccctagctttttgtatcatcggttactttttttttatcacaagaaatttctcgattttgattttgatttttcaatgttgtgaagttgagaagttcaacatgttttggacagatgtttttgaacagtaaattagtattttaaacatgtgaatctatttgcaaacgtaatgacgtgtcgtctgaccatttcttgaatgttagttaattttttagctctagttttgattaatctaccaattaggtcattcatttcagtttaagtcaaatcaacaattaggctcgtcctaacgttttcatttagccaaaacaaaaaaaaagatttcaacagtataaataattcgtccttatcaaaaaattaataaataaaaaagatatacatcattacttacgtaattgtttgtattttgatagttttcgataatttctatgtgacggtttttaaaataaaaataaatgttgaataacaaaaaatagtagtacaatagaatactgaattggtttgtgtagggtcaaaccaacaaatatggaaagaaaagtattatttagttacaacgtgaaaacacaggttcgtgctactactccaatgatacgggtctcaaaatactcaaaactctggcatgtctcaattccacaaattattgtttaatcattctgcttcttctgtaagtttatatataaatgtgtatatactcaacgtaaatatttgcttacctcgtatattttctctcttctcaggcttattaattctctgcagataactgcagaagaaagaagaaagaagaagaagaagagattagagcttgagccataatatataatcccttgatcattagtctaaagaaccacataaaaagatgggattctggtcgttgttggaggtggcttctatgccggttattcaagttcttttcatgagtcttgtgggagctttcatggcctctgatcgttgcaagctcttccctgttgaagcccgtaattccatgaacaaggtaaaccaattcaatgatccttgactctttgaaaaaaaacctatcaaacattcgagatgtgtttttattgactttagcaaaaaaagatgtgttttaatgaactcaaattttgtttaggtggtgtttgtactatttgcaccggctctcatgtttgccaatctagctcagacggttacacttgaagacatcatctcatggtaagaattctcctatcaatttttttcttacccttgtttggatcatggtaacttagtaaagacggtgaaaaataaatcttccgactatataggtggtttatgccggtgaacatgggacttacatttctaatcggaggacttcttgggtggttggttgttaagattttgaaaccacctccttatcttgaaggtcttattgttgcaacttgttctgcaggtaaatgccacatattatgtggaccctgtcaacgtcatcatcatagtacctatattacgttagatttatctttgttttgttctcatggagaaactcaattttgcttaataggaaatatggggaacctaccaatcatacttgtcccagcaatctgcgatgaggacaaaagtccttttggtaaccgaagtgtatgtagaaccgtcgggctctcttacgcgtctttctccatggcggtacgttatgttaacgctataaaagtatattggtatgagatgtggagaaaggagaagcaaattgaatttctttttactggtaattgtgcagctagggggtttctacatatggacatacacattccggctgattaaagggtccgcaatgaaagttcaagccatagaagaatctgagaaaatagcaattaaatcatccaatagtgacttagaagctgatcataagacccatctcctcggtgcaccggaagacaaggaaaacaaagtggtaaaggaaaagacagggttttggagaaaaggagtagacttcctccatgagatattggaggagcttcttgcaccacctacacttggtgcagtaagttcaatataccgactagcattgaggaatataccaagagtgaaatgagtaactaatgttacatgtttgatgctttcagattatcggtttcattttcggtgcagtaagatggctcagaaatcttatcataggtgatgatgctcctttacgaatagtacaaagcactgcaaaacttcttgggtagttaccaaaatcttgtcatgaattacctcctgaccatttgcatcttaagttactaactttaccgattatgcagagatgggaccattccctgtatgactattatactagggggaaacctcatacaaggtaaatccctcaatacacagctcaggtttcactatcaatcccaaaaaaaaagaaacttacaaacttactgttgttcaaatcgaccaggtttacgttcttcggcagtcaaaccgatggttgtacttggaatagtctgtgttcggtacatagctatgccaattatcggtataggcattgtactaacagctgcaaatctcggatttcttccagctgatcctttgtttcagtatgttttgatgcttcagttcaccctcccgcctgccatgaatatcggttagtcataaatcatcaactgaggtcacacaaatctagaaataacaatactaacgaggaaagaaaaattgttacttacaggtaccatgacacagctgtacaatgttgctcaagacgaatgctcagtgctcatgctttggacctacttggtcgcgatactggccctcactgtatggtccaccatcttccttcacttgttagtctaaagaacctgcaactctgtatgagcacaagaagattctatctctctactactacagagaccgaagctctgtcaagggatcttaccattctttttgtctatcacataaaatttgatcataacttgatagatttttctggttgcatgcgtacctttctgcaaatcttcatttttctccatatcccgatttgtaaacgccaatattgtatcaagtattacatcaagtttaatgaaaaagcatatgaaaacagaggattaaaagtgatgcacctcccaaaattggcatccatctatagataatgaattgacgacacaatgtctttgacttcgataatgaacacagaggaaagctgttgacaatcggtccgtgccacacaagggaaagtgaaactacaaggtttaagagttttacaagagagtgagttggagtttcggtcggttaggctgaggctctactacctccatgtggatcttcactgtttgcaagacactgtaagataaacttccatccatcttaacaatcttttgcttctcctcatcaacataccaatcaccagctcctttctctccctttcctgttaaataaacagggccttcgattccatacctgcataatccataacgtttccagtgtaagaaaatataatgtgctaataataggaaaaagaacaagaatagccaatcctttggtaagtacacttttcccctaaaattgccaattgcaaaacagtgagatatggtggctctgggaatggagataataaacaaggataaggaggatcggctacacttgctaatgaatttatattataagcaaagaatggagaacatacttggggacaaatactataaaaccattggatcttatcttcacaactctcgcctcttcatctgtgggtctgcaacagaaacacacataattttctcttagtctttaccagtccatgccttaaaatcaagtaagattcatgaagaatatacaatccataccgggttctgaagtaaatgagaacgtacagctctactgaagctcgacctgccatctgggcattcctatgtcgatagttcaaatctgaaacaagtcaatgaattagaacctacaactctaagactcaggtgcattagtaaaaggaaaatcattatccctaatctttaagaaaaattcgttcgaattttagacatcttttccttgacaaagatatgaccaaacaagaccttaatttccaaaacaaatcaggaagtgaccaaaagactcctcagtttgcaaattttgtctgaacactcaaaattctggaaataataaaactcttaaataatccacaggaggtaagcgaactcttactatcagcaacactagtaagttgaggtctgtcttggaacaccgttggaagcttgtatattcctaatgacgcagcaagtaacctgtgcacaaagacatctagaaccagggaaagaagtaagattagagcagctaacaggtgaaaagagggaagacagagcagttatcacttaccggcatatctacggataggggatgtaaaatgagtatacaggggtgctgcaagcccataatgatgatattcgggaggactgagatccccactacagaagtacacagcctgcgtagtaataaatttaaaatgttaaatatggcgatatcctgtcaaaatcaccagcaatattactactcagtcatcacggaagcatcacctgcgtcatgcacctagttgccaatatcctgatcaacttgttgaaatatggatcctcaccctgatgaattacgaatttgttaatattgagcgaataaaaagaacgtaatttgaaacaaggaagtaagttacttatatagcatcaaagaaagtgacaattgcatttgattatgaatagaaagaaaccagggaggtactcagtggctgccatatagacagtgcagacaaaaagaaatactcaccacagctcggtccagtgaatcagccaaagctttagatgaagagacatctaaggtaagcccaatagctgcagcagtacgcagtagtggttcaagcatttctcttgttggagtaggatgacgcctgcatgaagaacgaaaccagagatatgatgaactactattgataataaaagtgaacagaaattcaataattgcctgtaaaaactaaacacatcctcaacagctacttgggatcccataatattcattatgctaaatatgcacaaaattatataatctaaccacctatggccaaatttcacgagaagactaaacaattcatgaaccagtgtatatatgcatctttagcaacagttgaaagctaatttgtcacatctcagaaaaaataaaatccgttttacgcagaggaacccatcaacaaatacagaatgattgcaatctttgagaaacagaccaccgatgtaagaaaaagctaccttcaagaagaaaagaactatcacaaactttaccttaatagtgaacaagaagggaatagtttcaggatctgtccagcgacggaaacatttgcagcaagcatgaattcctcaaccatttggtttgcttcgagaatctgatacatacctgcgcaaaacagagtcatgatgacaaatgaaaaacagatgaataaattgaatacatctttcagaaggatagaggtggttgtatttcatgggtgtttgggtgaaaaagactaagaaaacatcgttcgtattcatcaagaagaaacaaattttgctcagataacataccaatgttaagaggatcatgattctccggatcaatatcaaatttgacttccgcagaagcaagagttaaggctcccctatcgatacgcctttgcctcattatctacaggtttcaagagcaaaaaacaggtcaaaatgttgtgttctttctatgatttctggaacatatggcaacttgtgagaggaggtgtctcaaacctttgccaaggtattcatattcctcagatctgtagtcagggagtctgtcaatcggctacaagaaattaattacatttgtcaatcttcggcataaagtaaaagagggaatcttaaacaactctacaatacaaaataatgggataaaaattcatgaaattagaaagattaaattttctacaataattttttgacaatccttgctaccatttttctcactgtcaaatgactagagagcataaaatcaaataatttattgtagtagcaaaggtaagcaaacaagccaatgaccctctaactctatggtaaaatagaatgtacctgtcatccatccgagcctgagcttcaatataggacaatgctgcagaagacttgataatactctttgtgaatctcgttgagataatctcagcgtcagggctcatttcctaaatatatgaattatgcttaagctaaccgtttaccaatttgctaatatgcctcgcaatgacaattgaaaatggataaagcatacccaaataaccgagaatgcaagcctttccacatcagctctaagagagcaaatatctacaagcaatatcatgtttcatgagtgcatagaaattccaacacaaagggaatgtatttctgtaagaagatattaccttcagttaaaggtttgggaagcatgtcaatacggcgctcaacaaggtagacagatgtgcctctttttgatgcctcatcatccaaaggagtaccagggtgaacaaaattcgttacatcagcaatgtctaatcaaacatggtcaaggataagcatcatatatattcactcccaagacaagaagagaatacaacggaactagctacaaattctggaagataccgattcactaaaaggcataaagcagatcacctcaaaagcacttctcgtactagataattatgataaaagcgaactatgaagctaaaaggtaatatgagccatttcaatgctttggttaaatatatcccacaaactgatttttaactcattgactattgacatgtcctaaattgaaagcacagtcatatttatgagaatctgaggactctaggatacggactccaagttcaaagttcccgtttggaagcgatgtacagtgcaatgcatcatcaatatccttgcaacctgttagcaccaaataaagttaatctgcttgtgcacaactaactgcagactctgggagacatttaaatttggcttgaatcatatatactttataaaatgtaaagctctagatacatacccggagggtccacactaaagacaagcaaatgtcgtaagtcttgcctaacaggattggatacgtcttcagaggatacagaccaaggtaagggtggcaagcatgccagaacttgagaagagaacggcgagtagtcaacatcattctctatcaacacaacctgcagcattcacaagaaagagtattgatgttatattcaattatctaaatcagttacttctctgaagaaaggaaaccaatatacttttcctactcttgcccacctaactcctactagaatagaatcgaataaattaatatgatcccttacctctgtttcagtttccttgtcacctattttgccgattggtcgtacgtaatgaccagaaggatatcgagattgacggtcccaggaatcaactgccactactatcctcatatccaaaaggttctgcagctgtcgagtattaatgcggatcttgggaattctgcgatctttagagacaaataaagcatgtgccgttccaccactaccagcaggtagtgacatcggttcaagagatccacaatagctgcatgaaaacatacaaattaggaaccgtcatccagaaaccatggcttgaaacagaagacaaacttaaggaaaagtaaagcataattgcacagacaaaggacactgaatcaagagtactaaagataatcgtccagtcacatatgtagtcaccagaaacaggtacctctaatgagaatgtattaacaagtctgttaacatgatctcatatgatatatcaatgtctcaattagaaaaaaaaacaagcaagaaggtaagggtaatcaagtaatgaactcacgagtgccaatttctacggataacaccgactacacggcctgatggacgaacaggggctgcatttttatccccagaagtttcatgggataaatttgaggttctaggagcatcatcaacattgtcgggagccaaatgaacagtatcatcctcttcatcatctgcatttgaatttgatatttggaagaaagataagtttaacacaacgtcatgcaaggaaataactgctgtaaaatatatgtagatattgaaagagaccttcttcagctatagataatgccttctcatcttgccattgatcccgaggcaagagttcgactgcaacaatatcaccatcaaaagccctgttcatgttgctgcgcccatagataattatctcttcaccaatgctctcgcttccaacataagcttcgtaaggattgaaacgattgacccggagttttccttgatgatatattccacggtgtaagccagcagtaatctcagacatgggcttatgctgcaggcaggaaaaaaaacaaaattggagataaaagttgtttgatggcagtatcaagttacccaaagctgagactgaaaaacaaatgtgtttatctccattacctcttggtatataagtttcctcttcgaaggtctagaatcatctgcatcttccatagttatgtcttcattggttggttgggcaagcagatccagcaattcaggttgtccaagtgatttaacataagcctcaactgatacagaaacattcattgataaacttcaacatcatgtagcaagacacacaaacagtcatgcaaaaccaagcttcgacaacttctatgaaaaatatagatgattcacatacttgtctccgcagatattccctcttcagtggccttccgtttattttccctatcattagttacaagcaacacctgagatgtatcccctagatgcttctggtaccatagagtagcgacgcgaatagctgaattccagataaatttaaaattttaataacagatgcttaccaagagaagtatgtaagttcatcatcaagaaagtaacatgatgttaacaaacaaagaaggtgattgaatagtaaataaaacctctatcgttgtggtcatttgcactctctttctccatggcttgcacataagtatccctgtgaagagtttagtaaacgcgagaaaacaacgataaggacacggagaaaagcgtttctatagcttagtaggttccagtaaggagagcatctaatcaatataaccgaacagaaattccaaaatcattgaattctttatgttcttttgtccacctaaaatctggttaatctaaaagctaaaagttcgaacaaggtcttcttacttgtggacatgattggagaaaacatagaattgtctcgctggattgctgcagagaagtctgattctattgtaaaccgatctattcctgttcttaacttcgtccaacaccacagacagaacaacaacagtgtctatagccttattttccaacaaatcaatctaccagaaacaaacaaaatattacattagtaatacccacaagctcaaaacttttagcttatgtaatcaaattaaagaaaaattacttggtgaagaacgacgttggtatcaacaacgattatcttagaggaagacaaacgagcagctgaagaatcacaagacttgcaagagaaagctccacagtatatgtcatctcgtagataaacctctcttacttgctgtcgcagacaaagagttaaaagttacaataacgaacaaaaaaactcggaaggaagaagaagaagaagcatagagagattgaagagaaaccttttggattcttcctcctctggttttcttattgaaaactttgctctgcaacatcttcaatttcttgctggaaaacttttcgatttcgccggtgaagaagatttcagtcgtcagaacggaagagaggaagaagctttttaaagcctttaaatttaaacctaagccagccaacttgactactaaaattttcaattctatagctccttattcgttcatggttaacgaaacgatgacggttaaaaccggtttagttactttttctctaaccggctcaatctgattaaaccgaagtaaacacagcaatacagctagtaaactcggtattactcttgatggaaaaaggtcaaaaacactctttttattttaaccaaaactaaccaatttttgcaagataatattgcatacctaagatcatttaccttgatctcatagaaatttttttaatgatgcatctccaattataccgatacaatttctagtaaataaatcagtgttcaataaagtgggataggcgtcgtctaggacgcctaggcactaaacgcttttataccgttttgactttttcaaaatcggttctattaatcagtgagatagatttggcagactatgtaaacattaagcggattagactctcattaggtgggttaggctaggcggatctaatcgtctcttaatattttttaaaaatttcaaaaatatattttaaataattttaaggacacctatactttttattattttattttattttactaaaatgttaaattttaaatttatttttaaaaatttgataatttccgttttttataatagtttttgcaacagttcagataatagtatataaatatatatcgttttattctaaaaccgattaaaccggctaaaattgtctaggcctcgactaagcgttctatgcgctaagcggagggtcaccgccagctaagcgcctaacattttcttaaacactgaaataaacacaaaattatatgataagaagtacgattaaaccaaaaataatcgtcacaatttttgccactatgtctaatgtatatgtgattgttttacctttaacaaaagaaaatgtgatttatttacctttaacaatatgaaaatttgttttttttaacacaattagtaattttagtgatattttcactcgaatttgttgatagcaaaaggtgtttagaagaccaaaaagcttaacgcatattggctcggctcggccgaataagttagctggacagtacggtggggcacacgaagatccttaaaccgcagcctcagacaaaccttactcgaagcaaaacagtgtttggttcgttcgtgggggtttaaaaaaaaaaaaaaaacttttgtatttttttccattaaaatatttttttgttaagaagattcaaaaggagaacgcgttagacacactaagggtgggggcaagggaggagaaactcgccggacagagacggagatccctaaaccgcagcctcagactaaagcttcgcatcttatctccgatccatcgttgacttcactcttaggtaaattcgaaaaccctttctcttatcttttatctcccaattcttaaattcgatgattgactcgtcctcctctgttttttcacagctgatcatcatcatcatctctatctctgttcggattctccataattgatccggaccatgccgccgagatgtcctttcctccgccatcttttcttcttactactattactctcaccatggatcatgtctccttgcggcggcgctgccgacgatgtgacgtatccgatcgttccatctagtcccggccgcagatcaattttgcagattcgtcggtgagtttcttccatcctctgcatgtttaaaaatacttagttagtatttgattctggtgacactgttttaggtatcattagcattgtaaacgtgatggactagtgattaggttttggtggtggcaagaattggtttgattacattttgatagatgtttttgattcttctctatgtggttactggttgtgatgttatctgtcttctactcagtgaaccaccaacagagccaaatacgaaacttgttgttgatcgtgatgggaaggtgtttttaaagcagcaaccgaaagaaacaccatactggtccttttcaacaggatcaccaatgcactcgttatatcaggctcctgctaataacaacacagaaaatgctactgagataactcgtcctcacataattgttgaatatctgaacaactcaaaggcggctactactgtcgatggctatcataattgggtatgaagcatctctctctttacttcattattactggactttgtttatcttaactttgtttcggcacatattcactgcagacagttcaggagttttttaggcagaagccacttgtaacagatgatggtgtgactcttggatcagaaacaactagtgcctatttggttgatggtagatcagggaggctgattcatgtttacaaatcaactggagatactaagattactaatgctctcgtgaagcccgctagcactgaagattttgtgaatgaacctcttcttatcaggcgaacagattccaaacttgagcattttagtaaaaccactgggaagcttgtctggaatttgacggtttctcacttcagagctgctttactatgtgatcctgttttcaattctggctatgacctcggtcctaaacttcaaactggaatttatatgccattgttatgtggatcacaaattgacgttcgtggcccagaaattgttatcagggtgctccatgatcagccaatgaatgtgaaaatgctaccctccccttccctaaatcacttcgagagcgaaaacagcatcatgccttttggaaaagccagagagtcaagaaagttacaagagcaacataagcagaaatatacatatttgtttggacaatggtcaccagtaaagttattggcccctttagtgcttctaggtgttgttgtctctgttttcattaaaaagttttcgtcgaggggcagtgatgttagtttgaaagctggaccttccaaaaagaagaagaaccgtaaatccgcgaaggatacaaataggcagtcagttcctcgtggccaggatcagttcgagctcattgaaggaggtcaaatgttactaggcttcaataactttcaaagtggtgcaactgatgggagaaagatcggtaagttgtttctgtcaagtaaagaaattgcaaagggaagtaacggaactgtggtgtttgagggtatttacgaaggccggcctgtagctgtaaaacgccttgttcgatctcatcatgaggttgctttcaaagagattcaaaacctcattgcatcagaccaacacacaaacatcattcggtggtatggtgtggagtatgatcaagattttgtatacctttctctagagcgttgcacctgcagtttagatgatctaatcaaatcctatttagagttttctatgacaaaagtattggaaaacaacgattctactgaaggagtggctgcttataagatccaacttgattctttggagggagttatcaaaggaaacaacttttggaaagtggggggtcacccgtcacctctcatgcttaaactaatgaggttaatttggacttcgtacttttttatatatgtcataatattctttgattaagtgatgttctatttgaacatcaaaggtagctatggttctgataagtctaggctatgtgatacaataaacagtagaattagttcaaaccttgtttactgatttactgtttaaacttatatttttcagattgtttgtattgtgatgcagggatatagtttgtggaatcgtccacttacacgaattgggaatagttcatcgggacttgaagccacaaaatgtgttaattagtaaagatatgactttgagtgcaaaactgtccgatatgggcattagcaagcgtatgtccagagatatgtcatcattgggtcaccttgccacaggtaagttgttttttattatctttttttatgcccaaaatattggatttgtaacactttcaaaaataggactgattgatctcgcaaaacaaaactaacactagagaaaaactacataatgtcataagttggtcaatagaatgcatgttagtgtctgaacgcaatgtatgatcgtttgttgaatatgtgttatgtttatgaaatgagtttcaacccacatttttaaagtatctgctttaaaaactacaggttctggcagttcgggctggcaagcaccagagcagcttctacaaggtcgtcaaactcgtgcagtcgatatgtttagtttaggttgtgtcatcttttacactataaccggttgtaagcatccctttggtgatgatcttgaacgagatgtcaatattgtgaagaacaaagtcgacctatttctagtagaacacgttccagaagcttcagacctcatatcccgtttgttaaacccagaccctgatttacggtaatgttactttcctctctgatgattaaaatccactcgaaaaagcctaatctcttatacactgtttgctctttgcagtcctagcgcaactgaagtgctactccatcctatgttttggaactcagagatgagactgtctttccttcgtgatgctagtgaccgagttgagcttgaaaatagagaagctgattctgaaatcttgaaagcaatggagagtacagctccagtggctataggagggaaatgggatgaaaagctagaacctgttttcatcacaaacatcgggcgctacaggcgttacaaatacgatagcatccgtgacttgttacgagtcatcaggaacaaactgaatcatcatcgagaacttcctccggaaattcaggttcatcttataattgaatccctcaaacaccgttacattacactcacgggcttaaactgattattttgaaacttttgatgtcttaggaacttgtcggaacagttccagaaggattcgacgagtactttgctgtacggtttccgaaattgttgattgaagtctatagagtcatctctctgcattgtagggaagaagaagtattcagaaagtacttcaaatgcgacatcatctaaaagactgtttcgcttccagcactttatatgttagttattgtatgtttgtcattgttatataacataacttaactgatatctaaatgtttaacgtataacttaaactgcaacatatgtagtatttatatatgtatatatctcttcaagtaactatgtttcaagtgacgtattctgcaaccgaataagatttgtaatttagaaatgtgtctcttttactcagaatctagttagagtatttacaaaaaggttaaagattagatattaagaattgagtttagtaaaaaaaaaaacaatgcattgaatatactaacggaaattatagttggagtcttcttattacgatttcagttatattggccacggtgacgaacaatctaacgccataagaaaatgtattgaacaagaatgatcaaacatattttgagtttttgtttaacgaaaactatgcattaagacttttatatttttcattaaactaaacatatttcgttgttaaatcgaacgtaaaaaagtttacgggaaaacatccatcgtttctggtgcatgcaaatttctttgctctctagaggttaattctcattttggaaatccattttgatcccgtagacatctaatttctccatcaagtcatgtttggcgtaaacgtgtatgattttgtcttgttttcttcaaagcttatcactttggttgcttcatatctaacatttctcgtatatgctatagactcgcatccatttttgtataaccttttttatcttgattttaaaaatttcttttccgacctctataatttataactataaataaaaaactgtctaaattggattattaatcgactgaccaacgttaaaacttaaccaactaactgagagggcataatggatatcttatttgacaaaattatgacgcctcaattacccccttatagtggcgtcatgatgggaaccaaacgattaaccccctcaacatttgtgtttctcatattacaacgatgcaaaagttgatcgcgaaattatggctgcatttaaatttttaaatattgtttagtgttttctaggaagagtaataatagtaaatataagaattttagaatttcttctaaagtgaggatcgagtggacttgaactcttattcacgatactcctccaaaaaaaactgttgttgtaaatgtaactcaatatgcagtttatacaacaaattttttacttcgagtcatgccaaatttagaacatcacatacattcaaccaaactaacattaaatttatgtgttgatgttttagtgccactaatatgatttgttcaatagttggtacaagaacattaaatgtttgtaagagagataaaaaaatggacatttttatagtatttttgcagcaaattttcggcgggttggtaaaagtgattttgtatataataggtatcagacccgtttagaatttttggtcattcaaaaatcattggatcggattatatataatccaacttttccaccggatatatatttaaaagtcacatacaaatattactaaaattggattgtatctactaattacatttatatatttaataaaacaaaaattagaaaatttggttttgatttaaatttatgattctcctttcatcttttttaaactgttttaaatcatcatataatacataaagtgaaaaaaatctcaattttttcttatgcatatattgtgatttcgaaattttttaaaacggacatgtattacttaattaatgaaaagtgtgttttcaacgtcccacatctgctataaagtttagacaatgatttagattcatattatacataaaattaaaatgaatccaacttcgaatgagtataaaccttaacataacaagcatccaaatttaaaaattgatgtacgaattaaatcattggtaaatatgcttcacattatatttatatgatctgctgaacttatgttggacttttgaattgagtagagtaaagggaatcatgacctcttatttttcgtcattcaagaaaaaagtcagaaagaactagagaagggctgctaaagaagaggaaagaagaagagttgaggaagagaaactcatccctagtctgacagaagaacaatttgcaaagaacatggacttgatgaggaaaaaagttgaccgctttcactgactacatggtggtaaagaaggtggaaaaaaagaagcgaaagatgctaggggcattcagaaagataaagcttgatattggcaactaagaaataagtataagaatgttcagagattcgagaaatttgacgaagaggaagagtaattctgaaattctatctgattactttctatttagtctcttgtacacttgtaggacgaatcttattttgtgttctaaaaccattatgaccaatggtagtgtgataccatttaaatagtgaggaagaaaggctggaaaaacaattaagtaacaataaatagattttgcgactattgaaataaactggtttgcaggtgatcgaggtttgattggaattcaatagatcaatatccgatgaaataagattgatttgctttctctctctaaaagatttaagagagaagatagaaaaaatcatcgcccattaaaaaaaatagatattaagaatttgagttttataaaaaaataaaaattcaatgcattggatattactaaaaggaaactatagttggagtcttcttattacgattttaattatatatagttggccatttttcttcgaatctaaattacggacccatgaggaaaatgaccgttgtctccgaacgggcttcgtgggcttattgtttgtaaactcacggcccattgacgtcttcttatttgattcaagaccagaaaccacgttttgtactgtagtcttgaattgctctgttctgctgatagaatagcaaagttctgttctgctgataaattagcaaagtaaatcttgaatgctagtttgtctttttctctcatgttatgtgtaagaagatgatgatgactctgttaggtaagaaagtccaactttgtaatctaatcagatttagtctctaattgtttacttgtgtctacatataaaagttgcaagttgcagatgttaagaactaagaagtggtatctgcagattttgggtattaaggaaagtttccccctttgaataaataaggacatatactaatgtaaaggttcctcctttttcacaaatcaaaatgtgtttctttgtgttctagtgaaatccaatccattgtgtctctgatgctgagaatcttgaagctttcgacatcttctcgatctgtgccattgacaagattatggcttcttcaactgccttgtttctgctcatcttcttcatcatcgtcttctttgctttctgtgcccagcgatgatcatatcgtccgtctcattctagaccagaaatcagcttctggagctttggaaacttttcgatgggcttcgacttttcctgggtttatccattctcgttccacttaccgtgctctgtttcataaactttgtgttttccgacgttttgatactgtctaccaactgctcgacgaaatgcctgactcaattggtttgcctccggatgatgctatttttgtaactatcattagagggtttgggcgtgctcggttgatcaaacgtgtgattagtgttgttgatctagtttcgaaatttgggatcaaaccatctctgaaagttttcaattcgattctggatgttttggttaaagaagacattgacatagctagagagttttttacaaggaagatgatggctagtgggattcatggtgatgtgtatacatatgggattttgatgaaagggctttctttaacgaataggattggtgatggttttaagcttcttcagatcatgaagacaagtggtgtggctccaaacgctgtggtttataacactttgcttcatgctctttgtaagaatgggaaagtcgggagagctaggagtttaatgagtgaaatgaaggaaccaaatgatgtaactttcaacattttgatttctgcgtactgcaatgagcagaagttgattcagtcaatggtgttgttggagaaatgttttagtttgggttttgttccggatgttgtgacggtaactaaggtgatggaggttctctgcaatgaaggccgtgtgtctgaggcactcgaggttttggagagagtggaaagcaaaggaggtaaagtcgatgttgtagcttgtaacactttggttaaagggtattgtgcgctagggaaaatgagagttgctcaacggttctttatagagatggagagaaaaggttacttgcctaatgtggaaacatacaacttgttgatagctgggtattgtgatgttggaatgttggattcagctcttgacactttcaatgatatgaaaacagatgcgattagatggaactttgctacatttaacacgttgatcagagggctttcaataggggggaggacagacgatggtttaaagatattagaaatgatgcaggacagcgataccgttcatggggccagaatcgacccttacaattgtgttatttatggcttttacaaggaaaaccgttgggaggacgccctggaattcctcttaaagatggagaaactttttccgagggcagttgacaggagcttcaagttgataagtttatgcgagaaaggcggtatggatgatttaaagacggcctatgatcagatgattggagaaggaggagttcctagcattatagtatcccattgcttgattcatagatacagccaacatggcaaaatagaagaatcacttgagcttattaacgacatggtgaccagaggctatttgcctcgatcatcaacattcaatgctgtgattatcgggttctgtaagcaagacaaagtcatgaatggtattaagttcgtggaagacatggctgaaagaggttgcgttcctgatacagagagctacaatccattgctcgaagagttgtgcgtgaagggtgatattcagaaggcttggttgcttttctcacgaatggtggagaagagtattgtccctgatccttctatgtggagttcactgatgttttgtctcagccagaaaaccgcaatccacgtaaactcctcattgcaggacataatccaaagttaaaagctagaggcagtgacataaatgatcattgagctcgaacttgaggcctttaataatgcatctgcaacaaatacgaagatggctccaaactagcaagcagagagatcaagatggtacgtttgcttcttttgaaaatctgttaaaagctttgggagaaaaggagaatgcctaaaatcagaagaggcagattttaaacaagaccatgagagaagggcaaaatggagaattggacatcgtcaaaatgggaaaatgtttgaagcacacccatcaataaaaaaaggacaagaggagcaaaaagaggagagagtcttacgtttcgtgctattcctctctctctcttttatctctctttctcgagaaaactaaagaaaagggggctcttttattcaaagatccaaactttgacaattcaaaatccaacatagaacacggatcaagctttcaaattcagacagagatatgtcgtgttcatcctcatctggatcagaggaagacgatgagggtttcgatgcttaccgtaaaggtggatatcacgccgttagaatcggagaccagtttgccggtggccgttacattgctcagagaaagcttggttggggccaattctccaccgtttggcttgcctatgatactcgcacttctgtacgcatctctctccttatatcttgctttactatgccaacaagatcttaaatgcagaatttgatttcgtaaatttgttttaagcatgttcccgttagtcttctctaattcctttcatctgggctttgatctgttttggtacaagatcttggcttcgtgtgaattaatcttttagataagcaaagttctgaattttgtggttctgatttggcactgcactctgtagttgaccaaccattgcagtttgtttaaatagcttagtaagggaaatgaatgttctattaaatggcgctgttccttaaatgccaacgttactctatgggtgtctcattaactataggcttaatttaatgttttgttctcttttgagctctatctgtggagtccttttaccttgtctgaagcagggaaacacttctacgctcttagattctgatgtttgctcttagaatgtaagatgcccatgactttatattaaggaattccgctgaagtttttctaaaagttacgaattgaaattaaattctacaagctccttgtcacatgtaacctcctctttggctttattctcattagttataataaaccatgtgtttttatctgttgtagaattatgttgctttgaagattcagaagagcgccttacaatttgctcaagctgcacttcatgaaatcgaacttcttcaagctgctgctgatggggatcctgaaaataccaagtgtgttattcgtcttattgatgacttcaagcacgcaggtcccaacgggcagcatttatgcatggtgctcgagtttcttggcgatagcttgctgcgtttgattaaatataaccgttataaagggatggagttaagtaaagtgcgggagatatgcaaatgtatactgactggtctagattatttgcaccgtgaactcggtatgattcactccgacttaaaacccgaaaacattcttctttgttccaccattgaccctgccaaggatcctatcagatccggactaacaccgatactagaaaagcccgaggggaaccaaaacggtacatcaacaatgaatctgattgagaagaagttgaagaggagagcaaaaaaagcggctgctaaaatatcaggaagaagagtttcgatagtaggtttaagtgaaacaccgaaaaagaacaagagaaacttggatgggattgatatgagatgcaaagttgtcgacttcgggaacgggtgttgggctgataacaaatttgcagaagaaatacaaacaagacagtacagagctcctgaagtaatacttcagtcaggttactcttactctgttgatatgtggtctttcgcttgtactgcttttgagcttgctacaggcgatatgcttttcgctccaaaagagggaaatggttacggagaagacgaggtaaagatggtttttaagaaacctcatatcgttttgtaccaaagagttattttctctttatcagctgtttaacacattcttctttactgtcttcaggaccaccttgctcttatgatggaactcttaggaaaaatgcctcgaaaggtacccggaaaaatacttggtttctgtctatctcttgattgatcggttatagtctcgttgatacttgtgatttaactagattgccattggaggtgcgagatcaaaggattactttgacagacacggcgacttgaagaggatccggagattaaaatactggccactcgaccgtttactgattgataaatacaagcttccagaagcagaagcacgagaatttgcggattttctctgcccgataatggattttgcacctgagaaacgaccaactgcacaacaatgtctgcaacatccatggttgaatctaaggacacagaacaatgaagatgatatagaaggtcagatgagtaacatgcagatcaaaggttcatgttcttgatttttttttgcttacaaatgatatagaactgctctctctctctttttggttaattctttggttcgtttccatttgaatattgttaaaagaatatttgttttgttcttttttctttctttttttttgtcttggaagatatgatcaatgactaacaatgggtttcatataaacatataatgtagttcactgctctcttttagtggtagtgactagtgagtgatatcaaaccaaattttaattccgattattcttattagtttgtctttttttgttttttttttaactctaattacaagaaagtttccacattgataatgtaagaatacgtgtaagatggaaaaatgacacatcaaaaaataaatttcagtagatagatgaaggaggtgaggccaactggccaaggcttgatttctcagttgtgattgttactcaacatatggttaagccagagagatggaagtattaccaaatcaagaacacagaatgggagttcctagatgtggtcgaagccaaatttgtgtttcaacaacaccagccttcgtaggaaaataataataatatcaaactcataaaaagcaaaaaaaaacaaaaaaaaataataataatatcaaattcatgataatttgtttattctttagaacataaactaatacaaaaatagaaatcaaaatgggataatcagtccagtagcaaaattatcccaaaataaagtgtatatatccatataataatcatatttttgacatacttaaataaaaatttctatttcacgtggatttggaatattttgttccatttgtcacgttctaggctactagggccagtctttgtagcaaagaaacatattacaaagcagttcaacaattggaaagatgaaaaaaaaacctccaaattattttctccaatttatgtctccagttatatttcactttaaatttccattaaaaccaatcaacacaaactccaaaggcccataacaactacaaaacctaaaatacactaaaacaaaccagctcatgcggcaaaagaatgttgcatcttgcagtcaaacacacagaaacaaggatgctaaaactatagcaaaaagttacccctgaattgaaacaaggcaaaccaagacgttagaaaagagaccgaagtaagaatagttcgttgagttcaggataaaagatcaagatgagctctaatggctacatgtgatagtgagagtcgaagacctcaaagaacctgaatgaatacgaaaattctgtttcttttaaatcacataaacggctgtttaatttggaagatttcttcactttcaataacaagtctaccaataaccaatagatataagatttatgaatcactacaaaacaaaatcatgaaccaatagatatcatcatcttattgacacccaaggattaacactaacaaaaatgtaattatctaaacaatctaaatggcaagatgggtttcacttcacatgtgaacgtgacggtgacggatcatttttgttgtgggttgctttgtctttagacatttgcaaaaggaaaaaaattgtgacgttatatctcctccaactacgaatattcacgtgaatctgcacgtgacccagttgtagccacacaatcaaaaatcaaaaaaaaaactttttgttattgtaattagtgaaaattctcttcttgaaattaatatagatcttattgaaattattatttttatttaaacaacacaaagaaagaacacaagtattttcgaagataaattagtcttagcactgggagaaaaatgacttaaaacaaaagaaacataaaggcaaacaacaaaaagtcatcactttaataacaacacttacactgattaaacaaccaacatacatatacaaaatctatgtatctagatattattcccaaaatatacaacataaaatcaaacacattacccaaaaaagcaaaacaagataaaaataaacaacattaagattgtactgaaaatgacaatgctgttgaatctgcaccttcttacctcttttaggtgtaaatacatataagaagactatgaacgtacaactttgttctgcttcacacattccggtgactttaagtcctgacacttccatgatggtcgttctataacctgagccacaccaccattataaccttccgacttacttacacttagattgttttcctctaatgtgataccgttttcttgatccttgtaggcacacatgctcaaagggagcttcactcttcctcttcttttccctaatgagctactctcttcctctgttttctcctttagcgtgttatcgcataagagcagcttcccgtttactctggttccgtcatctgaatccacaacaccagcaacatcattcccatcgttcatagtactagtcagagtcttttgcttcttgtttctgtgaccagaacaatccgtcaagactctaggagaattgtttatagctcgaatcaacctaggctctttacaagaaaccgtctcagctgcgggaaaagaagcaaacaattccaacgcattcttggctgcagccactgctttagaagcaatgatggccttctcattagcagtagctctcgccgcctttgcaaccttaaccgctaaagcagcggttgctttcgacgcctgagcaagctcttccggggaccgagtctggtcattgagtagatggtcgagatgatgagtgtgcacaactgctgaagcagaggaaccatttgaagttgtagtagacgaggacgaagaagcgaaaggaggactcggagattcattgctgattctcgagttctggttcttgaatccggcgagtaaacgcttccgtggaggtagaagcgaatcggactcaaggcacgcatttgtcgccatttatctcgaattaaaatcctaaatcaggatcacattatagaatctgtaacaatcaatacttcaaacaaagaccaaatcctcaaaaacatcacagatcaaaatatttaatccttaaaaccaaattatcaacacttgatcaaacaaattctcataaaaatcataaaggagagaatttatcaattataaggtggtgattgatcaaagacaattgctcagagtttaagaatcaagctagagagttccttatagagtacctgaaattacaagatgaattcacgaggatgctttgaagttaccttatcatctctcaaacagagatgagagatacaaacacagagagattgagagatggagaaattagggttttcagagaaatggggaagaagatagagaagagaggagatttgttttgtattgttgccatcgctctctctgatccgtttttcgtttttatatgtaaaccctacgaatatcagttttaattatctcttaattgttatttttttacttctatctaaattaacttacgtttctttcttttacatttaccttttccatggaaaagtaaaccagaaaattaacttgacaactactatttgcttttcgttttattactaaactgtaataacggccgtcaataactctttgtttttttgttgtttttttatttcttaacggagctaattaataagttaacagtagtattacagatgtagactttctatttgtagaaattaaaaaaatgacttcatagatgtactggaggcctttttggcaagttcatggcacatttggtagcaaaagtgtttcaagaggaagcacaaactatcataaactcaaccatttttctttatcaaaaaaaacaaaaaggagtctgcttaccacaagaaaggatcgatggttcgaaaacttgacgtcaacaatcctgcaagagaatttttctgatgaagtaaaccaccataatttattggaagaagtctgatttgtgttggccgactcaagaaatgctctctatctatagtaagctccatgagcgtataatgaatgaactcccactcttccacttgcctctgagttttacaattcattttcatacgcttcattagtctctaattgttttaggcccatcagcaaaaatatatacaaacaagcctgcaacttcttctttttcttggcaactataagccggatcatttatgggattagcatattaaagtctgtgcttttgtagatataggaacatctcatgtttcttacaaatttaggtacttttatattatatggatgactgttttatccttcaatctaattgagtttcttctccttgtaccttcaatctaattgaggagaattcatcaatatcaatcgatctcagaaatgtgcgattatttctctctctttctctttctctaatggcatggaatctattgcctctaaactcaccattgatgtccattgcttctccatcaccttacaaaattcagatctatgcttggccaatcttcttcctcgacgatgcaggtggtaatcttccatagcttttttgaatttgaattgtttgatctgaattaatttcatcctctcttgcttcaatttcaaagagggataagaaacaattgaaaattttaatcgactccaattatttaagattagtatatttgggttccctatataatatcttcttagggtttagctttcttccatcaaaaagcttttaactgattttattggggtttatctgaattgtatggtgatgaaacgttgttaacagattttctaatttttgtctctatcgattttgtttccgtaaatacatcttttgtgtatatattgtcttgtacaaagaaacattgattaagtagagaaataggataatcaatctctgtacttaatacatcatccattgaagcaggttaggaatcgatccaatatgaggctctgcaaaaacaattcagagaagattctgcaaaaacaatttaggagaagaaggagtgaaatcgcaggggcaatttggtcaattcatttcccaaaaactgcctatcttcataagcccaatcataatgtgctctttctctaatttatggcccaaaatgtacccaatattataaaagccccagtataagcccccaatttctgaaagtttttaaatttgcttttatttcctaaaacttgtctataaaaaaaatttcctgtaaaacttttttagtttgggaccctaaattttaaaaccggccctatacaaaaccttgagatatctatctcgttggattatactgtatctttaagaatgttgagtgacatttcatgttcatacatacgtttgaaggttttcatcgaagtggctctcacttaggatcgaaaccttgtttaccctcaggcctcagtattatgttgcatataaatctttttataacgaactaatacgcatattgaaagtttgtaaggaaaatattttgtagtaaaatctagaccttgttatattggttcagtgacatagtgaatgttagtacaaaatagctatttgttacaaaatccacataagatggttgtatttatagagctaagtaaagtcttcatacaatcatgtatgcacacatgtgttggaagaaaaactactcttaaaacataatgataatggccaaaataattgatgctaagaaaattatcacaatagtcaatagtggtctgtctgattcatcaatgcaaagcagacaactcaaacccacccctaaacaagtgacgactatacaaatgtttaaatttgttatgaatgtgcagtctccattaaagtttagaaactctttttagtattagtaaaatatcagaagaatctagcttccttatactgtaagaaaacatatacagttaccatgaaaactcccttcttcaagaaaaacaccccataaaaaaaaacctatttacagaaacacactaaaaaccattcatattcaccaaaccaaaaccaatcagatctgcttcaacatcttaactcttatcttaagttcttaacatatttgtcttcttagatccttaacaagttcctcaacaagatctgccatgatcataccttcaacttctttccccaacacattaacttcttcaccaatcaaagcactccatggaaacctatccatgtcccaaccaatgatcccatccaatgaacaaaaaggtctctctggctgagaatataaatactccgacatgatcttccatgttgattctaacagatatttacctcgtatagtcgttgattcagacacagatgaactcaaaagtttgttcttgaaacctgactttgtcaatggtccaagcaccaccgtaagtacttcattcagaagatcaaacagtatgttgtgattttcttcacttatagtagtctctcctgtgtcgtcgtcttcttgattctgattgcttcttttcttgagattctcttttgtttcttcaagaacagacttttttataagctttgctaatggatcccatctagacaatgatatatctgatgtgccttcatacaaaccagaagccacaagaagatctctcacaaatactttgtctggatttcctaaatcaactatggtctcaatctcttgaatcggttcttcttccacaggtgttcgcacttgtacctcggattcaagctcatttatctgtcttcttagttctgaatagcagaaacagagaatgagaaacaatgtgacacatttcaagaaaaaagagaaaacatcgtttagttttcttaccacttagattggaactaatgtctctgaaaacttgaggcataccattctcatccgatacagtcacgtcaggtgttgaaacctggctgagataatcgacatttctccagaactcttctggtgtactactgcagactgatgcagggcttggaggcacttctgttgaattctcctgagaaagacagaacttgttttagtttagactataagtaccaagtcattgataaaagagagagttaagaagttcttacatttcgatcgtaaaagttgttaaacttcgatccggtcacgaagtctttgattgattcatcctcgaaactgtttgattcgatcattgaacgtatcttcttaccaaagattcttcctctaagagttgatctaaagctggacactttcttcctaagattgaatctttctttcctcctgattggatcaacaacaacaggttctgtttctgattctgtttcttctcgctctgttattgtagcctcgtgcttcctcatgatctgtgcgcctgtcaaaacatgccggtcctctaacaaaagcttaccaaacgatgtccctgagacaggagcagatagtgatcttttgagatttcttggtgataaagactctttcttagaaacatcttcttgattgatttcctcagcttgtttcgctgcatccgacacagtaggtcgcaaacggctactagatttggtcacagaatcatgtgaaggagtcatctcttttctcaaaacattcttcaatctctctgccaaaagttttctagtatctctacttataaactcagtaggagagtctggtgcattgcactgaacctcactcactgcatatgatctcatcgattcagacctcggagaaggtctttcgctgaaaggagtctcgatcccgcttcctctaactgatgaacttctcttgagagctgcttttccttgaagctcaccttttaacctctctttaacttcctcaagaaactcttctatactacttcctctgcttccttccattgtcgtccctgaagaagtagtcaacgaatcttcgtaatcataagctctctgaagaccaggtctcagtacaacaatcctagttggagcagttctatcagatttcaaggtaaaatctctaccaaagctcctagttctcgtgaaaagcctctctttattctcatcccgagccaccacgcagcccgaatcaacgattcttgaacaatctttaaaccttttatcagcttgccaagcttcaaactctcttctgaatctttgtagctcctcttcttgaggatgttctctacgcattggtgtctccattacatccaatgcggtcactgctgaagataacctcccttttctacttcttcttcctcctttctcatcatcaaatctattcactttactctgacgaggatagatccaagccgacgatgacttaacagactctaaaggaagtgcatccattcccattaacttagctacaagactcggcgtgttctgcttatcgttggaacgtttcgaaagctcctcgattatcttcttcttcattgattcctctattggataacaacttctctcgtaccattcctcttcctcaaatccattactctgtttttgttataataaaaaaaaagattcatttacaagtttttttttgttcttttcagttttagatataaaaacaaaagtatgttcgttattatttatttaccggtttatctttcccgttatggtatgtatgaaagttgtcgacttgaagctcgaaactatttcttggagcttccagatctgcagaaaatattcaaagacaactaaaaatgagtgattgaataatcttcaaaaaaacccagaaacaagatttgatctttctcagttaatatcatttaattcagtgaaattgtttaccttcgtcgcggtttttgtgatgagagaaaactttacgggagaaactgttgttgtggaaatcgaagagatgcaataatcctcccatttctccggcgattggagatctccggtgaagtgaaattaaaaaagaaaataagagaggatgagaaattggatagttcaaacagagatctgatgactcatcagagaatccgacaagagagagtgaagttcggaaactggaactatgaatttgtctttaaagagagaaagaaactttattaagacagacaaaacagaacagagtaataagagagacagattctgaaacagaacagaaacaggtttttacgcaaagaatcgatcgagaaaggaaacaaataatatcagaaatggaattgtcttctcgtgaatcaatgaagcatcgaaaaatggagattgggaaaggatgagagaagaagaagaagaattgggggagagaagaacagaggaaagtcgttttcagacagagagagagagagagaagaagaagaagaagactaatggtgattagtagtaaggaaactgacgaaacacatctcatccaaagtacggaactccggtcgctttctcacttttgatatgagagagagaaaatgataaaacggaattttgcagaagagagaagaaacgtggagattcaatgataaaacagagtattcttctccgggtacgtacgtggttcctgtgagccgctccaaaatttttagtagttattattattatgttccaaagttaataattgttgattttcattattggttgagttttttcctgttaaccgttatcattaatctcattattttttaagaaaaagaaataacttatcattattgtcattattgtgaataagtaacaaagaaaatgatcatcaagaattattgaaattaattttctgttttttttgtttgtttggtagcataaatgttttgagtattaattagtttggcaggacctttttcatgtatatatatatcatgaataaaagtgtacatggaaggtagtttttaaaaaatatctaatttgagtaaacttagaaaatcgaaaattcgtcagagaagttgaaagattcctttgtttctatactattttttggtgaggagaaaagaacaaaaaaaaaaaaaagagtaataaagtgagagacatgaaataaataaatgagagaatgaatgagaattctcattctcttttgtaagttggaacgtgaacagaagggtagttggattgtgaaatcagtctcttcggtactaactttcaatttaataatttaagaaatttagtgcaatcaagattaacgtaaaagttgaccacatacacaaaaaaaaagtagataacttgaacaacatactatgtaacgaacagctcatggttggagacatcggaccgtcatttttcttatgatcatcaaaattataccttgcttctttttttcaattgttcataataactctggttttgcagaagaaataaaacttttaatttggcgtttaactgatttaaatgtgttagaaaaaacgtggatgtgaaaatttgggaacagatgacgagattaccgtttttaacgttattgaacgatttatatgatatagcggttaggaacatctattatatatataattgcataacatttttaattgattgataaataatatcataactgatagtcataaaattactaaaataaatacaatatttcttttataaaaatagaaaccaaaacatatattatgaaaggctgaaattttatgctaaatacatagtagtataaattattaaaatatattttaaataagcgtgaaacattttttatgtatagatctcttctcttattacatatatcaaatatacaagattttgatatcataatattatatagaaaatattaaattttcgttacaaaaagtatattttgatatttttataaattttgttaattactaacacacaaatgcttgaaagaatgagcataaaatttaaaacgaattaaaatgttataaaatgctaaaacggtttgtattctcgtatcacacatgtataaaactatagcgtttagaaatggttgcaggtttgcaaacgatttggaaacaaccaatcatccctagcttttcatctatttaataactaaaaaaattgcatcctcatggcagcgagagaatcgaacatagagaaaaggacatgttgtggttcttagttacatgtcatacatatgtaacggtgatttgttttttcccaacaaatggacacacaaaaaaagttctaacatgttttctaacacaagaattctaaaatcttaggtccgaaaaatttacacaatagggaccgtaacattaaacaatctattctgtaaatagaaattcgaatcccaaaatatatttttgttaaaaaatgtttgaataatcatccatgttcataaaagtggacactttttgtttgtttgttaatgtggcgacttgcattttaacaacactacaaattatactaaactatttctcgctataagaatatcatttagtaacgaaatattattaccaaatagctcatatgaattaaaactaattacgcaccctataatctatagacgttgctgcatacatgcaaaacactaatcccccattacaagctttagttatgtatattaggcctaatttatattccaattctatatataatatatgcatggatcgttcctcaaagcagttgcaagaaaaaatctaactaaaaaattattgtaataacctagtggctcttacgattgattaataagtcatctacgtacccggtcaataaccctcaaattagtgtctaattaatagagtatgttatacgttttaaaaaataattttgataccacccaactacctattttatactaattaattaacttagatttattatcccataatttatttatctatctttttctataatttcatgcatgcaaattactagatttgaatatatagataaaattaggaaaagtcagtaggctaagagttccgatcattatcaagaaattcaaacacaaaatataagttgtttctttgttttttttaagaaaacataaagagcatcaactcaatttccacacaaaaaatctaattcacaaagtaaacacctaacacaacattattatagcccatgaaagctaaactaaataagtaattcatatactacaaagaaataaaaaggtgggaatcgataagaatacaatacaatacaactcatggtgatggtgatagcattgtgggggcttttagttgtaaagttatgactcaaaacacgctttgtgatttttatatctatttattttatgtattaatgatggatcgtcatgtgcttcgtatcctccttcgactctcctccattattacatcttttatttcatctcatctttttttaattattttgagagtattatgttaaacttctcacaacattcatttatcgcctacacctgtatatatattcacgaatcctaactgtacattatagattttaagaaaataaactaagtgaagccgtagtttttagacattttgaaaccctagagccattaagaatttaagactgtgccacgactcacgaggcccacgactaccatatattgcatatctagaaaacctcatttgtttttacgtgcctaactactattgtgaaactcatacgttgaatgaatgaatatatcagaattaatatggtttagttcctatacggctatacacctagatattcgggatttatttaatctgctgtgttgacaaaaaagaaaatttttgttgtgtacaagagatttataacttgtttttttttttgagttatattttagagtttaacgctactttgatttgaatgaatatgttcagacttgccctttttaatgtatcattcttttgtttgaacaactgatgccaaataatgtagttgatttcgaaaacgattcgaaatgcacacttgtaaaatctctattactgtatataatattctttataaggtttacaaaaaaataaaaataaaaataataatatttctaacaacataaagaaaggcactaaacccaaacttacacatctaaacatcatctatatgggaccgaccataatcatttttgtctttgatcacatcagtttctaaaagtcgcatcagactcacatgcaatcgaattctacctctcctcgcggcttctttaatcatatcacaaaagatggaatagtactttactttctatcatttgttcctttctaggttggtcccaaatagacttatctactaggcctatagatatattaagtggcagcaaagtttaggagaaagcctgataaccataatctcgggcttttaaaatcttagcccaagatttacgacaatgtgaagggaagaaagctacaacgagaaacaggaggagagtcttttgtcaagaatcctcaagacaactaggtcttagtacgaatgtaagcttctgacttcaatagggtgaacaaataaccataacatacgacaccaaacaaatttttttatgaaccaattgattttactagtttcaaacataaaatcagatgtaaataatacattgctgtccacatattttggtgtatccaaaacaaaccgaaattttcatcaaagccaagaaaatcaaacggtattaccataaccaaaaaaaaaaccttaaaaaagtaaaaaacaaacaaaatcttaaaccattttacacctagtgtcccataagtaggctccaaaaccattttattagaattttccttaaaaatatgcgagacctgaccggaaaattcatcaaatataagatactcatccaacaagttctgatttaacacacacgagtaaccaagaatagactccaacgtaacgccaaaagaacaatagcaagcaaacagataaatggtatatatgacccaatccagtaggaagattctattccaattcgttgttagagatcaaatattccctcagaaaaagccagaaaagtagaacttttgtcagtcacacaagcgtcaaatatcacaagatgccaaaattcagagacaactaactcaaaagtagaaacagaagtcaacaaataagcataagtagaaataaaactgatactaaaactcatacaaagttgaagaacatatgaatactagtaaaacataaggaaataggggaaatatagcagtcaagtgatattatccctacagactgacctaaaacaacattgatgtagcaaatgaggttcaaatatcacaaacacaaagcataaataagagttttttaaaagtttttggtcataaacctaagcaagtttacattctcaaatctgagtcaagtcaatagcaagacctagatgcttcaatcgtcgtcttctgcctcctgcaaagcaaaaatccaaagaagaccaatgtcaaacatcaaaatagatgtaaaacataccaaaaacaatagagttcaagtctcagtcaaaacctcttcgcttactgcttcatcaacttcagacttggatttgtcagagtcatcctcttctctattggttccactagcctaaacaacattcacacaataataagtctgtttagcaacagcataagaagaagacccaaaagaacaatctctctatacagtgtgagagtttataccagtttcaagttgtactgttgcacattcttaatatattcagtctttctgctctcagccttagcgacgtaaggagctttatcctgtaattacagattcaaacaagcacaaagttttaaatacagatctacaaaaaccttattccccaaatcaagcatttcaatggctactattattatgacttacttcatcagtcattgccttccatctagctccagcagccttaccaacctgattagacaaaccaatccgataattaaaccaacctaaaccagttttcagattacagatctgagaaatttttccagaaatttcggagaaatatatactcacagtagcgacggatttgttattaggattcgctaggttaaactcttttcggaaatcctcactaagatccaacaacaatcagtttaaaatttgattagaatcgaaaaatcaattcgaaaatttgaaaatcggaggaagattcgtgaaattacaggaagacgaagaaagcacttggaggtctcttaggttgatttggatccttcttcgtcttcttcccagcctttctacctctggttttgagtctaataaatcgaaaaacgaagaaatcagattttgaagatgcgaaaacaaatctggatctcagagtcggagaagaaaccaaacctctgatcagtgctcgttgcttcagctttggattcgccgcctttcatgtcgaagtttctgcaattgaagaatgacaaagaaacgaagaagaagaagaagatcgttagagaattgtttgactcggactgagtttggggaaaacggtaggagcgagtttttacctttaggttttttttttttgtttgacgagagagcgtatgagtgagtaataggattttttttttgggggggctttagatgcgatattataataataaaataatatctatttttaaaataaaggcgacttgaaattttgcactgtggcgggattttttcgtgaaggagcgaaataatttgacacgtatgggaaagaagagcaacggacggaataatggattgtgctcttcaaatcctgaccgtccatttgacacgtgtacctgagcttgcagatctcgcccttaattacattcataaagttcttcaccaattgacgcatttgctttctaataaaccccaaatattgtttgaccagaagagagaaagataggaaaactcgaaccgggtttgaccagatcaattagatttaaccggtaccggttatttacattttttttcccctgtaaaatattcccctcccctcttttctctcatcgctcgctgcctttctctttcacagtcagcgctcttgaacggagaatctcagtcgcgccgtcaactttttgttgagaagagatatcatctgttttcgatccaaagaatagaaagcttggattccgaaatctccctttttgcttccccaattcgttttcctttacaagctcggcgcttgatctcgctatctctcaggtaggatcgagctatatacaacagtttctcaattttactagatataattgctttagattttcaagtgctcttgcgtttctggggttttgttaagattggagtttttgtttcttattctcgaaatctgttgattgattcgtttgatccatcaatgtttgtttagaaattcaaaaagcatgcaaatttgcagattctttgtttgccttgtgcgaattctatttccgtattccgtatcgaaactaaaaccctgactaggttatgtttcaagtgtgttttttagttttctatttgagggatattttaactaactccataagtttggggttttgtgaacagccaaaagtcttttctttcgtgacatcagtttcttggtaaaggaattcgatttcttcacctaatagagaatttattttagaactttggactgatatgttgaacattgatgctgatttggcagaaatggatcgtttgatatgatacgtatctacatttgtagaactgattttttcacctagaatttgcagcaagtaagactagaatgaataaaggggaagcttgtattatttgttgttaaatgagttgttcaaagagctttgtttgatatcattgttgcttctttgttacatgtggatagtttaggatgctacttgttaagtagtaagtactgttaaggtgtgtagaacttatatttcactgtgaaacgttggagtaggttgccgtttgtgccgttagtatatcttgttttcgccttttactgacaagacttatgaatgttttgctttcccgtagagagctgagagctgaggatattggaaatttggaaggtggaatctcaaatggctgaacttcctggtcaaataagacatataggcggtcgaatgagtcaactgctagagcagatatatgggttttcgagaagatctttgtttcgggtcatatctatgggtcctataccttgtcatattgcctttatcatggatggaaatcggagatatgcaaagaagtgtggtcttttagatgggtctggtcacaaagcggggttttctgcgcttatgtcgatgctgcaatactgctacgagctgggtatcaagtatgtaacgatatacgcatttagcatagataattttagaagaaaacctgaggaggttgagtctgtaatggatttgatgctggaaaagataaagtctttgcttgaaaaagagagtattgtgcatcagtatgggattcgggtctattttatcggtaacttagcgcttctaaatgaccaagtgagagctgctgcagaaaaagtcatgaaagccacagctaagaatagtcgggtagtgcttctcatttgcattgcctataactcgacagatgagatcgtacaagctgtcaagaaatcttgtattaacaagtcagacaatattgaagcatctaattataaacacgaggatagcgatagtgatatagaaggaacagatatggagaaccaagagaagaagatacagttggtggatattgaggagaatatgcagatgagcgtggcgccgaatcctgatatactcatcaggagttcaggagagacgaggctgagcaattttctcttatggcaaacaggtaatacccagctctgctctccggctgctctgtggcctgagattggtttgaggcatctgctctgggctatattgaacttccaaagaaatcattcatacttggaaaagaggaagaaacaattatgattgtcttgaaaggagactagtgaaggatatacaaaagctctcttctctatttggctttgtaatgtgatgtgatgctcttgtggtatactatcaaaaggaaacttgggattacatagaacaagcaatgtattttacacacgaactcatttgagtttttctttatgaatccttaaccaaaactccaaaagtcctctctaaagacatcttacttcctgttctgtcttgtaagatccagaatcttaacatttgtgtttcacgagtgtttttttctcaaaccaaaattaaaccaataaatttagttcgttaatggttcagattgattgcatatatcatggaatttcggtttagcgatattaaaacaaggaaaaccgggattggtatccaaaaccgtaccgggcgtcaagtctggttcggtaggttagagtacacgcttgtggcgaacttgcaattggaaacctaaaaagtcgcgactatgctctctgcaaagatggttctacttttggcttaaagagcaatgttttcgagtctttgccatggcgggtttcattaaacgcaaaggcaacgtattttttcattctcaagccttagctgctgtctactccaaggtgggtcattcctcctctttggattctttcgtttagtagattcatttctctggggcaattgatcgaacacttaatctgctggtttcttcttgtctctagttgcagagaagtaattgcacgcttgctgagggattcatggagaagtgttctagcattcgtcaagttattgatgaagatataaattcaggtgcttttttctttttgtgatacttcctaagctggtttggatgtaattacatgttctaagttaaaggttgttcctttttttttctggtattgattgattttatcagttgatacatctaagtggaagaaggtacgagcaagtgatgctggaattaaaaattcaatgatccctgaatcctctatgaatgtcttgagactccttagacgtcaaggtttgtgtttttgtatgttttaggtttactgttagcattgatgtagaagtattagaggaagctgaactatttgtttttctggtcttaggtttcgatgcataccttgttggtggatgtgtaagggatttaatactgaatagagtgccaaaagactatgatgtgatcactacagctgatcttaagcaggtttagtggattgattttctgattatgttaccttgttcaagaccttatgttttgattattgcttcacgcatctagtttgtttttatagatccggcggctgtttcatcgtgctcaggttattgggaaacggtttcctatttgtcatgtttggatgggaggttcgataattgaggtcagttttcttcctaatgttagagttgtgttatttgtcttctgttttaggcttgtatatggtttgggtatttcttgacactcctcttataggtgtccagttttgataccgtggcacacagtgacagtgatttggagaagtctaaagagaaatctggtgtctcactggataccaaggcaaacaagaataacagcctcttcaaaatgtattctggttgggacattaaagactgcaaacgctggaggaatagcttgcagcgggatttcactattaacaggtggagtttctggaaacatttacttgtaccaaaagggactattgtatgttttgactgcatcaatcacacccacttacttgtggtattaaatcttggtgcagcttgttctataatccctttgattttacaatttatgactacgccaatggaatggaagacttgacggatcttaaggtgactaactgagcttactttttctggttacatctatagtatttcttatgttattaaccattcttcgctaattcaaatgcagcttcgtacacttgtccctgcacatttatcattcaaggaagattgtggtatgcttattaattgtcctcacggcattgtatctagacacagtactttatgtagtttaaagttctaactattttgtcatggttttctccaaatacagctagaattcttagggggttaagaattgcagcacgattgggtctatcattgtcaaaggatgttaagactgcaatacctgaatttgtatcttccgttgcaaatctggaccaggtacattgactgcttgaacttggatacttggaatcacttcctttatgttaaatgtccatggtctcagctattaaaatcatgctctgtctttgctcagtttagattaatcatggaaatgaattatatgcttgcgtatggagctgctgcgccgtccatccttcttctcatgaagttcaaactacttcatgtgttacttccttttcaggtatacccatttgcttaatcttcaactctctctctctctctctctttctttttaacactttaaacttggatgaatttgaatttcaggcagcttacctggatcaagctagtaaaacatctctatcaagttccttgatgctagtggtacgtgatatcttcttgcaaggagcattttcagtgaacccattttgacatttctgcgtttggtttatggtttattttagaggttattctccaatatggataaattggtttcctgcgatcaacctgctgaccccaaactatggtgcgttatttctttatatcaataggaatatggatcttctcttcaatgagttctggttaatgtcctgatttgttttacacaggattgcagtgttggcttttcacattgcactagtgcgtaacccccaagaggctattgtggtgcgcgcttttgctgctttgctctaccatggaaactggagcaaagctgtcgaatttgctagagaacatgaaacttcagtgatcggatacgctcctgaggtatctaaatcttcgagaaagagatctgatgaagatcttgcagaagcagtttcagaattcacatgtctattaaaagatactcaatacgttctgactgataaagaggctctccgggaagccctatacctatacccggatttcaaattctctggtttggtaagtacaaacaatgtgcatattactattcagtgtacaaagatttattgttttaagacatatatacgcagtttaagtttgctaatctatgtttggtcttgtgctcaaatcaaactagcccagatatctgcttcaccttttcttaatctagcagttaacgctataattgattgatgtggtttctcaggtgtttataccgaagaaaaaggggagagatgtagcagaagggtttatgagattgagtgatgtggaatcatatgaaagccaaaaagagggattctctatcgactatgtcttgcttgggaagggaaatccatgcgaagtaagatttgttcttggcaaaatcattctggacaccatcacagaaggtaccgtcatcgaacctctaaactctgtcaagaagaagcagagcaccagaaatcatattgttccagcggcttgcttggagaagaaggatgagttgttcgtttctaaatcgtcaaaagaggataacaacaatcaaactccagtccatgactcaaatgcatcatctgttctaaagattttgaagaggacgagagaagacagtgagcagaacaatgaccaagagaccgaggtatgtccaagaaccccctctggtccagcaaagaatcaagatcagtctgtagttcaaatgcttaaaagacggcgtagcaaagaagcaccagtctctgagccgcctaagcaaaagacttcaaagaggtcgagatcagatgaccaagaggcggttggaagtctctctgttccagcaaagattcagcatcagagtaacaagcatgacacaaatgcaccgatctgtgagctacctaagcaaaagacttcaaagaaccattcgaaggagtcacgaaaagtgaaacacaacgacttgcctgtgaaggagattaaagaagcaaaacaaggctttgtttctgacaaatctatgagtgatcttctacaagttcttgagaaatcaagtcagcaagtgtctagcaaagaggagaacaactctttatcatcagagaagacgaatagaccgagaaaactctcaagtctcttcaggtgaaatggttaccttattggtgtttaggggccttaagtcaaggtggagaccttcgtgacaaagcataaggtctcccttcagtcacggtctcacttcacaatttttaggtacgacatgtagtagtaacttgaaccaatttgtttcattttgttttttatttggtcactggtagagagaaattttggccctgagtaaatgatatatttatttgtatgtttttttcatttagattcaaatagttttcttcgtttttctgcagatgacattagtttgtttctttatcagaagccgaaactattcccttattactaaaaggaaagtacaaattgaaaaatagacaaatttggcttcaatttcaattttggattttgtacgtcaacattaaggataatttggttaacttaatctattaaagcttataggatctgcatttttaattttgggtgggtttggagtaatggtctcttaatcacggattcaagtacctaatcggatttagcatccaaagtagacaatcttaaccgttcaacaataattagtatctctacttcattttggtatctaaatatgagcatatttcatcccaaagagaattataatcacaaaaaaatatttcaaaaaaacacttataatcacaaaaagaattacatcacttttactattttacatttttgttactactttacttatatttatattacatacacatttactaattaatacacatatttaaacacaataaaacacattattctaaatactaaataacaaccaactaataaaaagtctcaatcattatttataaaaagttttttaaaaatgtattttataaatttacaatataaaatataaccaaatacttaattaaaaacccatataaaaccgaggcccgctgtaaatcgcgggttaaaacctagttattacaaaagtccttgacatataacaaatatcgtttgaactgacaggaaataaacacaaacacagagatgatccaggatatcgaagtctttcgatctcaataaatccgtttcctgaccatagacatgtctccagactgtccatatatgaaataacagtgacaactttatatgacagcaattcacaacagtttattagtcttttattaaaaaaacaaaaacagtctattaataaaatgtaaaaattagattaagaccaaagagattcatgctgcttcaatctgctaatgcagctaagtaccagtttactagttcaacattatatcgcgctctggggctacgatcgagtttagaattaaaatctcgaagacactgataagaacaaatagctatcccattagacaactttaaatatacagtactcgagcagcggttgtcacagttgtggcacatcagtcgagtgttactactgttgcaaataacttttatactcaagtttccgaaaagcaacgtgtagcctggcatcatataagcggaccacccaaatacacaactgcggtggatagtgatgtaaggtttgctgcatgtgtagaaccattcccttggatctagtatcccctcgcagacttcacaccagtatgtttgatctgagacttctccgtaacaaagggagaaaggaactgcatcatatttgttgtgtagcttatctggaatggtggcacactcataacatagaaaaactttgcatagagtacactgtagatagtatgacgaggttgagcctgtgtgattgcaaccattacatagtctcgtatcatagttatggatagggaggaataagggatgttcatgacttttgtgggtgaaacaatcaggaactaagatgcatctaacatctacctggaaccttttttgctggtaaatacgcgtacatctctttttggagcacttgtacacaaaaccaacggtcactcgctcgcaaactgaacaatttgaggaatcccatgcgtttagtggaaccgggtctaggaaaagagggtgattatgcaatccatgatctagtttccgaggaagattggcacatacctcatggagaacataatcacattgaaagcagttgtagaaatggcgagagtcgacatgaaggacacacgcttgacattgcttatccatgtctcgaacacggtcatacttctcaagcttcagatgatgatcatgacaaaagtacttaatcaaatcatcaccaacttttttgaatggtgcaacatcttcggtttcgtcaaactcttcaggttcccattcgagttctctcccatcccatacatttttatgtgttgcacacttggaatggactacaaaagagcaatcatcatgattgcacgtatactggccatagttgatatcaactgtctcgtagcaaagacgacacaacgatgaagttgagggtgaaagaaaaggagtgtaaaaaagacgatgagggtgacgggtgatttttatgacgcgtggtaagtctatacaatccttgtggaccacgtaattacattgaaaacaagcataacttggtctccattgctctaccaacccacaagcatcacatggaaacaaaagaggtcgaggaaggaaaattagtgaatggtgatggctttttggatttgagatggtaggaagtggaaagctttgggaacaactagaatccaaagaaaagttacagatagaacatcgatagaaaaagtcaaaacttcttaaatcatttccacaccaattgcagttaccaagaatagaactatcctcaggtattattgatgatacgtcgtaggaatgtatatcggaatcatgtatgatgccggtttgacggtcttgaacactgaaaatgagaggatgttgtgggtgataagggtgtgtcatcttccttggccgcaagtagcaatactgatcgaactctagatcacatgtggtacagaaaaaatagaaataaagagaatgccttatgaatgtggagtctgagcttgcaaaacaaccagacggagggtgttcaccatatcgacgggagagggtgtgaggatgagatggatgagacaaacgacatatttcttcttcttgaccagatactttgctagatattaatagctcttcctctccgccataagatatcgtctcttcttggccataagacattttttactctttagatctctttttctttctctagtattgtcttctttttattgttatgatcaagatcaaatacgagtgtctatatatatatatatatatatatatatatatatatatatatgtgtcaacaaaaattaactagcacataatttcatacgaacaatgatccacaatacaatacaacagtacattaagacgaaatggctacaggctgtttcgatctactttaaaataaaatatgtctttgcttattttggaattgtagaggggagctactatcaattatatataataagtttcgatttactcattgacttttatagttttgtaatattgtgctggccttcttactttaaataaataattttactggtattatgtttaaagtataaatatattttataattgtttatgtattaaattattgtaataatgaatttaaatgtagaagttatgtaaattctaccaacttttatgttttttttataaatattttaaagattatagtttaatatgtagtaatttgtaaagtttaaatgactatttttctaaatatacgatatatatattgataattaatttaagtagaattataatcaatgataagtacacgtgtcattaatatagagtgttagatgattaattttataagcaatttgtgacaaagaaaaatagaacggatttttcctcgtgacatgtctccggtctgtccatatagttatattattaatttaaaattggatccgaaatgtaatcgtgaatttataaaagttgtggctgtctttcccaaacatgtcttgagagactatgataacctatatgacagcaattaacctgagtttattattagtgttttttgattatttagtttcaatacgtaaataatccaacgcatcatatgtcacccaataattttataccattcggctctatgtagactttgggctttgtttcttgtttatgtttcggctaggctatctttttttttttgtcaagatttcggctaggctattttagtttatgtaattgtgcatgaattgatttttttctgctggaccgtacatatggagcggaccatgtctgaaaagtcgaagccatccaaaaggaaaaataataatatatttgagatgaaagacacgaagtaatattcctacttacagtattaagtttgtaatattcatggtccatttaacactaaccaaaattttcggctttattaacttaggttacattgttgccttatgtaaactcaaacacttagataataaatgttgaatctattacaaaagaactcttcacggtcccaaaaactatataaggcttattccttttcgacattgtcaaaactttcaatgtcagatgtccaaacacaaagccaggaacaaaaaaccttctcaaacaacttgtagtacaccgaatccgggcaacgatgatcacacttataacaaatcggtcgagtatgactattgttcccaagaattttcatcgatgcagagccgaaatagaatgtgtaacctgacttaatataaacggaagatccgaatatacactcaaggtggatagtgatacaacatttgttgcatgagtagaaccattctcttggattcaattctttctcgcatacttcacaccaatatgctttctctgcatcttctccatagcaaagcgacagaagatgtgcatcatatttgtagtataactcatatggaatggtcgcacatcgataacacatagcaaatgagcaaatagtacattgcagataatactcatcacgaacactatctttgcaaccatcacaagaaatgtttccttttctagaatatgatgtggagatgaataaaggatgttcatgacttttgtgggtgaaacaatcaggaactaaaatgcatcgaaaatctatctgaattgttatctcatcatcgcaatcagtttttgaacatttgtacctgaaaccagtggactcacgggcgcaagttgaacaacttgtggaactgtaatcgagtataggagaagggtctagaacaagaggatgcttatgcaatgcatgagccaattttcgaggaagaccagcacatacctcgtgaagaaagaagtcacattgcacacagttgtagaaatcataagagtcgatacgaaggatgcacgcttgacattgtttctttgcgtctcggacactatcatacttctcaagcttaaggtgatgttcatgacaaaaatacttgatcatattatcacccactttcttaaatggcacaatatcttcagtttcatcgagttcttctggttcccattcgagttctcttccgtcccaaacgtgcatatgtgttgcacatttggaatgggcaacataagagcaaccttcatgatcgcaagaatactggccatatttgatgtcgactgtcttgtagcaaactcgacaagatggagttgtaggtggaaggaaaggagtgtgagagagacgatgtgggtgacgcgttatttttatgacacgcggtaagttgatacaactctcatgaaccaaatagttgcattggaaacaagtataacttggttccaacaaactaaccagctcacaagcttcacatggaattaagaggggccaaggaaataaaaagagggaatgatggtggctttttggatttgtaattgtaagagttggaaagttttgggagcaagagagatctaaacaaaagttacaaatagaacaatgatagaattgagatccatctctcaaatcatctccacaccaattacaatttttgaatatgtaaccatattcggggtttttagatatgatctctatttcagtgttttgagtggtgagggtgagaggatgttgaaggtgataagggtgtgtgagcttcctcggatacacgtgacaaatatcgtggaactccacatcacaagtggtgcaggagtaatggaaggtagaacatggtgagggttcttctttgtcgcatgcgaagcaacccgatggagggattcttccggctctacgggagagggtgtgagagtgagttggatgagacaaacgacatattggctcttcttcattagcagccattttctttttcaaagttttggttaggatccaatctgtttatctaaaatatgattacttccatcgtgtggagatgacttgactaatgtggacacaacttatatgattacgactaaataatgtagacccaatatacaaattatgtgaagtgcaaattatactattaaaaatgacacgagattaaatttaatacaacttcattacatgatctgtctctccagactgatatcatctgtgacaacgaattaacaagaatttcttttggccaacaaaattaattaattccactgtttattaattaaaagaagaatacgtagatacgtaagagttacagggtgtgagcaaggccagggtagggtggtttggcccccttcacttaccattgacttttaatagagtgggctgggcttacaaaatttatgtttgttatgtattagttgatcatatattatttcatagaaatttcaacaaagaattcatatttgtttcatcctagctgatttggtgaaaagtcgttaatataaatatatcacttcacaaacaacaacaaaataaatactccctttgttttaattatttgtagtttaaccaaaaaacctttgttgcaaaaaacaacaacaaattatcttctatgcaaaaattaaatgtatttaataatttttgaccaattttattttacaatatggttttttaattggttgaattagttgtaattaatgatgttttatgtaaacaaataaactaaatgagattttgatgatttaatctgtgctcaaaacctttagagtacaaataaattacaacaggagaagcattacttttaattattaaagctcgtcattagtaacacagaaacaaacaataaaatgtgatggccgttgttatcgctcatccttgtcgtccatattactttgcctagctgatggactatatctgaacgaggaacggccaatttagctagtttagtccatttcttttgaacaaagcaaacaataaaatttatttgaatcaattatgagaaagccatttttttttaataatctttgtagaattgccattttgattttggtattttaaatttgccacttttgctgagacaaaaaaaaacaaacaattttgccc

SEQ ID NO: 44 - DNA, 11178 bp, Arabidopsis thaliana
gatggactatatctgaacgaggaacggccaatttagctagtttagtccatttcttttgaacaaagcaaacaataaaatttatttgaatcaattatgagaaagccatttttttttaataatctttgtagaattgccattttgattttggtattttaaatttgccacttttgctgagacaaaaaaaaacaaacaattttgccctctccattaatcacacattcaccatttcggttagtttcttcacaaattcatatgttttgtctaatatatgtaatatgtcatgtatctataaaatagataatatttatcaattaattatataattactgaatttcataaagtgaaaagaaataaataatatttttttttttttgtcgtcaacttttcattatattatgaaaagagatacatcaaacagcgttccaagatattacaaagacagagttttgtactctagctgtttttgctaatcgatcagctttaaaattaaggacacgtgggatttttgaaaaaccaatcgatttgtatctgcggcaatattttcgatgtcccggagaaatgttgctatcggtgaatactcacacgaatgtgtggttctggttattggctgaaacagagctgcaacatcaccatgaaagataatgtcttcataaccaagcctctgtagatgaatcattgctagtttaagggcttcagcttctgcttcaagcggtgtgctggttgggggtatagacgacattcctcgcagaacaaattgagctttcctatcatagaggatccatccaatgcctgcacaatcagtaggagatatccatgatgcatccacaaaacagcaatatttatttgcttttacgatagtgttcttaaagtcttcagatggccgccgtaacacttattattgtgactatcatggagttgaggtttcctctgttgttgctcattgcagtttaaactctctttccattgttgttgatcaataagagccttctgtatactgtccgggatagaccacctcttgttattgaaaattaaatcattcctcattttccagattcgccatccaatgaaagggaataaacttacatcctttcttgcggattggtttaatttctggatagattccaaattttgattaaaagagttcgacatgagggagtcacctggacagagttttatatgtgcttgctcccaaatttccttgctgactctacattggaagagaaggtggttcacgtcctccgaggcttcaccacaccgttggcatgtatcatcagtaatcagtcttctcctctttaagtttcctgcagtgggtaaggcgttatgagccgatcgccaccaaaaatgctttatttttggtggggcattttgtttccatatatttgtaaatacagtctgagctgaaacctcatttggagagggcaaggaagcatgttgttgctgggagagcttacgtagtagatggtagcctgacttgacagagtagtttccatcatgcgtatatatccatgtaattgcatcatttgctcctgttatagaaggtcgaatagcacggatatgaggtatatcattttggtgtatgagtttgcagagaagatcttcattccatctgccttcaatgagcaaatcacttactttcaactgagaatagatggagtcacatgtaccaacaggaggacggggaggatttaatggtagccaattatctttccacaactgaatattattaccattccctgcaatatattttaggccacgagagatcagctttgtaccatggaggatgcttttccacgcatagctggattgacttgtagcttttgcatccagaagtctctcctttgggaaatactttgctttaaaaactcttgccatgagtgagaatggttgttgcagtattctccaactctgtttggctaacaaagcaatgttaaaatcttttagatctcgaattgctaaccctcccatcttttttgggtcattgagtttcgaccaggctacccacggaatcttatgtttgacttttgtattggaccaccagaaccatcgcatagcacttgtgatctgatgaataagcctcatgggaagcaagaaacatgacatactgtatgtgggaatggctgtgacaattgatttaataagcacttccttccctgcaggtgaaagaagcttattataccaattatccattttttggtccattgtttgggctataaacgagaaagcatttgttttattccttcccacaaactcaggcaaacctaaatatctgccaaaaccttctgttttatagattcccagaagttgactaagttgttcactagtcctgaaatctaaacctttaccaaacagaattgcagatttttggaaattaactgcctgacctgatgctttctcgtaaagcttaagcacattaaccaaggtcatacactcttccagagtagctttgcagaacaccagagaatcgtgtgcaaaaagtaaatgagagattgctggtccatttctactagctttaaaaccatgtagttgttttgctttaatagatgcttgaattaaagctgatagaccctctgtgcataataaatataaataaggcgaaataggatcaccttgtctaatgcctcgctttggaataattcgtctcactggttgcccattgatgagaatagagtacgtggtagttgtgatgcatgtcataatccaattacaccacttctctgaaaaccccatttgtttcattatcgcttcaataaaaccccattcgatcttgtcaaaagcctttgtgatatccagttttgtagctacaaaaggttgaacaagcttcttagtgtgaagcgagtgaataagttcatgtgcaataaggatattgtctgtgatcattctttcaggaataaaagctgattggttgtcagagattagagaattcaaccaaggcttaatcctttcagataaagcttttgacacaattttgtacgccacatttgcaaggctgaaaagaaataaataatttaaagtgaataatagaaatccaaattattcttaattaactatgtaataataatattttgtatccggtatactttgattcctttggttccatgtttccttagggtatagagttaactattaagtttatgttttataagtattttatttttagtattgctcgcatttatttctattagagttgttgtacccaagtttattacaatacaaataaaatttatatatagaaaaaatatagagtgacacagttatttgttatgtagtaaactatcaaaaatgagccgacaaaaaaaaaaaaaactatcaaaaatgataaaaatattgtttagaaaacaaaaattcataaatgtgtaggtttacaaggataaagaaaagtcattttcagtggccaaaaaaggcaaatttcttaaattcattaacaaaatgacaaatttctaaaaaaatatagacgacaaaatagcattttctacaataatccctagtttagccacgaataacaataacaagacatgatccctctttatcttaactaagacgcgtttggtttacgaaagtaactttttaatactagtacttaattgaaaatctagataaggaggctcccccatgttcacggcttcattccctagcattgcctgttctgcctagattttcgtaaacattgactattcctatttttgtgcttatgatggtagatgactaacttctttggtgctgaaatgtcgtataaaacaatttttttttacgtttttttttttgggtacaaacaagtttttgtagtacgttgcaatcggttgtctaagatcttatgactagcgcggtctgaccctactactcaaatctgttatcaaaacttggatcacatattcactctataaaatataccaattttttttttgagcttatattcaaaatggacatcttaaaaaagtttctttcaaaagaggtattttctaccgtaggattcaacaatattcaacaataacaatttattgactcgattctgacgattttaaacttggtatgaaagcgggaaatagatattgtatctagaacttctcaattataagtatggaaatggtacacagtctaaacattagtaaaaactataccctagtttgggatttaggaacccaaaaattcaatttacagtatgtaaatgttaggcatgctgataaagtattccaaaaccttttgagacccatagttgcgttcttagtagagaagggagtgtcaaaaatcgttgaagattataatattttacattacatgaagatgaaaatacaaattaccgatgataaacaatggactaaagacgacagatgttacatagtgtgaaacaataatgttgcagatgagaagatttgtgaactaagagaattgcagtttcagtggagaagatgacgccagcgaataagaagaaagatgacttttcacgtagtgatagtacctgttttcgaatgtcgggtcaaaagtgcctaaaagcaaatacatctgtaagacaaatgccttatttgaaattaactcttgttttttttggtagaaaaatagaccatatttgtttctagtaaaagggaatagaaagacacacaaaccaaataaacaagggcaacaaaatttgaaaaacctcaaccatatttacttcccacaaattggatgttgtagcctaatgtcagaagtttcgcatcttttctgtttatcatttacctaaacttttgattgatatccagtttgttcagccgtattctttttttttttgaaataatgttaaattatattcaaagaaaccaaacgtttttacatcaaaatgcaacgagaaatttagagtttaagccaaaaaaataattgagaaaactttagaaacactgtaagtgattaacttctagaattgaaccaagctttgttcaaccgtattcgccaatcaaaaatatttgatccccccgggaatgaatacttccgttcactaaaccccttttttaagctcacacattcacatattgagcaaaaaaagaaagtcttattgatatggcccaaaactcaaccttgtctttcaatggtatgccctctggcgatcaagcctgcctacccgtacctagcaaaaccccaaagaaaaatcttccaagaaaagtcttccaagtgaattcccataatttgtcttgaacaaagaaaaatagcactaagccataacttaattttctcaattagcctcatattagtttacatattttaatgaaaatactcttgagtcgacataattctactgtttatgtgcgaaaagaatttgtcgatggacagtgttctcgtgctcatggtgatggacaaaaaacttgtaaaagtattttttcaatttttttcctctttttgcaaactttcacaagttttccaatagatttcacaagtttttccaaaacaaaagaaacgaaggaaacttgttgttgataccatacattgttttaaaaaaaaaaaatcaagcatagccgaatttgttaacgtagtaatataacaatttatttagcaagttttttaaaaaaatttataaggtttttaaatctcacgatctgtaaattaaatgagcttttatagatatgaacatatttcagcccaaatattagagaaagatgacatttcatttgagcttatgaaaatgagcatattttggtctgtaaaattacagtgttactcttattcttcctttcttcttccttctgtgacgtcgattttggattttttttctgtttcttccaaaaccttcattgatcttcttccttcttctataccttttgaacccaataaatccaattatatgcatgttgctaaaagaaatataaaccctaagaggatgatatatatagggaacccaaatgtttcaatcttatacacatattaaatcagttacatatttgagaattcaattgaatcaaccttttcaattacatgtttaacaaggaagacaaacaaagagaatcaaagatttaataaaatctacacacatgttgatgggtaatttaattgtttctttgattgaattatgggaaaggttgtgtagaagaagaagaggacaacatagacgagaaaaacaaattaattgctaataatacgaagagtaaaatcgtcaatacaagagagagaagtacataattgcatagacacatgattttgtgcatgtatcaacaacgacatatacttttaagtgctttattcataattgatccgtaaattaattgttacataatctttcgaaaacttccataacttttttagaacattttttttatctgtcaaagctagaaacattaatgtgttcaaaccattattgatattcttcattgccaatagccaatttatgtttatatttaaattctaaatcctgaaatgtaagctctaattctaaattccaaataaacactctgacaggccagcaaaattccaaatactttagtaaatatccacctacaaaataaatttcaaatcggaaacaataactcccacgggccagcataattctcagtacagaatcttgtctgtctcatattgaaactttctcttaagaataagatagactaaaaagcatgactagctctgtaaatgtgattaattaataacctaagattgttgattaagataaaacataaagttttaatcaaaaagtttgttagaggcgcgcctatggagcgtacaattgtgtcttaaaaaaaaaggttaagccaccaaaataacaaaaaagaataataatttttttgaaatacgacgaaagccacatgccttgaaccaaagttaccgttgtctgaatatgaaccaaacttagaagtaaatcgttccctcatgatccaacggttatattctaaattctaatcctagccgttccttttttaaaattaaaaactcaacacttttttttattttgtttgtatcttcctcttttgcttatttcatccccttcttcagattctcttcgtttaatgctcttcttcttctactctctttgtgggtttctcttgtaataatcacaaaccaaaaaaaaaaatggttaactcatgcgagaacaaaatcttcgttaaacccacttcaacgacgattcttcaaggtagtagatgaatttgtcgagtaatatacgagaatttcgaggtgttttacagtttgcgtaggagaattctgacagaatgtgttgtgttcttttctggttttgtttagatgaaacaagaagtagaaaattcggacaagagatgaagagggagaagagaagagtgttgcgtgtgattaaccagaatctcgctggtgcaagagtttatccttgtgttgtcaacaagagaggaagcttattgtctaagtaaatttaacaaaatctctaatctctcacaagttagtgttttttttcaatctgattgtgcttatgggttttgattgatttgaatcagtaagcaagaagaagaagaaggatgtcaaaagaagaagtttgattctttgcgtccttcagttacaaggtacataaagcttgaatctttcatttcgttttttgactttaaagaaagaaagatctgagtttgtttttgaatctgcagatctggagttgaggaagagactaacaagaagctgaagccctcagttccaagtgctaacgacttcggtgattgtatatttattgatgaggaggaagctacattggaccttccaatgccaatgtcgcttgagaaaccatacattgaagctgatccaatggtaacaacaacaaaacagaattcagaattttgttgatggatttaattcataaatcaatgatttacaagaaaattttgattggataggaagaagttgagatggaggatgtaacagtggaagaaccgatcgtggatatcgatgtcttagactcgaagaactcgcttgcggctgttgaatatgttcaagatctttacgcattttacagaacaatggaggtaaattatggtttagttttatctgtttttgaagtaataagtggcttgagagcttctttaagacagttcttgatttgaatttgcagagatttagttgtgttccagtagactatatgatgcaacaaatcgacttaaacgagaagatgagagcaatactaatcgactggttaatcgaggtatattatcaacaacattccacattgtactgtgtagtttgatagaggctaaagatgcttgagtacgttttcaggtacatgacaagtttgatctgataaacgagacactgtttctgacagtgaatctgatagatagattcttgtccaagcaaaatgttatgagaaagaagcttcagcttgtagggttagtagctttgctgttagcttgtaagtatgaggaggtttcggttcctgttgtcgaagatttagtactcatttcggacaaagcgtatacgaggaacgatgttctagagatggtaaaggcctggcttctttacttaatagaaaaagtaatcttgtctcatatatgttaaagacattctttgattaaatgatttctttcttctttacaggagaaaacaatgttgagtactttgcaattcaatatctcgttaccgacacaatacccgttcttgaaaagattcctcaaggcagctcaagcagacaagaaggttagttaaaaataatggacttatgaatcagtttaactagaagtttgaattttagaaaggaactaactgtgaaactgaaaacaaaacagtgtgaggtcttggcgtcgttcttgatcgagcttgcccttgtggagtacgagatgcttcggtttccaccatcattactagctgccacatctgtgtacactgctcaatgtacacttgatggttccaggaaatggaacagtacatgtgaattccattgtcattactctgaagaccagctcatgtaagtctctctctttttaccaagaatggtcctttaagtccataaacaaaactatttgcaggaaaaaagactgatctttttaattgtaatcgcgggtttcgcagggaatgttcacggaagctggtgagtctgcatcagagggcggcgacaggaaacttaacaggagtatataggaagtacagcacaagcaaatttggttacatagcaaaatgtgaagctgcacactttctagtgtctgagtctcatcattcttaatccaaaaggacagtagtaagtagtttgtacagcttcctgacatagttccctcattcactctgtagcacaaataagaagaaacaaaaaaaaaagccaattaaatttgtcttatgattgattcggtttttttgttgttaccctttgttcacttcacttgtcagtattaaactctacaatgaatgataaatgattgaatcatttcattctttgttcagaatgaaatgtattttgtatcttatttgagctaaatacaaaaacaacgtcgttttcgttgttttcactttgacttctctttagatctctctcccaccaactccttcttcacacttcactaaacttcagatactttttgttttttcctcaagatcaacgataatggcggcgtcaacgaactcattcctcatcggaaaccaaacccaaatcccttctttgaaacccaaatcaatatcccaatcctttatccacttcactaaacccaacaccatcaacctcaccacccgaaccaaatccgtttcaatccgatgcgcttccgcttcaaccaccgtcggatccgagcagcgagtcatcaatttcgccgcaggtccagccgcattaccggaaaacgtcctcctcaaagctcaatcagatctctataactggcgtggatctggtatgagtgttatggagatgagtcatcgcggtaaagagtttctctcaatcattcaaaaagctgaatctgatctccgtcagcttctcgagattccatcggaatattccgttttgttcttacaaggtggtgccactactcaattcgctgctttacctctcaatctctgtaaatctgatgattccgttgattacattgttactggatcttggggagataaagcttttaaggaagctaagaaatattgtaaccctaaagtgatttggtctggtaaatctgagaaatatactaaagttccaacctttgatggattggagcagagttcggacgccaagtatttgcatatatgcgccaatgagactattcatggtgttgaatttaaagattatcctcttgttgaaaaccctgatggtgttcttattgctgatatgtcttcgaatttctgttctaagccggtggatgtatcgaagttcggtgtgatttacgctggtgctcagaagaatgttggtccttctggtgtcaccattgtgatcattcgaaaggatttgattgggaatgctagagatataactccggtgatgcttgattacaagattcatgatgagaacagctcgttgtataacacgccaccgtgtttcgggatttatatgtgtggtcttgtgtttgatgatttgttggagcaaggtggtttgaaggaagtggagaagaagaaccagaggaaagctgagttgttgtacaatgcgattgatgagagtagagggtttttcaggtgtcctgttgagaagtctgtgaggtctttgatgaatgttccttttacgttggagaaatcggagttggaagctgagtttattaaagaagctgctaaggagaagatggtgcagcttaagggacatagatcagtgggaggtatgagagcttctatttacaatgcgatgccattggctggtgtcgaaaagcttgttgctttcatgaaagattttcaggcaaggcatgcttgattcttttttgttttctagtcatcttgttgtttattatgtaagctttgatgcttatgattttgagttttcgttccttcttccggtacttgaattgcgattgtctgcggaattttttcagtaataataatttgagataatagatttcattttcaagcaagaatcatttacacttttatgtttgtctgagacttttgagttgagactgaaaacttccagtgaacaaaatcttttattagacaacttattgaggaaatgctgagattagcttatgatgataagcaagagcatacaagaattagcttatgatggtaagaaatttgcatacaaagatctcatgatgtgctgttagtgtgtcctttctctgtatctcctgctgaaagtgatggtcctgttttcaagacacgtaaata

SEQ ID NO: 45 - DNA, 57991 bp, Arabidopsis thaliana
cgaaactttggtttattaaaatgtgttttttttaaacaggtgcatcaagatatgacagctccattgtcacattactttatatacacaggacacaattcgtatcttacggggaatcaactaagcagcgattgtagcgaagtccctgtgatcaaagccttgcaacgaggcgttcgagtcatcgagctcgatctttggcctaactctactgggacagatatcaatgtccttcacggaaggtaatatatataggaaacttgttcttgttatttctcttcagtcaaaaacattttcaagaaaccgcggttttcttgattcttcagaacgcttacaacgcctgtaccgctgatgaaatgcttgaaatcgataagagattacgcgttttctagttcgccttatccggttatcatcactttagaggatcatcttacacctgatcttcaagccaaagttgctgaggtataacattttatatatctatatcttgtggttatcaataagtttgattttgatgttgtttgagttttttttttctttctttagatggctacacagatatttgggcagatgttgtattaccctgaatcagatagcttactggaatttccttctcctgcttcactgcttcatcggataatcatctccaccaaaccgcctaaagaatatctcgaatcgaggaacccgattgttaaacaaaaggataataatgtatctccatcttcagaggatgaaacacctagaacagaggagattcagaccctagaaagtatgttgtttgaccaagattttgaaagcaaggtaagaaaaaggaacttaattcatgaaaaaggttcaatatacattgtttgttgttttgtaatttagttttgagttttgagttagagtgatagtgatcaagaggatgaagaggctagtgaagatcagaaacctgcatacaaacggttgatcacgattcatgctgggaaaccaaagggaacggtgaaagaagagatgaaagttgtggttgataaagtgagacgtttgagtttaagcgagcaggaacttgacaggacttgttcatctaatagtcaggatgttgtaaggtagtactaatttatataccatcctaactctttataggccagggtttgcaacttgattaatctcaatgtttttttaggtttacgcagcggaatttgcttcggatataccctaaagggacaagatttaactcctcaaactacaaacctcttatcggttggactcacggagcgcaaatgattgctttcaacatgcaggtaacaagctaagttttataaggtctatggataccttgactcttaagctaccttttgtgatgtataaagtgatctctgtataagaaatgaaacatttggtgattatagggatatgggaaatctctgtggttgatgcacggtatgtttagagccaatggaggttgtggatatgtcaaaaaacctaacttcttgatgaagaaagggtttcacgatgaagtctttgaccctaggaagaaactccctgttaaagaaacgttaaaggcaagccaacaacaatttccatatatatacttataggatattttaacatttcaaatgtcattagccttatctttttgtcgcggttattacaataggtgaaagtgtatatgggagatggatggcgtatggacttcagtcatactcactttgatgcatattctcctcctgatttctacactaaggtaatatcaattttacaaattgtggctctttaaattcctcaaaaaccttattagaatgcggacttgtgagctttgtagatgttcatagtgggtgtaccagcggataacgcgaaaaagaagacaaaaataatcgaagacaattggtatccaatttgggatgaggaattcagcttcccattaaccgttccagagcttgcattgcttaggatcgaagtaagagagtatgatatgtcggagaaggatgattttggtggacaaacatgcttgcctgttgcagagttaagaccagggattcgatctgtgcctttgtatgacaaaaagggtgagaaaatgaaatcagtacggcttcttatgcgtttcatcttcgaatgatttggcttaacagaaatgtgtgtctctgagaaagaatttgcaccatttcaaaaagcttttgaggtattgtataatgtagcttgaaagatcaaaatgatctttgctctgatatctccagaaagtgaatttacctaaccatattgaagaaaatgtaatttatagagtctatattttttttcaatatgtaaaatctattgtaagatgattatccatgcttgcaatttgcaaagctgttacatatattaaattaattcataattgagatatacatggaaaaactaaactattgatgaaaaaaataaaatggaaaaactaaactatccaaccgtttgaaaaatggaaaaactaaactatatcaaggaaaataaacagtttttcttctttcataactatgcatgtggaggatataatttgtagtaactaatggaactaccaggatattaattaggatttgcttcgctattcggtctacaatgatcttaaacatagataattgatatttgataagggaccaaaatgatggatcatatatggtcgtcactggtcagagaatgcacattatatggtcataggtccaacgtttaatttgatttagaacaactggtaactgagaaactatgtatgtatcaaggttattatattgcaccacacaagctttttacttacaatgtgaaatcaatgtaaaaaccgttctatacacatattaatctcacaattacagcgattaaacaatacaaaaatcacaagcaagattccaagagggaaaaaaactggagaaacaaagaataagacaaaaccaaacaaccaacaaaagaagaagcaaaatcaattgtaagatgaagaagaagagagccaagggtggttaagtgcctctagagctgttggacgtctcaaaggattgatatcaagtagagtccttacaaaatctaagaacaattcatcactaacttgtaattgttcttccaagcttgattcttctgtgattatgtattcaatctcattgctctcctaaataaaaaataatgcgtcacattcaagcaataacactcaagtctttttggttatattaagaaaaattacctcgtttaagtggtagagatcatactctttggtgaagtatttatgtgtctcctgacctttctctagcatctctgtttctataggacctaaaactgcaacaatcctagccaatatcatcgctactgcttcgtttggaaacagaacctgatgcacacattgatacattgtgttacttgtttcttcagtatgtaggatataacatatagacaagacttttgatggaaactagacagtacctcaccagagcagagttctgctaaaatacacccaagagaccacaaatcgatcttttcgtcatatggaagcccgagaatcacttcaggagctctataggaacgagattgtacatacaagcacaagttatcagagcggaaacaactacttccaagatcgatgatttttaccgcgcatcttttgtaactctttatcagtatattctcaggtttgagatcacaatgtatgattcctagtccatgaaggaacacaagagcatccaaacactgacgtgttataacctgaagtctgcttaagttaaagtatggttctcctcctgattcttggttgaatttctgaaactcatacaagtttgctcggagaagttcacagacgataaacaaatgttcctgttatacatatacacaagaattagtaacttaattaagagcaacagatatgtatatctttcaagatctcttacttggtggtagaagtaatcatagaggcgcaagatatgatgttcatcagcaggatcatgcttattgacatgtttcaatagcttgatctcatctaaactctgatcaaagaaatctttatcgttcttaataatcttgaggcaaacatcaaccccgttgtgtagatcctgtgcctgaaccaccttgctaaatgcagcagaaccaatgtattccgtaatgtaatatcttcctccaatcacagtgtttatcacaattggtagatccttgttctcttcgaatcccgtcctgtcaaatatatacaactatttgagatcacatatttaaagactaactaatgcaaataatgatcatacctgtttttccagtgaatgattctaagattaaacacttcatattcatcttcaacctcatgaacaacatcaacctcttcatctgttacattcaactgatcaccagtcttgagatcaagctcatcagttttatcctcaagaccaatgtcaagaagaaagggcttatctaagtaatcgagactcgcttcggttagagacccttgagatgatgatctatcatagacaccaagcgaattctcgaattggttatctgtgataaacttatcctctgcattttcaggtaaaatgaagcaatcagattctctaaatgcaggagacataaactcatcttcatcttcagtctcattgtgcaagtaaaactcgctccactctggatatgtcctagctgtcccaaattgagactgtccatcagaagatgatgaactatctccgtaaggattcacaaatcctacatttatgcaaaatcttcccaatcaatcaaacaatcttgagcttcaatttcttgaaataagatcaacaaccagaaatttcataagatcgaaaaaacttaccggaagaagaacagaagccagaagtggaagaatccaagctaacaaactcgtcgtcggaagaagaagacttcgagttcgaaccatcaccaccggaatcagaaggacgagaactcgctgtgattttgatcggcgtaggaatcgggaacagaaacttctcgaaatcgaaagaagcgagtttgtttttctcgttgatatcgtctctaagagcagattccgcctccgttaaaccattccgtcgaagaaactcaagaacagatttaacatcaaccgccattgaccaaccaccactgtcacgagagagtttcagaacaaagcacggagagagataagagaagaggaaagtttcaaactttgaatcacgtgattgagaatcgagtcaagaaactaaaacccattgtttggtattgatgataagcttgttaaagtcacgcatgctctgatgattgaatctaaatctgtgatctttctttcttcttcttcttcatctgagtctacttgttctactctgtgttggctctgtaggaccaaagttaactataacggatacggacatggtgcgatgtcttgtcttaccggtttttttggggaaattttctctctgaaggtttcttcaggttacgggattgataggtttcaacgttcgttgggtttttcctttttcacttcttgacacgtgtactaataaggatttaacatgtgtaaatgatatcactgttttgggcgttttttttactttattttataatgtgtaaatgaaccgacggaagtttttaacatttttttttgtcatgtcttgggataaatcgaattcaaaagtttaataaagtaatgaaaaaggaagaatctttcagatgaattgtgattattctactttaaaatctctaaatcttccactgtggtataatttgtttatttaagttataagaaagcgaatctatcaatgtacaccaacatcatcatcatcatcacttacctaatctaaagaattttcaacgttacaagaagttgtagttaattttagttttacatgaggtaagatacttaaaaataaaatttaaattttaggaaatgaagaaataatatcataactttatagttaatctctattttttatatttccagcaattctacaggaaattgtattttttcactcttttgcttttactctttaatttgtttttttaaaagtaatgtccaatgcctttttaagcctattattactacagaaattgaacgttgtagttgtagagacgaattcaagtaaagcaggataaagacaaaaataaaataaaagttgacagctgaaaggcaaactgaaaatccgtggaacgttagaataatgttttgttacgcgattttttttttagttaaagtggaatcataattgaataagtcccatttgatcggcctgagagtgagactacaataaaccttaaatacctaatggtttgggataggggaattaataaaaacgtaaatatataatgttactccttgaaaaataagagaggaataaaaaaacagctcgtgaaactctatcatatatgcaggcaattttgtaacgatagccattcgttttggactaattaatctatctcttaactcttaagttttatgattatttcataagtgctcacactcgcaccaaaccgagtagccacaattattatagattgtgttaaatcataattatttgctttaagtcgacgatatagatatagttcagatatctccataaatatgaagaagataccaataataatttattttaagttttgtgagcccaataataaatttcagtttctctatttataggtgctacttgtttcttatagaaagtttacgtttaaaaactggttccaaatgatacaaattatgctcactgttcagaagactttaactacataagtctagagcaaatctccgaaaatttaagttttgtagggatagtgataataataaaatggaagcattaaaaacaaaggatttggtacaacgtccatgtggtgggtgactaatcatggttttactagtagctctatagtgaataatcatcattattaagtattttttgctataagtgatctgaaccccaccgactacaattatattgttttctcagcaaagccattactgtgacctctatcagcttttccacgtgaccacattttcgccaaagaatttagggtttttgctatttacaaagtaatctattcatcatagattctccaactcctggcacaacataagtttctaactcacttaactaggctaggcaatcaattgcatcattaatcgtcatgcatgtatagcattttatggaaattaactattttgtaaaatgttataaaacatatgtatcaaaattcaaacgagatgttgttacttatagttttaaacaatcgacattttgatcaaactttacaaggattttgaccagcttctctttagacacacgttatttgaataggcgaacatatgaaattgtcaatacaacttgttgaaaagtattttgctattgatttatattattgtttaaactttaatttgatctttgcaccaaaaaaaaaaaaaaaaaggtttaaactttaatttgacaagcccgacaaggtgacaactacattgtccataatatgacactaatgggcttatattaattgataaaaggtttatgagataagcccatggttaggggccttatttctcttgtttgtaaattattgatagaaccgatggagaagtataataacaaggttggcctgttgggtaaatatgatatacagatttactttcatgtgaattccacagtaaccaatatagtgtatctagaattaaatttgttacctcagtcaaaaccactagtctactaatttatatcgaaaagaaaagtacatacatgtaatgtgtgtaagtctgacaaaaatgaactgttagagaaaagaaaaaaacgggaataagaccactaaatacagtcatttgcctcattttcttgctaaatccgttttattttgtcatcatcatacaaatctttaagcgaagtagtctttgtcaagtcactacgggactcccactcatggaacaaactatttaacgtgtcatgcagaaaataaacccaatatccacgatatgatacgtttatttttgtcaaaggttttgcttttctaaaagtgaaataaagatcccccaaacgcctctcgaaactgatcctagtaagctctgatttttcaaaatcagcgctgtgaatttttcatttatttatttattacagaatgcatccaaatcatggttactcaatactagccaagttgacaaaaaaaaagagagaggcctataatgattccatgtgactatatatacgtacgcttatatataaacatccactatacgatagtgaaatactgaaatggtattttgtggctattcgcgtcattttttgtagaatcatatgtcacaattatcagtatataaggttaaaagtaagttcatttaatttcagtgcacatctttatgttattatcaatttctattcaaaatcttcatttttatttcatagtttttgtttgattcaacgatattgtcattccactattaccaatccaaatggacatgatatgtattaattaagatggtaacgatgtgtacagttaaaatgcgaatatttatgcctacataatcaaaccgacgttgaatttttgcaaatgttcccattatgtgtatagtgttacatatcttagggtcacagtttaccaaatatgaaaaggcaaagaagaaaaaggagagagaacataagtgtaccagatatgggaaaagtaaaagatgctaagtggagctcgtgatttgttctttagggctcgtgattaaagggtccccgtgattgtatattaacagtcttgattcttcctgtggtgcggtttggcctttattattggtgtcttgtctccgtctctctcttttatcaaacttaaccaaatcaagaacaatatgccattacccatcctctaccacccaattgagtagtatacctctctactttatcggtaactagttatgtctctatgattctttcaagtttcaaataatatcattcgagtatttttaccacgatttcaactatgtatgatcgatcattaattgtttcattcggttggcacataaaactatttagagacaaagtgttcgtttctactgcatttatgtctaaattgatgtattcaaaagaaagttagtgtttctgtgattatcatgtatatagctccattaatgttttgtttttttcaacctagctactattccttttcttaccattcatttgatatatgagtattaagacaataatatttcgtcatgttttagaatgcttttacaccttttttcgaccaacctatgaaatgtagaataaccttttattttgttgttttgcttcaactttttatttctttatggtaacagtaatgtctagccgccatacttgtaatatttatttctttagatataactttctatcaaaatattgaaaaagcaaaaagaagctgagggaagtcccgtcgttaattatactttagacaagggacaaacatatcttgccctttgatatttgtcataatttttcgaaaacatttttgagtgattagttccgtaaataggacactaatgacccacacaaatactaatagtttctttaaattctataatctcatcaaaaatacaactcacatatataatggcaacttcatcatttctataatctaatattagctcacattgcctcccacctcccctaatggattgaccgacccttcaaatctcaacttttcaaaatgttattatttcccctctctatcgttctttttccgtcatttaaacaaaaaaaaaatctttttgttttgtcttcttataggtgttgcaattattttgtcgactgattaattgtgatagtattcctggttctcaattcagggtttgattatcaaccatttgcatgggggctttattaactcatctggaattccaagaaaacaaagatactcaccactagtactataattttgacaaaaaaactcaaaaagcattgtaattgcaaagtaactttacatagtttatcatgtgcgtgtatatatatgttttttttttttgaaaaacatgtatttattcgattttaaattcagacggtaacatgacgaacctatcacaaactactaggatatatatatgtcatggttttgatcaaaaaaatatatttatatatttcatggttaaagtgtttcttttttgttatatactgtagtaaatttttatacggcttccatagatatatatatatatatcaaagtctgatctgataaatgcacatttacaagaaaaatgtggcatacccggccctttaatgtttgatgtaataagaaaagatggataaaacattaaaggtcaccaatgcgacacccagtgaaaaacgacttatttgaagatggaatacaaaaggaattgttgaattaaactccattggcaaaatgggtccatctgttcatactctttttctttattttattttgtccacttaactttcatattcatcaaattttcaccattcatcattttttattcgatcagccatgctagccttccatcgttggttcaacatggatggatctcaacgaaaagcgtttggacctaaacatttggactccaaatcagattcgacggcataagcggactgatgatagtcaactctaactcttgaaatgatccaaaaaaaaactctaactgttgttgttatatacactacggggatagttgtgtttctgtttgggctcacaagcactttattagtgtttatacaaatatatatgttaatgtaatattaattaaccaataagtgctaataaaagagaaacttgtgttcctttcataaacattatgtgctagaaaacccaccttgttattattctctcgatgttggtgcatcgaatttaaattctaggaagagttcaaggaactccgacgactcactccaaccaatcattcaataatagaccaatttgatcaaatctatcgatatttcttttctaagtatgcgagacattcgttggaaaccatgtatatggtgtaaacagtgaagtacaataggttaatttaggagttttattcaaaaaagcttagaatgttcaaatttctacttattatttcgatttgagaaaattcagctttattcttcaccaatacgatttttatttaattgattaaataagctttttttttatataatcaatgtcatattctttttggtctatgctcggaagacgtcaacaaggatattggttccctaaagaagaaacctcctcttttattgaaaaaatatctctcacgtattgattgatatgtaaaaagatgtcctacatgtgaatttctatgattgtgaaaaaagaattattttttacttttagataacaatgtatactctatggtaacattgcatcaattatgaatggattggccaagtataaaatttaattatgattatacctcaaattcacactacttaaccatctattttcaggctattccattaattagtttttattaacacagtaatttatttgagaacagatttgaaaatattttgctaaactacttaaccttagactaactggaaaacaatatttaactaagtgtctgctaattaagaaaattaaagtatcgttcaccttctagacacactatgtcgattactgttttgagtgcaactagtgtattcgaaataatacttgggtgaattaagtttaagctttgagtaactaaaaattatatataaggatccataagttttgttgaaatagaataatcggaacttttacattcaaaaactttttcatatatatacagaaattcaacccccaataaacaaatgactaatgagtgatagtctgataggtgttaatgactgtcttaatatgagatacataagaaattttgaatggaattatttaataaatgtgaattatgtgggtgacttgactattcagtgttcactgaacacaaaaaggtaccaaaaaaattattccaatcagtgagagatcttcaaaggaaagattctcattcgcgccaatatttttgctgggaaaaggtaaaactttttagattattctataaattattttgctgatgttcccttacgaaaaaaacagtattcagtaccaaaatgtctggcacatataatcgtatagacgataagtagttgtcgaaattttatagggcaatggctcaagcaagtgaaacattgacacctagcccattcacatctatgtcactatatatgtgggttcacaaaggtgacgttttccttatgtgaatcatgtaaatgctataaagttttgtagtacatgagcgattatatattattacgaaactcctgaaatatatgatatataatcagatgggttgaggtagtgacaatagtttgtaagtgcaccaaaatacgttttgagctattaagtccgaagtttaggtccttttaagttatcgaaggtatgcttaaaaaaatttactaccttttagtttttttttgcatgatcgttattcgagaaacatgctgacgcacagattgatcagacgctgtggtaatccaagtgatagcaacaacacaaaatcatgtggagaatgatgatgatgatgcacatatggatttgcataaattttgtaatctccgaaatattgtggagaatgaaggaggagaaacataacattttaaaaatggataaagaaaaagaaagtgatggaaaaataagtatgtggtagaaaaatagggttccttcttctcatttgtctctttcaagctttatgatgcaaagcgacccttctttttcttccctttattttcttttattgttatcgttagtgtcactttctttttattaatttcataaagtcgtatgatcgtatccattgtttttattttgctccgacaggaccgacactgatctttctatatctttcggtaattaatgttataggattcctttttcagatcacatcatttgtattttatgttattttcgtttaacataatacactaataaaatgacttcataaaagatatggtttaggttggggaataaaagatatggtcgagccatacttctaatccttaatttaggttgatagaacatctaccgtcactaacaagtaatgaagtcagattaaaacttgatcgtgacaaaaattgtcccatatattttaaatgaacatgataacatattaattgaaaaatgttttagtgacttagttgtattgaatagcaaaggcaagtaagtagttatatacaatgactttcctatactcgagaagaccgtatccaagtaaatcaagaagatcgatatatatctagccggatctttggattgtcaagtgtcaacaatcttaattagatcaaaacagtctgttttaaaacatatgccaagttgtcaaacagaaaccaagcttttcatcactcaaaggagaatcacaaattctgcatggcgtgggggatagatatatatcatcgggagccactgagtccaagaaattgaatctattgacttcctattgctaatctatttcaaaataaccacgtcagagagatacgagtacatgtaatatcaatgagatattttcttaggagtaatttgaagatatttaatttgcggttgtaataatcccttttgaaaataatttgacttgtacacacggcaacaaaagaatgatctaaaggcaagtaacaagaatctgagtatccaccacctcttcctgttcctgttcttgttcctgttcgattccaaactctcactttctctgcccccctcgtgtctggctcccaccttttgtgtccactcaaccaacaacaacagtgtatctcttctcctccgttaaataactttatatttccccgttacatttccttattgtaacaaccaaaaaataattcacctgagactcacattctttaaggttttcgcatttaatatttcactttcttgaaatctcctatatttttgttatatatggtcgtcggcgatgccaacggcggtgaatgtagcgaaacaatgcttaacggcagaagcatcctacgcattagaagaagctgtgaacgttgcacgtcgaagaggacactcacaaacgacgtcgcttcacgctatctcagctttactctctctaccaacctcagtcttacgtgacgcatgtgctcgtgttcgtaactctgcttactctcctcgtcttcaattcaaagctttagatctttgcttaagcgtttctttagaccggatccagtcgggtcatcaacttggatctgatgattcaccacctgtttctaactctctaatggctgcaattaaacgatctcaagcgcatcaacgtcgtttacctgagaacttcaggatctatcaagaaatgtcacagagtcagaatcagaactcactttcttgtgtgaaagtggagcttcgtcagttgattctttcgatcttggatgatccggttgtgagccgggtttttggtgaagcgggttttcggagctccgagttaaagctttccattattcgacctgttcctcatcttcttcgttattcatcacaacagcctctgtttctctgtaacctaaccgggaatcctgaaccgaatccggttcgatggggtttcaccgtaccaagcctgaattttaacggagatttggattaccggaggattagcgcggttttcacgaaagataaagggaggaatcctctgcttgttggtgtatcagcttacggtgtactaaccagttatttaaattcgctagagaaaaaccaaaccgacgggatgattctcccgacgaagcttcacggtttaacggcggttaacatcggttcagaaatctccgaccaaatcagcgtcaaattcgataaaacctacaccgacactaggtttcatgatctagggaagcttgcagagcaaggttcaggacctggactactcttacactacggtgatcttagggttttcaccaacggcgaaggaaacgtaccggcggcgaattacatcgtgaatcggatttcggagctgttgcggcgacacgggagaagagtgtggttgatcggagcgacgacgagcaacgaggtttatgagaagatgatgagaaggtttccgaatgtggagaaagattgggatttgcagttactcaccatcacttctcttaagccttgtttgcctcacaacaagtccaggttattattacttctcttaagccttctcttaaaacaatggtactaatttaaaacagagtatcaactaaatgtagaaacagagcattgattagaatatgacttctacattttctctgttgcactaactttaggagtatattttccaaaaaaattctctgtaacgttgtcttacttacattatgttgtaattgaaaacagtttgataggatcatttgttccgtttggtggattcttctcaacaactccttctgaactgaaactacccttctccggtttcaaaacggaaatcaccggacccgtttcttcaatatccgatcagacacaatctaccttgccaccttggttacaaatgaccacaagaactgatttaaaccaaaaatcaagtgccaaggtcggtttactttctcttctcctaatttcttaatctcccataatcctacgagtatgtttcttgtactacaagtttcattatgttatgttaattgcaacgtgtatttacatctcctcagtgcagaccaaagaagggttggaatcagtttgtggaaataagttcacgagcagtgcttctgcatcgacctgttcagctaaatcggtcaccactgatctgaatcttagggtaagttcagtcaccacaggatccggtctcaagaagcatttggatagcaaagatttttctcagccacaatctgtgtcctcctattcctttgataacccaagggacctcaacgcagagagtttcaagattatttacagaagattaaccgatatggtttcaggacaagatgaggctgctagagttatcagctgtgcactgtcacaaccgcctaagagtgtcactcgaagagatgtttggcttaatttggttggtcctgatactgtaggaaagagaagaatgtcgcttgtccttgctgagattgtgtatcaaagcgaacacagatttatggccgttgatcttggtgccgcggagcagggaatgggcggttgtgatgatccgatgaggttgagaggaaagacgatggttgatcatatctttgaagtgatgtgtaggaatcctttctgcgtggttttccttgagaacattgaaaaagctgacgagaagctgcagatgagcttgtcaaaggcaatcgaaactgggaagtttatggattcacacgggagagaagttggtatcggaaacactatttttgttatgacgtcatcttcacaaggttccgcaacaacaacatcttattctgaagagaaactattgagagtcaaaggaaggcaagtggagataaggattgaaactgtatctagtttaccaatggtgcgatcggtttacggcccaacctcggtgaacaagaggaagctgatgggattagggaatcttcaggagacaaaagatactgtggagagcgtaaaacggttaaacagaacaactaatggagttcttgatctgaaccttccggctcaagaaaccgaaatcgaggaaaaatatcattgtgaagagaactcaaacgtttggttaatgaacttgaagaatcataaacgtctcattgaggttcctttcaagccttttgattttgaaggactagctgaaaaaatcaaaaagagcgttaaagaaaatttcgacaagtgcgtgagatcggattgcttgctggaggttgaccctaagatcatagaacgattgctagcggctgtttatttctcagatagtagaaaagatatcaaagagttgctggagaatataatgagtccagtgttcttgagaattaaagaaaggtatgaaatcactactagttgtgtagtaaaattagttggtcgagatcttgacatttttcttgaggatcaaatggacttgttctttgtaaaatctcagtaggttaaagagaactttatatggaaagtgtatcatataaggtagagttagtaataggtattattgttcttttgtgttgctatactatgataatgtgtgttcctgtagttatgatgatgagttgatctttctccttgtttattttatatgtatgtaaatagttatttacattctattttattttacctgttttaaacaaatcgacagcgtttagtgaataacgtcattatttataaaatatgataactgtttaatatatatttatgtacatgtataaagatttctaactataactacagaagcaaagctcctcctcaaaaagaccttaaagtcaaatagatcaaaacaatacagacaagtattgatgatcaaaattgatttatttggaagaccggatttgttgcaatgaactagcatagactcaacgtgtggatgtccgagtaccgtgatgatcatcttgaaccatatcagttcttaagttaaaaatgcgaataccatgtattcagttttcgcgaatgaccgattaactgtcttccgatccgtttttttcgttttccatgatatcgataactcggtccacaatctgatgcaatttgctgatgagttttgggaaatattttggaggcaaaacacacaaaattatttcactataaaaatgttactataataataagttgaccatataaacaaagaaccaaaattgaccccaaggagcgtcgcatagtcttattcttcagcaaatctacgactcgacttacccagaaacatgatgacacttttcttttggtaaacatgatgtcacgaaaaaaaattacacacataatctatagatagttagaggatgtgttagaattcacatatcagtttaattggtagtatatgatttatatgctgattatgattgaaaactatcagcctgttttaaggtaattatgagttatgatgggtacttatgagtttgaccatatataggattaggttgttaaaatgcatacatacaggttatgtgtatgtttatgtttatattttcatataaacaacaacaagtacactttcttgtaatttagtgatttagatttcttaatcaatttgtgtttttttttaattgtggagtagtatgaattgagttcacaaaatagcaaatttgtgactacgaaaactccacggaagatatatagaagaatcgaagaaaagtagagaataatgaggagtaagtcaaatgatcaaatccacggactaatccattatgtttgatgtgacgagagaaaaataagtgaatatttaatactatatactatagtatatttttgcaaaagttaaaggtgttgcattaattttttgatagcaaacaattaaggaaatgggggaaaaagtgtaagcgggcggccaagtgaagacattctctgtcgcccacccaaacaccaaagaagagaaggcgtgcctcactttccctctttctccacgcacttctccttgcccgtgtttctcactcgctttaccctaatcactccattacaactatacctacaagaccattaagataagcttatcaataagaacactgagataaagttgatctctatttacgaattgtttactaccaatagattttgattcgtaccaatcttttaaagtatgtatgtattgtttgaatagtagttctaccgaaccaaaaatattttaattgatcatgtaaaatatatttaagattgttgtgtgttaattatagtgatctttagaaaaaagagtagccaacgtgataatgaaagcgcgtgttaagagtattgaaacactcacacgcttgtggaggttacctgctaagtcggtcgatttgatcgatggtgggtcttttacacatccccaacgtcatttaccatttattcaacctcatatattatgttcttgatgatgaaaaagaacataatatttttttttttttttttttttaatttttttttgatgatgatgaaaaaaaaaaatattatgttcttttttaatttctttttaatatttttgacagtaattttattttaatcttattttgttacaaatagtttttaataccttaggacctgttggaacttggaaaaaaacaatattttttaatatctcaggatctttgcccatacatgttttgggcacccatgcgtttatatgaaaaacagcatgcagatgtaaaatataaacaactgtagatttggtcagatgttaaaatttaaattatgtcttttgaaatgtgacctataattgtccagatagatatacataactatttagtaattgtaagtctatttcctgtaatgtattcagctaaatgcatgtagataatctgatatcacatacatctatagccatatagagaatgcatagtaacatcaacaacatataaattttgggctattttctaatgagggtttttgagtataaatggatctcctaaaacgagtttaccggatgggtaaggtagtagttccctttgagttttctttctgctttgtataattaaaacaaagtaattgattaggaacttagtaggtcctaaagagaaccaacaatggtttcggttataaataaaccaaatgggtacattatccttatatctagaaactttaaccaaaaacaagatgttatctagaaacaataaatacatccggaatgagactttttcttatgtaagtcgatacaatgggggcattgttttatttcccttcaaatgaactttgctttttgatcattttaaaaagccatattgaaaaaatcaatgagataggaagatagatattataatattctttttataaaaaagacaaaaaaaatacactaaaacaattgaataagagtcagcaaaacaacgacgtccttaccttttttaaaagtttcccagttttgacttttgacctaaaccatttccatgtagaaagagagcaaaaaacaaaacaaaacaaagataagtaaaaaataaaaatgatataaagaaggaagaagaagaccgagaaaggtagacgaaagaaagagcgtaccttcctctttccttcttcgtaaaaaccaagttccttttaaaaggagcctctcctttctcatttgatccttcttcaaaaaccccaaccacttcttctccccaaaaacctccaaagtttcaatctttacttctctctttttctccaagttatcttcttttctaggtatgtcttgattctttctctctctgttttttcctatttcattcaggattctgggtttggttaaatctttaatctttatggttttaatggcttgattttgacgaaacggtcgtgtaattattcattactttgcttaaattggggattgattttgtgtataaagaagaatcttgaaaatgaaaaattgaaactttgaatcgaaagaactcaatttgcgttgctctttctcattctttgttgctttctcctaaaagtttttcacttttgaatcacaggaagagatatgtgcggtgcaaagagcaacctttgctcatctaaaaccctaacagaagtcgaattcatgaggcagaaatcagaagacggagcttccgccacgtgtctcctcgaattcgccgcctgtgatgatctttcatcgtttaagagagagatcgaagagaatccatcggtggagattgatgagtcagggttttggtattgcagacgggtcgggtctaagaagatgggttttgaagaaagaacaccacttatggttgctgctatgtatggaagcatggaagtgttgaattacataattgccacaggaagatccgatgtgaacagagtttgcagtgacgagaaagtcactgctcttcactgtgcagtttctggctgttctgtttctatcgttgagatcatcaagatcttgcttgatgcttctgcttcacctaattgtgttgacgctaatgggaacaaaccggttgatttgttggctaaagattctcggtttgttcctaaccagagtagaaaggcggttgaggttttactgaccgggattcatggttcggttatggaagaagaggaggaggaactgaagagtgttgtgactaagtatccagctgatgcatcacttcctgatattaacgaaggtgtttatggaactgatgattttaggatgtttagctttaaggttaagccatgttctagggcttattcacatgattggactgaatgtccttttgttcatcctggtgagaatgcaaggaggagagatcctaggaagtatccttacacttgtgtgccttgtcccgagtttcgtaaagggtcttgtcctaaaggagattcgtgtgagtacgcgcacggtgttttcgagtcttggcttcacccggcgcagtataggacacggctttgcaaagatgagactggttgtgctaggagagtttgtttctttgctcatagacgggatgagttaagaccggttaatgcttctactggttctgcaatggtttcaccaaggtcgtctaatcagtctcctgagatgtctgttatgtctcctttgacgctgggatcatcgccaatgaactctcctatggctaatggtgttcctttgtctccaagaaatggtggtttatggcagaacagagttaatagccttacaccaccaccgttgcagcttaatggtagcagattgaagtcgactttgagtgctagagatatggatatggagatggaacttaggtttcgcggtttggataaccggagacttggtgatctcaagccatccaacctcgaagagactttcggatcatatgactcagcttctgtgatgcaacttcaatcaccaagcaggcattctcagatgaaccactatccgtcttcacctgtgaggcagcctcctcctcatggattcgaatcttcagcagccatggcagctgcagtgatgaatgcaagatcctcagcgtttgcgaaacgcagcttgagtttcaaaccagctccagtagcttctaatgtctccgattggggatcaccaaatgggaagcttgagtggggaatgcaaagagatgagctgaacaagttgaggagaagtgcctccttcggcattcatggaaacaacaacaacagtgtgtcacgccctgctagagactacagtgacgagccagatgtgtcgtgggtgaactcactggtgaaagagaatgcaccagagagagtgaatgagagggttgggaatacggtgaatggtgcagcgagtagagacaagtttaagctgccgtcgtgggcagagcaaatgtatatagaccatgagcagcagattgtggcataagaagcagaaagaaagatgtgggatttatattgcttttgtcttctgggcctctctacacagaatctaacaaatctggcaataattctttgatttgtgtttgacccatagtttggttactagtatatgtttttttatgttctttttttctttgtcattctcttgtccttcgtgacactatgtaatgattaaaagcaaataattgatgcatgagttcaaatgttctttgaaggatccatcttattagctttgtaattgttgtgatatcttaatcttattggttacgtatttcaagtgctttagaaaaaatgggcctaagagattttggggagcttttttggcttgttattttcctcacatatacaacttgcagcttattatttattgaaaatcttttcttatctagattcaaaaagatttccacaaattttaattaacgacccctgattacaaagaaacctacccaaagtcaaattttgtccataatttctatcgtgtaggacactaaaaagtaaaaactcatacctaattggtttctagtagaaacggtcagtgcactatctttctttcaggttatcgaaggaaaaaagatcagtagagtagcatcgttaatagtagagttaagaaaagcatgtaacatgtggtctactttttatttcacagaaaaataccataccatgtgataatgtcgcataaaatctttacttttccggtgttatcgatgtgtgttaatgctaaatacccgaaacaatttcaagactcaattttgaactatcgaatagaattcttctaaaatggatgaggaaaaagtcgctggtttaagtcgtgcgaccctcaaaataaagttaggaatataatcacaagctgcatactttcattaatcaatttaaaaagaaacgactaactttattctttctttgccaaactccataattagttaagtctatgaatgaatgtgaagagagagttttacatttaaaattgtaaagggcaaattatagaaaattctgtgtccaccaattaggcttggctctttaactcactgttctcaatctttaataatccccatcttcttttctcctatatgattatctctctttccttcgtgcgtgttatctctctgagccacatgccgacacttacataactgttgaccaagtctctcttccttctttatcaaatcatgcaaccttcaagaacaagagtttcattttttgaaacaggagagaccatgaagcaaagaaagaagagttatctctcaatcttcgtgatcttcttctctcttttcttcttcgggatcttcatgtacaatgacaacctcaaatcctccattgctgacttcacatcttcgaacccattctctagttcatttgtggagttgccgccggatgagtgtgatctgttcaccggtcaatgggttttcgacaacaagacatatccattgtataaagaagaagagtgtgagttcttgacggagcaagtgacttgtttaagaaacggaaggaaagattctttgtttcagaattggagatggcaacctagagactgttctttaccaaagtaaagctaatgtttcaagatgccctgtttttatccggtttgatcgaattggtatttaacaattgtctgttttatgattggtttgatgaagattcaatgcaagagtgttgttagagaagctgaggaacaagagattgatgtttgtcggtgactcgttaaaccggaaccaatgggaatcaatggtttgtttggttcaatcagtgattcctcccggtagaaaaagcttaaaccagaccggttcactcactgttttcaaaatccaggtaataaacattaatccacttgtgtgacactgacactaatgacattatttttatagtttcttactttcttgggatatgcaaaactgaaatttaaaataggactataacgcgacggtggagttttattgggcgccatttttggtggaatcaaattcagacgatccggaaaagcacagtataatcgaccgtataataatgccagagtccatcgagaagcatggagtcaactggataggcgttgactttcttgtcttcaatagttacatctggtggatgaatactgtctccatcaaagtcctgtaagtagtaatgttatagtatacacactcacacatacttatgtattgaatatcctaggattgaagatttgtgatgatggaaacagacgtggatcgttcgatgatggggacacagagtatgatgagatcaaacggccaatagcgtacgagagggtgttgaggacattgggagattgggtggaccataacattgatcctctaagtacaactgttttcttcatgagcatgtctcctcttcacatcaagtaataaatttctcccatccataacattttttttttgtatctaatgtttatatttgattgttgttctgtttttgttttaggagctcagattgggctaatcctgagggtataaggtgtgctttagagacaacaccgatcttgaacatgtctttcaacgtggcttacgggcagttttccgcggtggggacggattacaggctgtttccggtggcggaaaacgttacacagtctctaaaagttcctattcatttcctcaacattactgcattgtctgagtatcgtaaagatgcacatacttcggtttacacgatcaagcaaggcaagttgctgacgcgggagcagcaaaacgatccagccaattttgctgattgcatacactggtgcttaccaggccttcctgatacatggaatgagtttctctatacacatattatttctcgaagatgagattctttcatcctcttttttggtttaaaaaaattcttgtgatgtatataggacagagattcaagggatttgaagttagccaagtaaggctaaaaatttgttgaataaagtgtacaattcacagggaaacacagatactataatttcagtaaatgacaagattagtaggtgtgtattatcagctacatgattgtaaaagatgttgaagtagttgaagttaaaacgttttgatagaccaactacgacccaacattcattaatgtcaaaaccaattttctcatatcgccagaaaccgaacacaacgagatgaagcaaactgacggcagagaaaggaaagcttacctttctctgctatactttgcagtcattcttcttcccgtattccttctcggatgctatctgtacaacgagaagcagctgagggttggccagtttcaggaattcaatacacataacctgcaagaacacatcactccactacaacaaagcaaagaagataaagacaagaagactgatcttgttccattagaattctgtgatgttttcacaggaaaatgggttcttgataacgtcacacatcctttatacaaagaagatgaatgtgagtttctatcagagtgggtggcttgtacaagaaacgggaggccagactctaagtaccagaaatggagatggcaacctcaagattgctctttgccaaggtcagtcccagctttctgagaacaaaaataagcaaaatgaataacactttcttcttctctcaatattctttcttttttcgggttctaggttcgacagtaagctgctgctagagaaactcaggggaaagaaactaatgttcattggtgattcaatacattacaatcagtggcaatccatggtttgtatggttcaatccgtgattccctcaggcaaaaagaccttaaaacacacagcacaaatgtccatcttcaacatagaggtattaaagactatcttctatgcaaaaagacaataatccaagaagcaaaagaactccaaatcttaccttctctactattctgaatgtgtaggagtacaatgcaaccatatcattttactgggcacctttcctagtcgaatcaaatgctgatcctccagacaagagagacgggaagaccgatccagtaatcattcctaattcaatctcgaaacacggcgagaactggaaagacgcagactacctcatattcaacacctacatatggtggactagacattccacgatcaaagttctgtaagtgataaacgatctctctaccaagttccaaactttcaaatttgccaatcttgatgaagttttctactttgatgcatgaagaaaacaagaatctttcaacaaaggagactcaaaagagtacaatgaaatcggaatctatatagtatacaaacaagtgttatcaacatggacaaaatggctagaacaaaacatcaacccaagtcaaacatctatcttcttcagcagcatgtcaccaactcatatcaggtactaaatcatcaaacacccataaaaatcaaaactttacagagactgatccttttcagttgcaaacagaagttcagattggggattcaatgaaggaagcaaatgtgaaaaagagacagaaccaatactaaacatgtcaaaaccaataaatgttggaacaaatcgaagactttacgaaatcgcactgaatgcgaccaaatctacaaaagtgccgattcatttcctcaacataacgactatgtcagagtatagaaaagatgggcatacctcattttacggttcgataaatgggaaactcatgacgccggagcagaagttagatccgagaacttttgctgattgttatcattggtgtcttccgggattgcctgattcatggaacgagttgctctctctgtatatcatctacaaaatttaaatgttttttctgattgaatgtgagaatttgcaaacaccagattccttcttcatcgggaacgtcaaaaagtcaccggaagagacgagagagcgacggcgaagtagagagaacattctaaaccggtttagtgttttaaataaaataccgtgaattatcggtttagctgagagcgactattgctgaaaccggtctagtcttaccaaatttctacctatttttcctttggtcaacaaacgttatatcgacagtcaaattgcggttggatgtatttaataccaaattattgaaaccgttatgtatgatttgataacgcattaaaccgttttgtaagaacaaaattgaacgtttgtgagaattttctttatccatttaataacattgaataatagtttttatttgtaattctaatgcgtacttttctttggatgcaatttgacaattctagtcgaattagctctacctgtttttactttggaacttccaaatttcacacatcacgattgatccaacactatgttgagaatccacaatcattaacttcttactaaagaagagaaattggtactggaaaacaaacgagacactttacgtagacgaaaacatacacatggtcatcaccatccgtaaactaaacaagaacttaagtacgcacaggaaactacacaagatataactacatggaaagatttaaaccggattaatattacatccgtgtggggaagtttgatttaggtcttggtcctgaatttggattcgtctatctcgactccttcctcctcagcgtgttccccaccaggcttgtctccggtgctaagaccacctttgcgtcccatctgctgatatccttcagttcctaactgctcctttcgagtttgccctcctcggctcctcccttcatataataaatattccacaaacattaatctcgttactctagcctaaagacctaacttgaaacatacgcaaccatgaataagagaaagaatgaccttcagcgagatgctgttgagcttcgaagcttttgcctcccgtaccacctggcacgacggtctcgcccttctttgccctctcatccagctgcttcttctcttgttgagacgccatggctctttagttacttacacaacacaagtttatataaaacactagacaagtaaaaaccaaacaaactcgcaacgacttgatgatgatatacgaagaagactatagtagctcgctctatatatagcgagttcaatccggagggcgttttggttgtgttgcatcgtggatgttcgacgtggtgactcagggacaatcggtacgtcatacgtatgctcttctttcttggtgacatgccacgtgtctgactttattagctgacgtatactttgaacgtggtagtggccgtacttcttcgccgcgtgttctttaactataccgccgcaattattttgtgtgttgcctttgtattcataaaatctttcaatcatttgactatactgtatgaaagtaaatatgaatacctgaggaagaaatcccggatggattcatgattggaaatgttggtaatcgtcattgaatttgtgccttacggttaggtgtataaattgctggtcaaaattcgttgacgttaggtggtccatatatcaagttcagttccgatcaaattgattgaatacgtggcatcgactttaagcagattcatatgcaaatattcattttagaaatcaaattacaatttgaaagcgtacattaagtcttattgttgaaaaaataaatataacaaactttttttactctcaactttgaaaagattcaaatgctatatctctgaattttagctcctaattctattattttggactctttaaaaaaaaaaaaaaaatttgaggatcgctgcccctggttttgactatcacacttattttgtgtagcattccatattgcttgaatgtgtctgcaatatttgagttatcaacgttatatatccttgttgcttcttttgattcgttttgtgaatgaatttatgttgtcctcaacggttctctctcaatactacgtgactacgtcaatgttatagctaaatgtgtgtaattttttttaatgtttttttaatatttttatttgtattgtaaacacaaaaatttgaactacaatctacgagcatgacaaattggcttgccaagtcaaaaaagggcgacacgagagtgattcttacgaggcaagttatttgtgttcctaagacgaattagggtcaatagttccccaactccaatcatctatacatcattattacatacacacttcacacttgcgtatggttacatcaattttaaacagcgtacgattctttaaatcaaagatttagttgttcttctttccttaaatgaattcactaaattttgccaggtcttcagatttttttttgactttttctaattatgacgtttgaaaacgatgcgggagtgaattaacaaccttcatatactaactataaataataatttatttcaatacctaattcctcctctaaatagatagattttctgaaaggcatatgtttcaagtctaattccttattcgaatctattgactcggattcaccaatatagtaccatcccatcaaaagtttgaaccattagtttacttaattattcatattaaacttttgaatagttatccatagactaacattgactaacttatataaggtttgatggtttctacttcgagattaaattagtaatgaatgcaagaatctaaatgatacgattctaatttttttgatacgtgcataagattctaataaatttgatacatgcattttccatagttgatcaaattaggtatgaagaccagaaataactagttcccttattaattcttagtacttatccttttttcgtctaaattcttagtattatgcaattttttctagcgtgtaaaattaacttcttttttttctttgttgagaaggtataaactaaacttgataatgataaatatataacttcacatatagttccatttcaaagaaaactaaagaatgccctaatacagttgtattcaatggacggcgcataatatagatcacttattctaaggtaaaagatttcacgtgatcaccgagtccaaccttctattcaaatctctcgttatggcaatttaataaccactagaaaaaacaaattatagagaaaggtaatttgggcaccgacgtgaatttgactaaattacgagagagaaagaaagagagacttggtcacgaaggtgttaattagcatgaaagagagagaaataatcgtcgttgaccattgaccataacttagtcagtcatatatataaaaatccaaccgcccactattgttcccctattcacaaggtccttgctttctcagacgtaaacaacaagaaattatattaacacaacaacaacaacaaaaagaccaaccctatttattcatattttctcttatatgcaactctcaaagaatccgatcaaacaaacgagaaatcgagagaagaattacaccgacgatttcaccatgaagagatctgtaatcatggctcctgaatctccggtttttttcccacctccgcttgttttctctccgacgtcggtcaaaacgccgttgtcttctcctcgttcgtcgccaccgaagctgacgatggttgcttgtcctccaagaaagccaaaggagacgaagactacgggttctgattctgaaacggtgttgaaaaggaaacgaccaccgatgcttgacttaacggcggctccgacggttgcatcgtggtgcagtacgacgagagagacggcggagaaaggagcggaagttgttgaagcagaagaagatggatactactctgtttattgcaagagaggaagacgcggaccaatggaagataggtatttcgcggccgttgatcgtaacgacgacggaggttacaaaaatgctttctttggggtatttgatggtcacggcggatccaaggcggcggaattcgctgcgatgaatctagggaacaatatcgaggcggcaatggcatcggcgagatcaggagaagatggttgttcgatggagagtgcgataagagaaggttatatcaaaacggatgaggatttcttgaaagaaggttcgagaggtggcgcgtgttgtgtaaccgctttgatatcgaaaggcgagcttgcggtttcgaatgcaggcgactgccgggctgttatgagtcgtggtggaaccgcggaagctctcacttccgatcataatccttctcaagcaaatgagctcaaaaggattgaagcattggtgagttttatccttgtgcattggattttgattagtaacatcacataattgtggaattgcatttcaaaaaaaaaaaatcattgaattcgtggaaaaagcgactctagtaaaaatgcggttgataaaatttttgcaaattggagaatcattctaccattttgcgttcaaaataatgttttagtgcggtttggtttaatttgtgtttggtttacttatttttgaatgtgtgtagggtggttatgttgactgctgcaacggcgtttggagaattcaagggacattagcagtctcacgaggaattggagaccggtacctcaaggagtgggtgatagctgaaccggaaaccagaacattacggattaaaccggagttcgaattcttgatcttagcatctgatggcctgtgggacaaggtaagcataacaagaaatgcatgatttcaaaaatttgattttcatttttggtctttggatttaatgttgaagctggtttgtcctataggtaacgaaccaagaggccgtcgatgtcgttcgaccgtactgcgtaggcgtagagaatccaatgacactttctgcttgcaagaaactggctgagctatcggttaagagaggctctttggatgatataagtctaattataattcagctacaaaactttcttccatgatatattaacacatagtacattagctaaacttaattaatttcattaggtcgtagttattaataaattttgttcggtattttacatgtaaatacataaaggtttggaaaataattaatttattgttattgttcttagagataagctccaaaatatttttggtttacgatataaacactacataatacatgaaattgcactatctaaccatttatcatcctttttatcctcaacttttttattctcatgcattttgaaaaccacattctaatcatatttctgcttttatgtgtaaaaccaacaaagatgtacatggttgatatacacacgtagacataaccttgacaagcaacatcttcgtcgttactcattttacagatttctacccatctgccttcaataaaacaaacatcaaccatattagtaactgcatggtaaccaagcatacgtgagtttttgttgtaaggaccggtaaacactttgaacctataaacacctccgcctcttccaacaactcagaataatgaacaagatcacatgctaaggttttgtaatgcttcttacaaacaaaagtttatttaaaaagggaagggagagtttataaaatataaattagcattgacattggtgtgaggttcttcacataatcatatcattctgaccaaaatattagtcggaaaatggttagaaacacaccaatatgagttgttttcttgtagttctgagaaaacatagatgaaccaatatatcaacgtaagtaactaagataaattgtgaatcatgagaatgcaagaaatattttctcatgattacatgagatgaaatactaccttacaattcatcaaactttttgtagaaaaaggtattgaagaaatgaaaattggatgtagacaaaaaaataaaaaattcttgctgcaagatcctggacaaagacaataatcacattaagaacaatgtaaattttttaaaattagtaaaaactctctataaattaataattcacaccatttaaattttagaggaggtgatgaaaggacattatcatcaattttggtagttaacccccaattatttaactaatcaagatacaaggggtacaactgtaatatattcatagtttggtgtgttttctacaatattcagaaacacgatttaagacgattgaaactaaaaataaaaagtgtcggacttgtaaattttcgctcagcgatctgcttccaatggcgatctacttcattctctatacacttctcacgatcatcttcgccgtatctctgagtttatttctttccgtgatcaatgcaagaaagagcagaaaacgtgcggtaggattcttccatccgtacacgaacgacggtggcggcggcgagagagtgctctggtgcgccgttaaagccattcaagaggaaaatcccgatcttgactgtgtcatcttcaccggagatcatgactcttcttctgatagcttagctcgtcgcgccgttgatcgattcggtgttcaccttcagtctcctcctaaggtcccattactcctaaagtttaaatttttatcaatttgaattggttctaataacacagaacctctcagatttgagggcaagtttcaattttgcaatttgggttagttttgatgcaagttttgtgcttttgttggttgttgttgtgtggctttaggtgattcatctaaacaaaaggaaatggattgaagagagtacttacccacattttacaatgataggtcagagtcttggttcggtttacttagcgtgggaagcattacgcatgttcactcctttgtatttccttgacactagtggatatgcgtttacatatcctcttgctcggatctttggttgcaaagttgtttgctatactcattatccaactattagtttggatatgatttctcgtgttcgtcagaggaactctatgtataacaatgatgcttccattgctaagaggttttggttatctccttgcttatttggtgtttttcaaaagtgaaaagtttctatttctttgtttagtgtaatgatgtttgttgctttttttgtgtagcaattggttatctacttgcaaattagtctattacagagcttttagctggatgtatgggatggttgggtcatgtactcatttagctatggttaactcttcgtggactaagtcccatatcgaagtgctttggagaattccagaacggattacacgggtctacccgccctgtgatacttcaggacttcaggtgataaccttcagacagctcgaatcttatgatttttgtctgttttctggttacatctcagtatttgctgacatcttgggcttattgcaggcgtttcctcttgaacgatcatctgatcctcctaaaatcatatcagttgctcaatttcgtcctgagaaggtgagggatccagtatttgacttatgagaatagggtactatagttttgagggctcacactccaaagttcaaaagagtcgtccagcttactcaattacagtcttgtaacaggctcatatgcttcagcttgaggccttttcactagccttagagaagctagatgcagacgtccctagacccaagctccaatttgtgggaagttgtagaaacaattcagatgaagaacgtctgcagaaattgaaagacagagcagtggaactaaaagtagatggagacgtgcaattctataaaaatgccatgtacaggtatttgctcaaagctctttacggcattctctattttgtcttgcaatactatcagagcttccatgattcttagttgttagtatcggactgcagagaactagtggaactgttaggaaatgcagttgcaggactgcatgggatgatagatgaacactttggtataagtgttgttgagtacatggctgctggtgcaatcccaataggtcagacttaaggacttgtatatgtgattttatctttcagttactcttgcaatttctctaatggatcctctgtttttaattgtgatgcagctcacaactcagctggacctaaaatggacattgtgttggaagaagacggacaaaaaaccgggtttcttgctgagactgtggaggaatacgctgaagcgatccttgagattgtgaagatgaatgaaacagagaggcttaaaatggctgaatctgctagaaaacgagcggcaaggttctctgaacaacggttttgtgaggacttcaaaactgcgattcgacccattttcacaggtcctcttaaatgacagttcttaaaccctcaaaacctgcttactgcactagcttttaaacgcacaagacaagctaggttataccttttatcctctctttatagatttttttttttaattctggttaaaggtctgacgtagacgttgtaagaaacagtttggtcaaaagaaacgagtaagatcttcctatttctagttgactgttggggaaaactgacaccaacatttgctttcaaacgttttcgatttgtccgaatgcattttattatgagaaacttggtgctattcacttcaatgaatggtcggaattggatcttaacaagagagcaagattatgtgaatgtagcaaataacattagaaacagagtaaggaataagactacaagaggaatcactaaaacacagttataaaaagccaaggagcatcatcgttatccatggacaacacatagcctggaaccactctttcaaagctgactcttgctattgcacctcatgctcaaacgcctcgttaccttgttaaaatcagtttaatcgatatggaaaaataattgaatggtcaagaacgtaaattctaatactatggagttggaaactaaaatttgacagatttcaattaattgggtttcttaataagtattagttttttcagtactttcatagtatgatgcttgttgttaattatagattcttctttttaaagttctcaaatgattgtttttggtcacgccggtgaatggttggtcgtggtccttgtgacatgtaaaacatttgctcaaatagttttttttctatagtacatttagtaaatatcactttcgctttttgcacaaaataagtcctgccaagtgccaatatatataaaatataatatttaatacaaaaaccttcattgtataaaaatgttcacgaatctacgactacgagcacgaggttaaagaataggcgtagtaacagtgtctgcgcaaacattttgatcatacattttgaaaaaactatttttttgtaacaatataatttccaaaacatcatttcttattaaccctaacgagttaaaaaaaatgagaaatccccaatattcactttaaatgctccaaactaaaagagacggaagacaagtcttcattgtcggtagtcaacagttgttctattaacaaagattaaaaagatgtaatatacgacgaaaacggaaaagtaactaacaaagtagtgtagtactcgattgcttgatatgattaccaatttaccaagatggcaactccaaattattcccaccgaaaagatgatcatcatgcgaacactttgttacaattattcattctatataaacatatgattattcccatcgttgaagaatctttacttaagattctcaccgtaccacttaattttcaatagtgttaggcttgttacttgagatgcttgaaacttgatgagtaagaggatgaattgcatactttgagatatcagaaattatcaatcatgatcggccatcataaactttttaaatagcaacaagatcgattgattcccttccagattttatactttctttaccaactttgattcacaaagttccaagattgtcagtttgattgataaagttcaacccaaatcactagagtgtcagtgggtaataagaactagaatgtcaatggattgataaactcgaatctgactacaatcttgagaattatttttagtccaatgtgtggtatgaaagttttgatttgaagtgttacttttggccctacatatcttgatttatgcgcaaattttatggatatatgcgattaaaaacttgaaaaacaaaaaatcgttttagtggaaccacatatattaattattgaataaaggcttctctcttccgcatgtgagtatatgtgacaagaagcgccaccaaatctaagttaaagcttgttttttctgtcgatgcgcatacaacaagttttttttttctcatatcacacaataatacattataatttctgtaaaatgcggttcaactacaatgcgatttttatttattacttttatgttttataaacgttgtgactatagtaaatttgtgaagcgtgaagagaaaacaaagtttgtagtggatcgtctttttagggtttttactaaatcgtgtgaaagaatagatataacaatacggtatgtttaagatctcaaaaactgatgcaaacagaaaagataaatcatttcatacatgtaatagaaagataaatcaattttacaattatatatatatatatatatagatatatttgtaaaaacttatttgatgataacatatagtgaaagtacgtttgtgaaaaatgagtaaatgatatttgatcagaataaagagacgacgaaatctataaactagctcaaacatctttgatttggtcttctgtccttcgtcgacctctatgtattcctctccacatgttcccgtcaccattttatctcattaaaacacattgtcccatgaggccatgctacaacatctccaaatctcattatctgtttcatttattttctataacgattgacgaacaaacacaatgaatatctagctagtaatttcgatatttgactatgcaaaataaaatccatataccatgtttcgagtaggcaagtgaaaggaaaaagtggataccgctaaagaaggcattgagaacgtggagaaaagttgtcaatgtggcaaattatcattagcatcttcattgtatagcttttgatatgtgtctttagtatagattaataataaaatcaaagacatctcctctttttggtgtctcaaatgtcttcttagagatacaaatcaaaaattaaagacactcctcatttgctttatattttttttactagttttatatttaaagacacccacaaaaaaatgaccaatgtggatgctcttagttccaattcaaaactctgctcagaaaatatgatcataaagaaaaaaatgtagagaaaatgattggaacatgagagatgtgagtgataccaccggtccggtaaaatttttttttttttacaaatagaaaagttaaagataaaagcatttccctccaatgattgttattgacgataatcgttgtcaaatccaaattttctactattttcatatatcgatttcaatgatgttttcgatcgactttataaccagttggtctttttccatatgattaaagtgggtcgatatacctatttgatttgaacgactcaactttcaaactacatatccctatcttaaattagatctcgaaaacaacttgtatgtttacttatccacacacacacaaaaattgtatatacttaggaataatcaagttttagtgagatagtaaactttggagtacatgcactaacatatttattcgcaaaaaaacacgtgtgtaaaaattgtaaacaaggaccaagttatttttatacgataacactttatttatacaatgtcacttgtacaataatatgcgacccaaaaaaatacgaaatttctacctcgaatttcttacaaaattataactccatatcatatgactctttaagtggtgagcgaaaattcaacacaaaatttgcggctctgcacgtttatgcaaattttaaatttcatcatataaagaaaagagcaataaaagtctacaaggagtatcacaccaatcaacatcaaccttaaatttctccttcattatttagatcaacacccaaacttcgacctctctctatctcactcacttccactacttacacagaaaaccagtttcagattctgcaaaaaaaaaaaaaaaaaacttataacttctttttaaaatacaaaaaataaaacttattaagcaattctttattaggtttctcgtggcgatggagaattcttacgactcaagcaagtggtctgattctacaactccatatatggtctcgtggtcactacaatctgagtcctctgattctgattggaaccggtttaatcttggcttctcttcttcctccttcggtggtaatttcccggctgatgattgtgtcggtgggatcgaaaaagctgagtcactttcaagaagccaccgtctagcggagaaaagacgccgtgaccggataaattctcacctcactgctctccggaaacttgtccccaattccgacaaggtatgtatgactctcacaactgaaatactctcggttcagtcatgaaacttcaatttgagcaaaccggtttatatctgatttcggttaaagaatttttaattcgagttgaccggtttattttctagctgggttatgtaaaccgattttgacttgactctactgcagttagacaaagcagctctattagcaacagtgattgaacaagtgaaagaactcaaacaaaaagcagcagaatcaccaatcttccaagatcttccaacagaagcagatgaagtaactgtacagcctgaaactatctctgactttgaatcaaacacaaacacaatcatcttcaaagcttctttttgctgcgaagatcaacccgaagcaatctcagagattattagagttctcacaaagcttcaactcgaaacaatccaagcagagataatctctgttgggggaagaatgagaatcaatttcatcttaaaagatagcaactgcaatgagactacaaacatagctgcttcagcaaaagctttgaagcaatctctctgctctgcgttaaatcgaatcacatcttcttctacgactacttcttcagtttgcagaatcagaagtaaaagacagagatggttcctctcttctcattattctcacaatgaataaatttcacaatatacatatacatagtataacacaaacctcattattactaaaggttttttccgcattttggtttagatttgttcctactaaaccaatcacgatttgtatatttcaagatttgtataacctaaatctaaatcattccataagacctaagccaagaataacattattcgtaataaactgagtagatagattaagctttaacattaattgagaatccataacaatccaacaacaaggaataacttaactgaaacaagttcagacaaaagtacttaggatttaagcgaaaagacagaaacagggaaggtcttgaagatgagtctacttagatcgctgtctcatctttcgtctcttcctcttcagcctcctcattcgcttcttcttccactgcgaaaccacgcatatacagaaacttagcagcaacaataagagacgtagcagattgatagactaaaatgtattggtgaagatttgaaagatgaataccttagctctcatggcggagaaactcttttgctcagaaccctaatcggcgatttcacggcgacggtaacaagaagtggaaatgtagcgtaactgtgaatatataccttgaaaaccctagggtagaggtatatatatatgggcctttttcttagcccatataacaatatgggccttttgcttatatattcttagcttttaagaaatttggacgagaatcaaaagttaaatattctttttttctgtctgttaaaataaattatttgtttgtttctatgggtttttaaagaaaatttgttataaatttggccaactcatccatcatatacttattaatgtttttatataaaaaaaaacgtatgcattttaataaaatcaggttaatgattaagattaaggatggaaaaaaaaagtaaatcacaataaaatatagaaataagagataggtctccgatgaaataaaaatgcatagtcaaaatcaacgaaacaaaatgaccaactcaaagtcaacaaaataaaaagattttttattccaaaacaacgaaacaaaatgaccaacagtttgtagaaaaaaaaaagacaaacacaagtttaaaacaacaaaaagaaaagctttttaaagctccacaaacaaacaaagaaacacagtttaaagataaacgcatacaaacttagaacacaaaccaaatcaagagtttagaaatgatgattgttaaaacccggccacaccatgttggtattagacgtcgtcgcatcaccattgttttctccagcggttgttacattaggatatggttcttggcgaacaccatcattagccgttatagtgttgttgctcatgtaaaattgtgagttgttaatgttgattccttcgtttattcccagctcacttctcatgtaatcaaaaggatcttggcttggttgattcatagccattgttggattattgatcatgctgtgatgttgtaaaggttgggagactgacccagccaaaccttgggaagtcatcatttggagacgaaatggatccatttccaaatgagggtttccgttgctactgcttccttgataaagacgatagcttttagggtttggatttccgttctccatttgttgcggtatttcatatttaggtggactaggtggaaaaacccattcatcaaaaaagtaataacttttactctgcttaaatatatcggtgttgatgaatcttgttgcttcatctgtccttccagctcttttattatcttgaccgcctcctacaaaaccatcatttgtggtggttttgaactcttcgacttgtatttcaaatggaaacactggtggatcgcgaagaggaggaaattgcatgaaagctagtttcttcctacaaagtaggatagtatctcttgagaaagataacaaggcatacatctcactttggttaagatcagcaatttcacgaccgctttggagttgcatcatcagctcatcaatgacatgctccttgttcttctttttactcttcttcaattgttcttgaaacttatgtgtcttctcttttaggtaggattcgacatttgactctttcttcttctgcacggacttcggtaaagcgaaaaattcgtctaggagaccatgagtcgcctgaggagatggccacaccaatggtccaaccttatcggggctgaaaatgattacaatagcccttacagcacacaatatggttagctctttcacctttttaagtaatcctaccctcattttttgcaaacttgttgctcttgacttgtcattctcgatccatacaagttttactttctttcttgtcatgatcactcttcgatttttatttctctcttttaaaattttaaatgttgttgagcatatgaatgaagattagcgcgggaatccgtttaaatagtgttgaaaagatgagattttggaaaatgatactagtcaaaagatgtaaaattaattgctacttactaaaaaatattgaatgtctatggtaatgttttagttaaaccaaaccttttagatctaaaccaagttgaaaatatcaactcaaaaactagaattttcctatgttttggttataaagttattttcaaatatcataaataccatagaaaattgactaaaaatgaaacttattttgctaaaaaagtaaaagtttaagaactgaattcaaagctaattaaaaatttaccaaactatattggatttggttttacattgattattctttaaaaacaatactagtaaacaaaaactaaaatccaaatcaaaccattaacatgttaaaatctttatgtggttaattgtactattacagaaaattgaaataactgaatttctgtccaaatttaggtcctagtcaatataccaaattgatgatttaattaattgttctgtcattatttaatgctaatgattatattgactaacattattttcattgttgtgaatcatattaattcatagtgttagataattattttggaaactaaatgttgactatacattttcttcagtgtaagtatcattttcatatttacatagtatgaattaaatatatatatatatgtattaccatatgtatacataaaagttgactcttgaattctttatttataaattgttttttttacttcagatgttttcttgttattacattgagactctaaactgagaattgtttataattgttttatacaaaaaactgaaacaacaatacttttaagggaaaaatataagagaataatatattcttaaaactctaatggacatcttgtatctttttctttttctttgtttagcgatcttttttctctcatcgttgtgttgttgtggttgaatgttttcttttgtgtacgtagtaactctctttgtttctcgattttgttttttttggattcggtttggtactactttgccagatttcaataataccaagatatagaggaaaacaataaaactaagctttattccacattgtctggtgatctttcataaacaacattgtatgatttgattaccaaaataatcggttctagaaaagtttatgtcaatctctatctagtatatgaatcaccatacccatatttgtgcacttaaattattacgtaaccaagatatagaaaagtgttgtgatttcatataacaaatgaaaatataataatctattttgttgtgttttgtatatataattattataaattaaattaattattaatattgaaatattcatgtataacccagtcagatatgggattatttttaatttaaattttgtataatactgttaaaagattcgaaatataatcataaacaaaaaataaaattgattttttcttgtcaacttccaataaacaccatagtaaacaagaaatcacaggacaagggaaatacagaaacggagaactctttttagtcaaagaaagctaggattcggacaaaatcatgtccaaacactttgaaggatgatcgatacaaaaaattgtaaacttgaatatgaagtgttggtgtgagaatacccagctcgaataatgtaaataatcttctcaacgacaacaattatgcatccagtgatgaacactttttgaaaacgtgtttctctccatagtttctacattgatgattcctatattactaaaacttaatagagatatgtgtaaatattctcagagataaacaaaatataactatatataacctctgaaactcgaacaaccaaacagaaattatcatatcctatcaataattatatattaaggtaggcacactgtgaaggaagtgttgaaccaataaaattcccatacaactttccaccatctcctccgattctcttccacatatacatactttattggaaccgtaatctcttttacgaattccttgaaaataaaaatcttcaaaaaaataataaaaataccctcttatttatctctataggtagtaaaaaaatcctccaaaattttgcatgcagagctcctcatagaatgcaatctctttgattcctctcaacaatgaatctccaatgctcttgaccgaccttagggatgctcatcgtatataatatgatcttccacaaaaacaaattaatagaattcccccaagatgggatcaataaaatcccaaatactcccccaattatgactatattcttcttctcctccaaaaggccaaatggtcgaagatccatctccaaccatataacccggatccagacccatagaacataccggatcaaccaacggcggtggatgagttattgatagactcgaacccaccgaaccagctagagagttcaaatcctccatcgaactattattattacacccacttcctccttgttcctgccctaacgccacctcatgatgaaacgaagtcgaattagttaccggaacatcagtgagctcgatgtcagaaatcttgttattgttagtattagaatgaagattctgatactgttggtgttggaattgtcccatctggaccatctgattttgttgttgttgttgttgagggaaaaaaccataactagggcataacatagaggtcccaccattaaggaagatgttgttgttaaaagggataccgtacggaccaaagttggctcctcctcctacggtggcggcggcggggcgagggaggagaggtcttagggtttgagtggaggaagaggaggtggaaggagaagaagcggcggagacggaggaggaagaggaagagacggaggaaggagacgaaggggttaagttgagctgagcacgtgacccgtataggtaaacggcagcccggtcgtaggcacgtgcggcgtcttcggcggttgcgaaagtaccaagccacttgcgagtgcgcttacgtggctctcggatctcggcgacccatttgccccagcttctttgtcgaacgccacggtaacggaacttggagttgtccggaccacctttgcctttgcgtttgcgttgagcggaggaagttgatgagtcggtggtggaatcggattgaggattattatgggttagggtttggttattatcttccagatggttgtgttgatgttgggaagctaaagggtccatagatgaagaagaagaagaagaagaagaggaagaggaagtagagagagaaagagagagattaaagaaattgagaaaaatagtggagaggacgaatcaagaaggaagggaaactgaagagtgtttgaatgtcatcgttgtgaatggtcgattagggcggtgcttcttttatttatacttacactctcttctcactcacttctttttttcttttctttttacttacccgtttgttttctaccaaagaagaaatttgtgttgtcataagttacttgttacacattggaatgtaatcaaggatattataaaaacatttaattgctttctttcttttgggtaactatagcaaatcatgagcgatatataacaatatcttgaagttggttcttttctttgattggatgggtaattgtgagaaatactcgcatgttgaaaacactccaaggcattcagatttcagaggattcaaccagagagaactgaatcaaattcaccaaggttaggaatattgcaacatatataagagaaataagcgtgttcaaaaatatatattaagagaaataagaaacgaataatctaagatggaacagagatatcatttttgtttgtttttctaagtacttgtcaatttaaattgtaacaaaaacatagcaaaagataggcaatttaaaagattaagaagatcaagtgaataaaacagtagacaaagataacaaagaaaatgatttatgagttcaagaattaaaagcatcgtttaaagttggcaagcaatgaaactagaataaatcattacataacggctaacgggggctgattagccataaattgtagagaatgaaacactaatcaatgaataattacaaagcgtggcatgaattacccaattttgttcaactctcttgcaatttaagtggttaacaagcattaacagataagtatactaaaaaggatcaaggtaattaatctaccattaccaacaaccctagtaaaagatctaaatgcatttttaatagtgatctttatattttcctctatttatagaggtgactctattttaaaggcattatgttcaaatggtcacctctaaaatagagttttctctataatagaggaagaaatagaaatatttactttttgtctctataaatagagatctctacaattcatctctaatttttcttctatttttgaggaaactctattttagaggtgaccattggagcacaatgcttctaaaatagaggcacctctaaaatagagaaaattatagaggtgaccattggagatggtctaaccatattcgcccctaatttggttttaatctaacttttagtgttgaacttaaccgaagcttctatacttgatgattatgatcttagagaaaaatttaagctgttgggaaatcaccttatgatactatttttttgatgttttatctttatacgtaaaataaaattgtaaacatagatataattaagggatcggaggaaaaacatctggtacaacacgtatcatatttttggacataagtaaaaactagaatcatatttctggagtagtacttgttaaattttggagaagaaaaataagttgatttgcgcactcggagagtgttgcagatccattgcctgctgcagccactggagggacagaaatacagatgcagagagacacagtaattatttttctgctttcattacatagatatatgtgttcatttagtccacttaacaccattcttggaagacgacttggcttcagtcaaatacttcgtccgatagatttagattttggatactacaccttttattaatcttaaaaaagaattatgtagaaatttaaaatactcacatgtcaatggataaataaataaatatattaaaaagaggagttatagtgtagatatttatgtacgcttcttctttctttttttgtcatcatttatgtatgcttcgactttaagaaatattaaaaacaaaatataactgacattttttataagaaaaggaattttgaaaacagagagaagagaagagagtttatttttttggtcgcctagaaagactaatctaccgtatagattatgatgtttgacccacaaatataacaaatggaagaccattaacgtttagacttttttcgaaataaaaacttgacttcttagatcttataccattgaaattaagagacaaattttcttaatattcttttactaaaagtaaaaataaataaaataagaatttgttgaattatctattgttcttatgaatggtagcatatacatgactccttttaatctataaaacataactcttagaactatcgtcataataacaagtttacttagaaacttttcattgatactactaatatagaattaaagattcgtctgcaagggatttacttttgttgtttgccaactacaaaactatcaattattaaacgaagagaaaaataggaatattgcatgggagagatgaggtggcgaggaaagaagcaaagacagcaaaagaaccaaagctttttgtgttgtggtttctgagatctcaacccaattgccttggaactctcacctttttatgtctcagcagaacccaactagttgcgccatacattcattttcttgcatttatccactttattatatagtatcaatcaatatagcttgattattccaatctcaatcattcacgtgaaattttgtataacaatgactcaaacatttgataacattaaagagacattgttgaaggctttttttttagtcaaatgatttccagatgcttaagttaaaatgatgactatatcaaaaggcaaagaatttcaatgctttgctcactaagttctgcaacggatcaaatatatgtttcgaaagatagaaagtgttcatgtttgaatattttcatataaaaaaaagcaaatggttgttgcggcagaggaatattgtcgagcaagatgataaaaatattcacatgcccacgattacaaaccgtgggctgcactttaaacaacagctaagattatgtgtgcgtctatataaaaaaaaaaatgaattctcaaaaaacctttacgaaattctcaaccaatgcctaaggaaaaacaccagtaaggtccaaaaacttgttaacgattcaaaacatttctattttccaaaacgcacagtgaaatgaatgctctgggctaataatgcccaagaaaaaacaccagtaaggtcctaaaacatataaagccgttataggcttcaagaacctcaactcaaatcactcaccaagcctctatagtatagacgatggagaagcattcatattgggctttctggtccattccttttttataatccgtccattttaagtgtaaggtttaaatcctgaacaaattagctatatatttcgaacgaattctgcaactatacacaaactaaacaaacctaaccaaaaccatttatttgtatctgtttacaggtaaagggtaaatttcatctgaatctttgccgatcaaagcctttgtttttttgcttagtttgtttgatgttggctatgtttatttagtttgttaatgaatcaattatacggattctaagattgtgtaagtagcttcgcagggaaacaaacgtttttcgggaatagaccatttttccccacttctatcttgaatctcacaatcaagataactaaagtacttcaaatgtgttatgagttattccgatgtatgataattcttagcgttttgcttttcatcgataacacctcgaaatctcaaatattattgatttatgtaaaaatgttactacattataatcagagttttgaatcaaataaagcaatcttacaaaacacttctctctttggttgcgtatttcgccagaatttttgtacattcgttttcttttctatgttttaggttatcttcaagtcggaacatataaaatgatcttaaaagattaagaaatacggatatgcacttagattatatcgttatttaattactttgtatggtggagcttaatatataaatgtaatttcacatctatttgcagatatacgttggatagtaggtagttccatgctggctataaaataaaatcgtaatttaaaagtcgattattaagatatttatgagttatgcaaagttcattccctttggtcgagctgactttttagtgccaaatctctaattgagattcgctccaaccataaatataaatgagtcgattcatgtctcatataatgcgtatttatcgttgacaaaagaaaatgaaatgataacgtatttatttgtttcatcaatgataatgtatttgtcatcaaatattttatcagattatcttattcagtgtcaaaattcctttttatggtaaaagtgtcatagttccttcaagaaggattacttattaaatctataatatgattctatgattagcgtcgagtcatatagaagctgcgacatgtcagtctgacttgcggtgtctctaattaaataatgaattaacgcacgtctacttaaaccggtattaaacatttctaactaatcagagtttagtcaaaccattttcaatctttaatggggcggttccaatggtgattctcatccccattacgattttatattttgagaatcttgaataattggaaattgtccaaagtaaacagacttgtatgtataaagtttctacttataatatgtaaacaaatgaatttggatatgtttaatattccgggaagggattcattttgtggaaaatatcttgattcttgagcaaatgtgaagtatcaaatatagttagtttaatgaaatatctaatattaaaagtaacttttttacttgattatacggattattctttgacaagactagttttcaacatttattctccataatgtacaaattcatccaaaaggcaaaaacttacaagaccattgaaaagataacaactaaacaaattcagaatgatattaatcagttatagagacgatcaatttttcttttgacatagatacttcttcacttatgaattatagatacaaaaactaactacatatacaatttggtgaaacattaaaaaaagattaaaattaggagaacaaagggttttaacataataatagccaatcatgcttgttgtttgccgacacatactattgcatcaatcgcgctacttgggaccaatggaacaccaaggctactatatatcacggatctcaaaaggaacctttttatcttttgatataaaattccagtaataatagttgttatgttatgcaacaatttaaatgcattgttaagtttaaacttaatgtcctaaacaagattatgagcttatttgaaacatataaagtattatgtacgatatatatagttagaaaaagtgttttcggttgctagtttgctattataagatcctatttttctataaataaatcgataaattgatagtggatcgcaaataggcgtgcaatgagaagaagaataaaataaataaatctataatggtgatttatgttggatgattaaacaaataaattggaaggtgggagaaggaagtaaacaaataatataagaaaaccaaaaatggatttaaaataaaataagtcaaaactcatattttacaagtcaacggaggagagttcataatttattttagaaaaaggtaaaaaagtaaaaaacgtaaagagtaaaaaattagaatttatcctttctctaatctaagcgttaggactcgtcacaagattctcgtacgtgtcaacagagcttgacggaacggcgaccattactttaacggcgtcattttgttcaggaatcggaagcaacaaacagtaacggtcgcaacagaccgatccaacatgaaccggtttacccaaaccaaaatcaagcttctctaaaccgagacgtgaccattgcgacaatatcaagactccaaccgagtcaggactcgctctctccttgctcacagcttccaccaccgatctgacgtactcgtcaccgactcgctccttcgcttgtttcacgagcatcgtcgcgtagcttaatcctttctccgtcaagtctttcacggtggtttgagcacatccgacgacgaatgcgttcccgtagaacccactgggtagactcggtttgactcggtctctaatgttgacgctaaacaaaagcttaaggacctgattcgatggcaagttcagtgatctcgcccagctccgccatacatgtgcagagagtacctcgaacgatgtgtgtttagaattgaactcaccgagtcgactcgcgagtttctttagctcgttaagtttctgtctctcgaagacaaccgatgtaggaacgagtcgctcggcgttgaatcggttaacgaatccgcatagatcgggaacacggttgaactcgggatgactcaacgagtcacgaatcggagacggcataagcaattgacgatcccagagatgtttccgttttaactcggtttgactcagtgagtctttagataactcggcgaataaagtgagaaactcggcgctaccgattccatcggagacgcagtggttaacaccgacggctaaagcagcaccaccgtcacggagccaagtgagctgaacgacgagaggtggagcaccagcgaggacatcgatgacgtggagcgaaagaagctttctccagctagtcacgtgccggggaggtttctgaaagtcaaggcacgtgaggatgtcagagacggcttcaagaaacagagcaccttggccacggcaattgacctcgagacctccgccgccgtcgggtttttctcggacgcggccggagaaagggaagtaaggaacgagagcgcgagagagagcggatttgagacgaccggagagagaatactccgggtcggaaacgggtgggtaaacgaggaggtattcaatggtgaatcggaggaaaagctgagaatctaaagcggagagagacagaacagaagaaggtgtttggtcggaaggagtaataactgtggcttctttcacatgaactaaggatcccattgcttttttttttcttcttatgatgctctgtttttcttcttcttcagaaataaacaacaaggtgggtctctgctatgtgtattatatatatatctctgattattattatataaatgtatattatatgctttttctctttgttttctgttacaaatatatgtgattgtatactcacgtatatagagtatcgagacaagtagggtaatttcgtaatttgggtgttctttgtttttttttacgtggtgtgtcttgtgttgtgtgttgtatcgtgcaaatgtactcttcactcttgtgtgtacgtgttgccttattctcattgatttgagttttgtggcaattttttttttttttggttgatccgtaggtacgaaagttatacatgttcttggaatgtagattttaatggagcatggcgactaatgttcctccatgagcatagtttttttgttcatagtgtttgtttttgagaattttagcacatgttttttcttttgagattttttttaagcaaattagtcacatttttttggtaatcaaaatgtaaatccaaaactttcttcatatatatgatatttacagatttggcaaaaaaaaataaagtgtaattttaaagtgtaattagcaaattggctgcctaacatgagttctaggaacttttgagtaactactaattagtattgaatatgcaaaaagagagatacactagttttattggggatattgaaaagatttcgacaatatttggttgatcttggatatttcgttgatttaagttatttggagaagcgaacaatatacatcatacaacaacaaacctaaaaagcgacttggaaaaggaagggacttactcgaccaaaaccgactccagtaacaaatttgaagtttacacttttcttgttgcagggggttttatatatacacttttcttgttgagaatgatttggatgtatataaggggtaatattaatgagaataaaatggttgtggtggcggtttacacaatatgatgtgccttgttgtttgggcgttggcgcatgtgtctaaaacagtgaaagatttggtgctaagattctcatggaataactttattggacaaagacaaaaatatactcatggaatattatatgaaatacatacccttccataattcggcaaaatttatatagagagagagatacatcaccatttctttccttattatagtcatcttatggttatcaacttatcatcactaacatgtgttatttgataaaaataattttgaatatcagaacactcttaggacacatttatgacttttaatttcgaagcccaaaagtttaaagtcaaattattcaataaattactagattcaataataattagtttcaagtgttgtttgtcatatggacttctaaaatgaaaatgagttttttttttaaaaaaaatacttataaaatgaattattttcccatatacagtagctccaaccaaaagaaataaaattaagctatgtaccatctctttaccacgcgacacgaggcatgagttacataccgaaagatcatgaaggaatgtaatttttaaatggtaaacaaaccattcgaattaatataaataaaccatttgtgcacttttaattgaaatcatatgaatatataattcaaaagcaatgccacttttttctttaaattttactgtagtggtctagtcaattctagcatggacccataaatatttaacgtggtcactcgtatagtatatatgatctacttttcttttaactcatatttttttcggtatgatataaagcttctttattcaatgatgatagaacagtgtacttcggccctacaaatattacctggtcttattaataatccaaaatgtgatgagtagagtcttgagagatttaaggatcgatcaaatcttaattctatggagtttctaataagaaagaagatgcatgaaaccatatattgaatgctgatgttgcataatcacattatactgtctcaatctttccgtctatataacgaatttttcttttggccattaattatagacgtcttaagtggtaaagtattcgaccgtctacaatttttcggaaaatgactagagtttaggaatcccgattataaagaaacgataaaagatggtggaatacatttcacattcccattaattaaaatgtaaagaagatgattcggtaatccattcaaatgggtttatattgtttttgaacttttgattctgtttatgaaagaaataaggaagatttgggaagattttgtaccaagaaaaaaaggtgagaagatttctttatggggaacaaactaaaagggtgacttgatatggtatgcacatgttacggtggtcatgtttttttttttttgttcattctttcttttacactcaaggaatctaaagtaagtcatctacgaactttgctcgtatatattatagagtagaagtagatgcatgctgaaaagtgagaggcactttccatataatatagagctttgtattcatgtcggtgacgccaacgacatgttaattaacaagaaggaagcgcggttaacgatgaaattgaaaagagaaataaaggtaaaaagtaatgttatgacggtgacgctggtgtagctcgaattttcgaagttggtattccttgcaacaagtcgtcgtgtatttcacaagaagatataattcggtcgtttcattttgttaacacaaacaagattatatatgactacgtttctattttcattgagaccatggtaaatcatttagcaatattatccccaaggacaaccactctttagtccttaaatttcggaaacatctatctaatttgttccagtcacattacctttttggacttatcttagtttaccgtaactttagattcaaaccacataaccttcgcctcccgtttaagcttaacttattgtacatataaaatatatagtctagttctaatgttacattaaaaagtaaaaccgatacattaatgatctgattatcggcgaaagtaatgcgtacaattcgaacatgtcactaggaacatacatatttagcccaaagaatcatcaatttcacatagttgtacaacatggcacgtaaacaacaaactaataaaatgagtcgacgatgtactcatgcactatagggagctcacggtgaaatggctagaaatattcttgtggataatctagctagtaacgaatttcaacttacatctttataggcttatatataagatagataatacataacataatcatagttcatagtatcggttcactccgatgaacaaaagaaaatacaaaaaccttttttgaacttactaaaagatccaataaatatgacgagagtcatatgaaaataaagacaaaaatccttgtcattaagttattctctttttttatttttcattttaaactggtcagtacgtgattttcaaaaaggcgtaggccagcataagggtaaacaaatcatctcctttttttcattatatatattttgtctaacgttatttatgttattcgtaacgcataatattttctaaattttttatgaaaattaaaataaattgagtgtacccaaagaaacaccacatgcacatattatccatccaacaagaatctggtaggcccagccttgagcactgggcaagtagccagtgtagccacaatcccttctcaaataaacaagagtcaagagtactaacatttgcttttaatatatatgctaaatacattattcttgtttagttgttaatatataaacatttttttgtggtgttaatcgtcatatgtaaacttaaaagtacaactaagcataccatagaaatgatgtgttttatctacagctttataagttaaataagatgataacgtttgaaaaattgttcatattaatcgtcgcaagctagtgctcatcttttaacataatagtagagacaatgctggtcatctaaacgttatggcttgttttgtcaaattttggctatgaaaatgtgtttctaaaatcaaaattaactaagtgcaacttctaagcttgttttaataccaaaatttcatagactttacatatgtatgactatgagtatatatatagataacctttaaaagaaatttgtataaacgtaaagtaaatctataacgctatattcgatcattaacgggaaactactagattacaactatttggttgaaaaaatgatcaatattaaaaaacatttacatgaatttttctaaatagccgaaaactagaaggaggtgatttatcatattcaacatgaaaataacaactctgtgacctttgttatgtatcatatgtgaaaccaaaccaagtctcctttgaaaatgacatgaaaggacgacaaacatagatctttctatagctggagatgcgaacaaggaagagaggaagattcgagtgttaaaatgtaaaagccggtcaccggcctcttaatgagatattgcgatcataattaatgcaaagagctgttgtaaagttgaatctataaaagagagaatttgtcttttatgattgacaaagctttcatatggtcaaagattggtcggcagagacattttcacttgcatggagacaagcttgtaattcgtaattctaccactacattaatttatagcagttcatcaactactatgtcaagactgtaatacggatttggaattttctgagacaaaaaaaaaacaaagaaaattcggatacaaacaaaaaatgaaatactgttaattattctttgacaatagctagctaaccaagtgaatttgcaagctagtgtaaaatcgaggaacaaaaactattgacaataactttctaattatttggacatggaaatgaaatcgatgtcgacgagtctgtattgaggagaacgtccaccaattttatagaagagtaaaatttgtttttttattttattttttgttgtatatatattattatttggtgatatgggtaatagctagaacagagttcaaaaactataatgttttttatttatttataggaaactataatattaaataattggttgttcagaaaaaaaactcaccaaaataattataaaattgaattataaactctaaaagaataaattggtcatgttaaattcattgcgatccaagaaatattgaaccatatcccatgcactacttttaggttaaggtattttcacctgtacgtgtgtggaaaagaagagttggtgttctgaactttatgtagtgaagagaatcagacacactggtcgataccaaaaatggaacacaaaacagaaatggttggagcgttacgaacatatatttcttagatggttgaaagttgaaacaaaaacaaattgggaattctttaaggatattgcagatgatcgaattaatcatataatatctaatctaatctatattattattaattaggataagcttagattagattagatatgatttgcatctttacccaacattttatgtttatttttttttgatgtgtgataagcattgttttctacttctttttatcacgacccctcttttcgttatctcctttctcgacttctttaattatcttttcaaccataccaaaaggattcctcgcaaacaattgaatccaaaaaaaagaag

SEQ ID NO: 46 - DNA, 93735 bp, Arabidopsis thaliana
aagctttactactcctcactgtttgcaccaaaatatgtgaaagagctcatcgcatagaaaaatgtaaactgatttgcactgttgacagatgtctgcagcggcttttgctaaaggcctgcttgacctagaaggacagctgacgccaatcctggtttgtccttttctctcatgagaactcttggtggttggtaaggtcatatggtcactaatttcttttcttttttttctctaggtttctttggttagcaaggactcttccatgttggatggtcttgataatgccagcattgaaatggaagcggccaaggtttttccctctgtttgatatgtcattttattgtgtatcagtcacgttttggtcaacaagatcgaaactgtttctgaaagaccgtactatcttctcaaaggaaataagtactcttctcaaatattttttgtaataattttaacagttttgatttctctaatttctttccctgcaggctagattgaatgagattgtaacgtctggcacaaagatgatagacgacgaccaagtctcctctgaagatttcccttggatgactgatggagctggacttcctcccaacgctcatgaactcctacgtgaactggtactcatacttttccatctaacagtagtttattgctaatgtgaagcagatcaccaaccattattgagtttgtttgcacaacaaccactgtgcacattggtctcgctttatggttgcatttctcttccattttttccctcgcacaagtgatttactggagtccaggaaaaaactcttatctgttgaattactttctaaataatcaggtgaaattaactaagaatgtgactgaacaagtaagactacttgcaatggatgaagacgagaacctcactgagccatacgatataattcctccatatgatcaagcaaaagcccttggcaagacaaacattgacagtgatcggattgcttctggattaccatgtggtagtgaaggattccttctgatgtttgctcggtggataaaacttgctagggatctctacaatgaaagaaaagagtaagtttatcatcggatttggattttagcgatgcttctcaaaattttcatctctttgtttccagtaaagttttgtgagtagcactgatagttaattttaattgcagccgatttgacatcacacagattccggatgtttacgattcatgcaagtaagttgtttttagtgtatctctagatttacacctagctttagttactcgtttttgaataagccgtaatatgttattctcaccaggtacgacctgttacataattcccatctcgatctaaaaggattagatgaactcttcaaagtagcacaggtaaacaaactgaaattcctccttccctttcctgaaactttaatcatagtttgcactgaaacaatgaactttcttgttacatctctaaaatgtatggttgactgtgctcgcttatagctaagttatgtgttatgtggttgcagttacttgcagatggtgtaatcccaaatgagtatggcatcaatccgcaacaaaagcttaaaatcggttcaaaggtgacaatctaagataagagtagttattttcctctctaacaattgtttttccaggggatctcacaacttatcatttctataatttttttccaataaaacaaaagattgctcggcgcttaatggggaaaatcttgatagacttgaggaatactcgagaagaagcactgagcgttgccgagttgaaagaaagccaagaacaagtcttgtcattatccgcctcgcaaagggaagatagaaatagtcaaccgaagctatttatcaatagcgatgaattgagacgacctggcacaggtgataaagatgaagatgatgataaagaaaccaaataccgattagatccaaagtaatagtctttactttctctctcactcttatatagatagttatttcggctactaattggtggttttcatttcgcttttaggtatgcaaatgtgaagacacctgaacgtcatgtgaggactcgactttacttcacatctgtaagtttcctctttgctccattgcttgtttaagtctgtctatgagtgaaactataatgtttatgcctggtatgatttggaacaggaatcgcatattcattcgctcatgaacgtccttcgatactgtaaccttgatgaatctctcctaggagaagaaagcctcatttgccaaaacgccttagaacgtctctgtaaaaccaaggaactcgattacatgagttacattgtcctaaggctctttgagaacaccgaggtttaacattacattccctttgactctcacacatgcttcaatatatgtatatgctctctcagtgtctgactctagacgtaaaaaacggatgcaggtatcacttgaagacccgaaaagattccgcattgaacttacatttagccgtggagctgatttgtctcccttaagggtaagagcaaaggatgtctttaactaattagaggaacatattataaacttttggtaatattgaaacatgatgcagaataatgacgacgaggcagagacattgctaagggaacacacacttccgataatgggaccagagaggcttcaagaagtaggttcttgtttaagcttggagacaatggagaaaatggttcgtccatttgctatgccggcggaagatttccctccggcgtccactccggttggtttctcgggttacttctcaaaaagtgctgcggtgctggagcgactcgtaaacctcttccacaactataagaactcttcttctaatggaaggagctaagcagagaccaattgttttttccacttatatatattttgctcatgcttttttctatgtgcagtttttaatcatcttcttgtttttctactgatgttttaattttctatgtgaaattgtgaaagggactagtgcagttgggtttgaataaagatatgattacatggaacataaatgagtcacccgtgacgttgtctagtgtttacaataggactcatctattataactcaagaaatgatgatgagtcttattgtaaacactgtgttttcatatcatgctgttacgttaaagttgttgcggatttgttggaatttatatataatctgcaaaagaataggctgatgatatcggataaacaaataccgaatctaaaacaatctaataatcggtggatttttcgttttgggaaaatctcaagacattaaattgataattgaaatacaaattattattattagtaagaatagtactaattgattggaaattgtaataaacgacttaatatacaaactgaaaaataacaaatgatcatgaaaaacattttaaaaaatgaccaaatgaaggagatacatagatagttttatcaaattttaaaaaatgttggtaatgcaattagggaacatttgtccgtgaaggaattaattagtctctgtttaaaaaactacgaaaaatgcgttttgtaactgttgttgagaagagaagagagagttagcaaacaaacacatatatatttacattattattgcccaacaaatctctctctcttgcccgcttcgtgcccgtctcttctctcttcttcgtattctctctccacagacatgaattccctttttgactaacctcctttttcccctaataagtgaatcttacttcttcttctcgccaagatcaaatttctgggattcttcttcttctctctaattcccttgcgtttgtttcctctgatcaagttccgtcctttttcctttttttgttcttgagttctcgtttgagctgctttttgggggagatgggtttcgattctgttaaagttatggagaattggcaatccaagacatctaatgagaatgagaagaagaagaagaagcggaggaggaagaagaacaacaatgtcagaaacagtgaacattatgaagaagaagcaaatgggtgttgggtcaaatttaggtatatagtctgttgcgcttcttcaacatcagacgttgagacctctctcactctctctactagcactggtatgccttcttcttttggctcttttcttctctgctctatttggttctgcaatttagtttcctgtgccgttagagttaataaaaacccttcctttgagattcaaatcttcttcatttttgtttccatatttgtcacaagacgtatctttccatctagggttcttattgagcaaaacctttaatgtcattgtggttggtttacctaactttgagctacttcatagattataatgtatatatattgcagcaattgtaggaactgacatttgaatggttttttataacagtgggaagtcagtccgcaattgtgcaatcaaatgaccaaccggttggcccagtctcttctactactacaactagcaatgcagaaagctctttgtccactcctatcataagtgaagaacttaacatctattctcaccttaagaagttttctttcattgatctcaagttggctactagaaatttcagacctgaaagccttctcggagaaggtggctttggttgtgtcttcaaaggctgggtcgaggagaacggaactgctcctgttaagcctggcactggccttactgttgccgtcaaaaccttaaatcctgatggccttcagggtcataaagagtggcttgtaagatccttccttccttctcttttcttctatatatatatatccttttccactgttaaacacacaactaaaggttcctgtttgcaggctgagattaattatcttggtaatcttctccatcccaatcttgttaaactggtgggttattgtatcgaagatgatcaaaggctgcttgtatatgagtttatgcctcgaggaagtttggagaatcaccttttcagaagtaagtaaaacaactacaaccttcatattctaattacactgtagagttattttctttccttttctttgttttcgatttgggtaacaagtgtctacaatttagagatgtgtctactccatattgttaaagtgattagaatctatacagctaaaattggaacctttctgctctatatggtaaagttggtaccttttagtgctgtcttagatggtttatattgcttgactgtattgacccacgaagcaataagtaaatccctcgcattcattgtttcaagatttttcggcgtaaaaaatgtgtttaaaaagacacagtgcttttgtatgatttatcttctcagttatcattgatgcaaatctttttatttgtgaattaacttgtgcttcgtgttgaagggtccttgcctcttccatggtcaattcggatgaagattgcattaggtgctgcaaagggtctcagtttccttcacgaagaagctttaaagccggtcatttatcgagatttcaaaacctcaaatattttactggatggggtatgttttcctcttctttatatcaagggatcaacatcttatatacacgtctgtttctttgcttctaaagtcttaccatgtcccaatttcaggagtacaatgctaaattatcagattttgggcttgccaaagatgctcctgatgaaggcaaaactcatgtgtctactcgagtcatgggcacttatggttacgctgcccccgagtatgtaatgaccggtaagttttgttttttgtctttgcatttcattcactcctctacttatatcttctctgtatggttgaatatagaaaattagaaacctacacatatggttgatgcaaagtattactatgatgaaacatacatctaatttctttggtttgagattatatataactactgtcctcttattactccttaggtcacttgacatcaaaaagcgacgtttacagtttcggtgtggttcttctcgaaatgctgactggtagaagatcaatggacaaaaatcgaccaaacggtgaacacaacctcgttgaatgggcgagaccgcatctcctggacaaaagaagattctaccggttacttgatccgaggctggagggtcatttctcagttaaaggagcacaaaaagtgactcagcttgcagcacaatgccttagccgtgactccaaaataagacccaaaatgagtgaagtggtggaagtacttaagcctctcccacacctcaaggacatggctagcgcttcttactacttccagacaatgcaagctgaacgtttgaaagctggttctggttctggttctggtcgtggattcgggtcaagaaacgggcaaccagtgtttcggacattgtctagtcctcatggtcaagctggttcgtcgccttatcgtcatcagattccgtctcctaagcctaaaggtgcaactacttagattggctcgcaagtgtggacgcaagcaaacgtcttttttaaccgatgtaaaaccgacattgttaaccgatttaaagaaggaaaattaaggttgttccgaagaagatccgaatttgtgtatttactacctttgtgacctcatgtttcttcgtctgttgtaactcttgaacaaattgtctgttagggtaatattgtcattatgtattagtcgtttcgtatcgcttcaccagcatgcaaccaccacttcttcaatgtaaagatagatagatatcaagaatggtaatggaagatgtgggtgggggtgagagacattttgctttgaaattttgaaaattttcttctctttgatttttggacttatctacttgtagcttgtcgataatcgagttattaaaatataaatacgaaagaagaaaactgacaacttttcttacgtgaaacttttatactcacatacaagttatccactttcttggttaaacatgcgagccgcaaggaccaacgacttttatatacaaataatttccttataaaaaggattacagtaagatactttgcacactagcaagcttgatgattgtatatcaacatcataatttttcttattaagttatgataaaaaacattcaactataatttaaaatataatggaccgttccgaatttccataaattcggttaccacctccaccattttacatcaaacagaaaccaaaaaattagatttagatatatatatatatactagtagaagtagaaccatcttgttctcgtatattattacgaaaccctacagttaacagctgcagaataatataaataaagcgacactccacttttttctcctacattttgttgaatttgaacctttaaatcaatagtatataagaacatacaatgtaatagataacgcgtttactcaatcaaaaggaacaagtatatactactagataactcttgtttattggcgtctgacaaggctctgtagtatattcaacgatacgattatcctcttttcttcgataaaagtatattcgattctcttactacagaaacatagtttacattaatgttagtgaaaaataccatgcacggaaaatcaaagatttaattctgtggtttgtataatttgaagtgtataatgaaactattttttagcctaacccaaaaagaattaaaaagaaaaagtaattgttataaaaacgaaaagcatatttatcaaatattattattgaatattctccaagatataaacaatttgacttttcaatgaaaatgccactattgaataataaataggaaatttccgaggagtagtacaactagatgacaacttgacatgatcttcttcttacttttgtctatataacactcctgcgactttcttctcttcaacaaacttacagagagacaaatacctataataagccattcataatcttcttgcttcttgttcagaataatggggaatcttttctgttgcgtgcttgtgaagcaatcagatgttgcggtcaaggagagatttggcaaattccaaaaagtacttaatccaggtctccaatttgttccatgggtcatcggtgattacgtcgccggtacactgacccttcgtcttcagcaactcgatgttcagtgtgaaaccaaaacaaaggtaagtaacattgaacacacataatgcaaaacttcttcttctaatggaccattaattcatctatgattatgtttcaggacaatgtgtttgtgacagtggttgcatccatacaatacagagtcttagctgacaaggcaagtgatgctttttacagactcagcaatccaaccacccaaatcaaagcctacgtctttgatggtatatatatctcctcttcatttctcaatacttagggaaagtgatgatttatccggtcaagttattgattttcgttttgttttttcagtgatcagagcatgtgttccaaagctgaacttggacgatgtgttcgagcagaagaatgaaattgccaaatctgtggaagaagagctagacaaagccatgactgcttatggttacgaaatccttcaaaccctaattatcgacattgagcctgatcaacaggttaaacgtgccatgaacgaaatcaacgccggtaagtcctcaaaatcgtaaaaccctaaatcaaaatctaaacaaataaatggtcaaaaccctgaattcaattgttgttacagcggcgaggatgagagtggcagcgagcgaaaaagcagaggctgagaaaatcattcagatcaaaagagcagagggtgaagcagagtcaaagtacctgtcgggactcggaatcgctcggcagagacaagcgatcgtggacggtctgagagacagtgttctagggttcgcaggaaacgtgccagggacgtcagcgaaggatgtgttggacatggtgatgatgactcagtactttgacacaatgagagatatcggagcaacttctaaatcctctgcggtgtttatccctcacggtccaggcgccgtctctgacgtggcagcgcagattcgaaatggattattacaggccaacaatgcctcctaatcactcaagtcaaattgtcttggtcgtctctttatatatttttgtatcttcttattaaaaaggtaaatttgacttttaatataatggtgtgcttattgtgatttgtcattatgtttgtacctatctcttttgtgagttgtgtgatagatatactttgtattttttcttaaaagtcaatataaatttctgtttgcgagagaaaaatcgaatctttgaatagtgaactttgtggcgataaactaatataatgattaatgaagagaatgttgcgatataggacactttcatataatgaagagaatgaacctgatcgataaacatgtgggcctaaaatgaagcccatctcaatcaactctctggacacaggtccacttactcaacacacaggcccatctgaatatgcaattttcattatgacacggcaaataaaaagagaagcagaagaggaggatcttaagagtttcatcaccatctcaagatgatcattttcaacctttttattcttctacaaatccggcaggaaaatgggaaagatcagtagttgcccactcaaaccatgaaccaagcagagaaaaaacagagtacgtagaaagaaactagtttaaaaaaactattgcaacttcttcttccatctcagtttcaaggcttgagtgcgagagccaatccaactttagcactcttgtcaattgactttgtgtcgacttctccagagattgtgaagaatgacttgggtttccactcgtgttgaatgagagcacttgcaatacccgcactattgacacgagccttcacagaggtcaaggggtcaagcgagtgctgtgttccaacagttatggtgctgtccttgctagataacttgtggctcacttcggctccaaccgcagtgttgaacagcgggttcacaatgtgatagtaagatgcattcaatagatcgcccttgtcgttcctaacaaacaacaaaatcaaaagatattaaatggaaacattgagaactccatctttcatccagaattctcactaaaaatcacttacacagtaagggaggcaattaagtcctccttggtgaagcttaaaccagcattgatcttggtgaaatttccagacttggtgtcaaatgaaacatcagtaccaacagccaagacattggagccaatcacaccagagaagttgacagttgggttctgagtcaatcccatgcttgtgctgataccggcgtactcatgcaagtattgcagctcaacctgtttataagacgaaacacgataaaaatgagaagtcaactctcaactgatgaaactttaaaacaatacaaagaaatgttgttgaattaataaaatataccttgccagaattttggtcaggaaccttgaagctgaagattgacctcagtccgggtgcagcctcatcaacggtagcggtgatcagaaactgaaaccaatacacacaaagttgtaaggtaagtagcccaacaaacaaacaaaaaactataactcaatatacaagaaaaacaggagatgaaattgagtacacaaatacacttacagtagaatcagtgcaaactttcaaatcagtagtaatgttctttcgcctcgactgaaaagcgacatctcccaacaataagtcacctttcttagttccggttgaggtgatggcctaaaacaaagaaagagccagattatgagcaacgatgcccaagatagaagaaatccaatgtttaccatcacacgaaacataagaacaaagtaagaaatccgttacataagataacaatgctaattcgacacaaacctcagaagctaatgaataaagcaaaagtggaaacagaatacagaagacgacattccataaaccctaatcatctataatgaaatgagaaacttacaacaccggcaggagagaaagtggtgatactgaatttctggtcactgttgtggtctttgtacagaagatctgcaaatacacagagcagagcaacagttttagacagcttattaacaaaacattctcaaaggggacttaaatggtgagaaatgctaaacatgaaagagaatcacagcattcaaattggctattccagatcaacgataaacaaaacagggtctattgagaaaggtagagagcttaaacgagagtgacggagacattgaacccaaggaattactcatatcagcaccaatgattgaaatccattacttatgaatctctacccgatcgaatactcgaaatctacgcatgcatctatgatctatcccggtagccaaatcgggaccgggaaaaggaaaatctaagagatgagcaaatgaatcaaaaatcctaaggaatcaaaagaaagtccagattagaagacagaacgggacactaagtagcaacaatcagatcgtctacgccataaacagatttaattgaacgaaatgaaagagaagaagtgagggagataataaaaagatacctctggcctttttgccgatttcggtgtagagaccgggacctttcaccattgttgcttatctgagaaagttggaggatgttctgaaaagtcttctctgagaatcgaaagaacaagagctggaaaacgtggttggcgtctataagagagagagactgaggaaaaccctaaaatgttttttatttccgaatattatcagagaaagaagagttttcctgtttatcaagcataattttatcagccgttggatggagactcgcttgcttcagtattccttatccacagccgtccatatatttattccccactcaccaagaaatttattctcatttattacgtggcaactaaacggcgtcgtttaataacacatttttctttccacgcctaaaatgagaaaatcgtttttttcccttgatgattagtcgcataaatttagctatttcatcctttattttagtcatgaatgagtaatcgaatgtgatggtgaaatcgtgatttttacatatttatcaaactattttcagaaaaatatcccaactagttagcggctgatatagtaaacgattagtcaagtctccgttatggtagcaatttatactacaagcagtctgacattttcactacttttagatgcatcatgagaatgtaaacgtaattgtttcttgttgctaaaattggtcgaaatcataatgttagtctctccatagaaatatccaaatataggaaacgaacaaaaaacaaggagatgtaaaattaaaaagaaaaaaagaaaacaaagaaagctgtccacaagtaaattatggtggctttccatacataacgggaaatttttctaaatatagtagttcactttcttcaccaggttttttttatcattatttaaacaccaacattcatgtttgtcaaacttcgcaatacgattcatctaccaaaaaaggctttaggtcaaacagaaataacgacctaaagctatgtttaaagcttagcagttctccacatatatttcaatatataaaaagattacccctttttaaaaaataaaatagatatttgttttccgtaaaagaaaggggtaatcaaataaaatggagacggctaggcttttcaaattagtgtgtgtgatatgtattgccagtttgattccgaccatacgagccaatgttgctgatgagaccgatgagtattgggtaaacaaggccaatgaagctcgtaaacatacccttatggcttatcatcccgacccttatgagatcgtcgaccacttccacgagcgtcattacgagtaagtcaaatattagtatctcgatctatatatgcattgtttttgaatcctaccgatttgtcgtctcgttgaaattaaccaggcttgattgtaatcattagagaacggtttggattagtttattctgatttcattcaaattacaaatatttattagtagaagttttttttgggttgtaaaaaggatgttggatttatgatggttttggtttggtgtatatcttcagcaactcgactgacgtcgaggggaccgaggaagagaaggcggtcgcttccgaggaagaggacgtcattgagatgatttctagtccgacaaacagcacaaggcggagcctaaccggtaggggcaagggaaaaggaaaaggaaaatggagcaagctaacgggaccttgcaccgcaagcaaccccatcgataaatgctggcgttgccagcctgattgggccagacgtcgcaagaagctcgttcactgtgtccgtgggtttggttacaggaccaccggaggcaaacgcggccgcatctatgtagtcacgagccccagagacgatgatatggtgaaccctagacctggaacactacgtcacgctgtgatccagaaagaacctctatggatcgtttttaagcacgatatgagcattcggttaagccaagagctgatgattactagtgacaagacaatcgatgctcgtggcgctaacgtgcacatcgcatatggtgctggtatcacgatgcagtacgtgcacaatatcatcatccatgggcttcacgtccaccacatcgtgaaaagcagtggtggtttgataagagattcgattaaccactttgggcatagaggagaggctgatggagatggtatctctatctttggggcaacaaacatttggcttgaccacatttctatgtctaaatgccaagatggacttatcgacgctataatgggttccaccgcaatcaccatctctaactctcatttcacccaccacaacgatgtgagcattccacaacgtaattaactcgaccgttatactattaatgacaacccaagttaaccaaaggatcttgttatgtttttgggttctgtctttaggtgatgttgcttggtgcacaaaacaacaacatggatgacaagaagatgcaagtcacagtggcttacaaccatttcggaaaaggacttgtgcagaggatgcctagggtccgatggggtttcgtccacgttgtcaacaatgactacactcattgggagctttacgcgatcggtggtagccaaggtcctaccattctcagccatggaaaccgtttcatcgctcctcctcacaaacaacactacagagaggtccaaaatgatttgagtgtgcacatatatatatggcatcaaatcaaagtactaatagaaaacatgtgtatatataggtgacaaagagggattatgcttcagaaagcgaatggaaaaactggaactggagatccgagaaagatgttttcatgaacaatgcatatttcagacaatctggaaatcctcatttcaagtgttcgcattctaggcaacagatgataaagcccaaaaatggtatggccgtttctaagcttaccaaatacgccggagcattggattgccgggtcggaaaagcatgctaaaaatataactcactactaaattttttctctttgtatcaaagcctatataagaactgataaaatcatggggtaaaaatggaaattaattattctaatttatgaaaggctctgtgtaaagaatctatgcgaacggcttgatactttgtaactcttaatttgtttgtgtatgtttttttgtgctcgttaatttgtttttttgcaaggatgacaaaatagaagtaaggtaattaattttaaaaacgatgacttgacgaaatacatatatcaaagacttagaatcaaagaatttcatacaagaagtattttttcacaaacatattcttttttctgaattttttttcattttgattaatagtgtccagtgacatgcagcgcaatttttaattcttaaacaaaaagaatatcgagcatggatactgccgaaatcgtcgaagatctcatattttattttatctgataatacggacaagtcaaaaaccttattaataggctcaaatctaattattaatcagcttcatatttgacaacaatatcaaaatcttgagtgcaaatgacaaaaggctcaataaccgcacaaccaagaaaaagaatgataaatagcaccaataagtgttgtggtgattcatgcagcactacaatactaagataagatatctatattgctgatatttgtcaatttaagtaattttgaattttgaataaaaccaaagtataatactaaacgatgcatggtgcactagctcactagctagtaatactcggaatagtgtgtttcttccaaaagaataatatgattaagaagattaaaacccgcctataaatatctactaagaaattatagttactcacacttacattatacacatacaagaagaaaaaaagaaaaatggttaggatttcagttttagtgtgtttggttcttttggttacaataggagtcatggttagtgtctcactcgctgacaacaacgaagagaaatcgactgatctgaagaaattcaaaggaggagtaactgatcactcgattagtaaggcaaatgataatgatcacgacgatgatgatcatgatcaagacgatgataatgatggagatcacgatgacgatgaccatgacgatgataatgatcatgacgatgataataatgatcatgatgatgatgataataatgatgataataatgatggagacgatgaccatgatgatgataataacgatgatggtgatgacgaaaagaagacgttgagggtacacgagctaaagaaggggaatctaacggtcaaatttacaaaccggggtgcttctatcatgtctctccttttccccaatataaatggttagtggaccatatcatatatatatatatatatatatcgttttgtacgtattcatatatattatttagtgaaattcgagtaatttccaggaaaattagaggacattgttctgggatatgacagcgtcaatgaccacatggttagtaaaatactttacttttaggtcaaaataattttggtatcagatcttgaaaagagatttaattagctttgtatcagattgacacggtattttgtggagtgacgttggcacgtgtagccagtaaaaaggaaaaggccgctgcaaacgatggcaaaaacacgatccatggtaaatatgttttaattaattacgttctaatttaagtggacttcataaatcataaatgacaaaattcataattaacatttttctctaattaatcaggtgggacgaaagagtctagcgatgtgatttggagagttaagaaacacaaacataatggcaaaaaaccttatattgttttcacatacacaacaagtcctgatggcgatcaaggttcgttttttatccttaaaaactttatctgtatatcttcttttttctattatatatgcataaatgttaagatagagaaggtattcatgttattcaatagggaaacttgaagtcactgtgacatataagctggtaggagaaaacagattgaaaatggtgatgcaagcaaaggctaaagagaaaactactccgttgaatttggttcatcgttcttattggaatcttggtggtcataacaatgaagatatcttctctgaagaaattcaaattctcggttccggttatactcatctcgacgataatctcactccaaccgggaaaatcctcgccgttaaaggaacacccttcgattttcgccaactccgacctattaaagacaacatcaatgagcttaagacagggtaaaagtttcaaacaaaccggatctatcttgaaccggtttgtgctacataatttttttaattattaatgttggatcaactaatatgtattatttgttttatctttcgaatgcaggtatggtataaattattgtctagatggtgttgcaaataagatgagaaaagtcgtggagcttgtggacaataaatcgaagataaaaatggagttatctacagaccaatccggtctaaggttgaaaaccactaaaccaaaaaatggatcggttcataaagcttactctggtttatgtctagaatcacatgcaatcaattaccaatatcgttcttcgcagataattgaaccgggggaaacttataagcatactatgctctttaagttttcttttgttccgtaaactttgtaacgttactttttctggaaagtttatgaccagaaattttttatataataacccaatttataatgggatgatctgaaaaatatatattgtaatagtttggtactaggtccatttgccggtgatttgacaaaatatcgaaacaatttatttttagtattttcgaccaaatacaatttggacatgctagaagaaagcatactaattacaaaatatttgttacacaataaaaccgttgatacatgcgtagacattatatagatagacatgcgtttgaatatcatatctttttgttaatttaaaggttactaattaaatatcatgaagtaaccgattcttcttctaagttttcttcaccaacttgacaatgcgttttatggtagacatatactctttctccttctccggaaccaccgaattataggcattctccttccatgctctgtagaaaaatgattctttttcaacaaaaatgtttgctttaatatggttgtacgttccattcttcagagaatctgaaatttcattaagtaacgattcagatttcaccaaagatttcaattcgcttttcatatcaccagttgattgcttctttaacgttttcaattctccgagcaatttctttgccttctcaatttcctttagaagattgtttttctcctctgcttgcatgagttcactttctttttctcctttcaacttgttcaaagtttcgggttttacatcgcggagcttcactagcttcacgtctctcgctgcagcgtcatcaatgttgcataccaatgcgatgactagggccacaattaacccagacagtgcataagaattctttgccattgtaatgtttcaattaagttcttaacacaaatctttttttcttttgtatgttttttttttttttttgttgataaaaacaattaatacctgttgtcaaatatatgaaaggactgaaacttgtttcggtggtagccctttatgcaagaaaatagtatctaaaaatagaaggtaaaatttggtattttgatgttcctaaggtaaacgctattagtttaaaagttttagcaaatagtttgcgagttgtatggataaccaaagaaagttgagtaacccgagtcagtacaattctaatttgaccatcaattgtacatactattattagtcataaataatgtatataagatactctagaaatcaaaacaaaacacaagaactcacagatctcttctcacctcttttcctttaacaaactatttgaatctaaattcaaattgatttgttaagggaaacctgagctagaaaaaccatggcaaagatctccttcgtacttttcgttgtggcccttatcgcctttctccacgcttatgaagctcgcaaagtagtaaatctcggtgaagcatttgaaaaagacttacataaagccgaggccatgatcgcggaagaattaaaggctaagaaaacgaacattcaaggtttgaaatctgaggtgaaaacgttgagcaaatcagaagtgatgttgaaggaacttggaaatgcttacaagaaggatatggacttaaggccttacgaaaagaaactcaaaaacttcagcaggatcgtagccctcaagaaagcacctatgaaaaacaacaacaagaaacctgtatccataatccaatcgattttgaaggacttcggattaaacggagggaggaactgacaaaaaactattaataattagggtgtgattaatgttttaatgaggtttcgacttcgccatggagtttagctttacaagtgagaggagccaataattctcccatagtatattagttacattaaattgtatttaatacaattaaatgaaatattactacttattatgatcataatatgtttccataagaatatattctgattacagtttgcggatacatagttaacattgacattgccggaaaaaaaaaaaaaaaaaaagtagttgcagtgaatcgcaataatttacagactaatgaaatgattgtcaaactaaatatttctgatttaatttggttatgacaatgtgtcttttttatttctgtatgataatgtgtcttatactctaattaatatatatagttacagatcaacacgataaagataattgttttaccgataaatataattcaggagtactcgatcagatacgttgatatatccatcaacataatcatgtgctcttcaacaaaatcttcaatagcatagaagacttgagaaattaaacccacaaatacacatgctaaaatttagctagaaaaaaagaaacacacacacacacatacacatctataccttatgtttaatagtaaatttaattaaacaaataaagtccatttttatcactatatttttttataaaaattatgattaaacacgtaaagttatgtagtttattttcctttctatttgccagatgtgcatacgacatggtttctggtaataataaaattatttacaatttaaattattaattactggtccaccaaaatcactagaaaattaccgtaatttcttaagtttttaatattcctaaaatctttttacttaatcagttaattcataaccgttacgaacaaatatctaaaaatagaaagcaagaatcttattttttgacattccatacttgaccgttagagatttgacattaatattgaataagatacccaacacttttacgaatattatgggtgaccaaagaaaatcaagtaacgaagtcaataaccattcattgaccatcaaaataaggtgacatctacatactatttttacgcagagataaaactataaatgctttacgaaataaacacacgaactcactcctctcatcacaatatatatattttccttttaacaaactataatttgaaattatttcaaattacgttttagggaaaattaatctttaatcatggcaaagatctcctttgcgcttgtcgttgtcgctcttattgtctttcaacaagtatctgaggctcatcgtccgatagatttcaacgaagaagtacttgaaaaggacttgcatgaagccaaggacttgatagaagaagacttgagagagaaagaaacgagcatcaggaacttggaaagcgaggttagtttgttaaccaaatctgagatgatgcttactcagctcgaacttgcttacaaaaatggtagaaatcttgagcatttcgggaaaaaactcaagaaattcaacaggaggatcaagcgggctcctgaggaagtgagatacgtttccatcatccagtccattttgaaggatttgggattaaacggagggagacattaaaaacaagaattagggtttgatgcgttcaaaggaggtttgatattcgcccatggagtttggctttacaagtgagaggagcaaaatcatttgcccatagtatatatatttatgtatttaattgcatcaattaaatgaaatgtattactatactaatattgtaatttgtatttttctttctttttttctgcgctgagattttgttaatttagttatctcgcaatgtatcttaaaatagttacaattaatataacagatactttttgtttttcatacaaataaaaatgattcatgatcgagtttgatacccgtctcagcatatagaatcatgtgcacctgtcctcaccagaatatttatgttcatatctatcgatgatttcatatatatttgagaaacattataattacatattaattctagctagtccaagaaactacccatcgtatatgtatgcacaaatatttagtccgtagggttgacagttgctacttctcaacttgggatagcaatgtcctcttatgtaaattccgctgaaaaagaaaaacacaagattcggcttaaagagaaagaaaccaaaagaacaagagtgaactctttcaacactgtttccacttttgttttcttctttttggtctgttcttctttgtgtttggaacgtgtgcttcttaataatcttcttctttcctaaattcactattctttcttatatatttttaaaatgaattaacgtaattatttttataaagtaatgtaggatagtgaccctgacacatgttgttgacaaaaagaagaagaaggtaatgtatgatacctctcgctgattaaaacttagctcacaacaacaaaattactaccattgaatagattcatttcactcaaaacaattttgaaccaacaaagaatagatatgtctatgtagatgaagtgaacgtgaatactgtatttggtattacatgcaactacgtgacgcatggcatagtttttttttttttttataataaaaagttaatggttccattaatccattaagatttaaattgcaacttgcaaagataaaatcataaaatataaaatatatattaaaataatctttgcatataatattagtcatggatcatgttatgtcaaagacagagctggaatcccactcgaagtcacatgcatatgaatctttctcacttttatatccttactttcttaataaatttgtaccaacccatcatatatatataaaattggacatataagttgagaaaaatcatgatttttaatctcactcaattggttagaggagagttttgttcgggaagtaaaagagagtggttatgcttttttgaaccatttacatatattgtaaactgtgatcaatccacatacatctaacaatgttacggccgaatgcaaagaactttatgatttttattaaattaaagcaacaacaaattttcgcactatacaccaatgctctacaaacccaaagaaaacaaaatgctccattaatttaaattgaaatgagtagcaataacataattccaaagagaagaattgtgtcttgatcttctcctgatgatatgatgatgatgattatgatcatttgtcttgatgcgtgctgatgacttttttttgagctttagaatcatgaatcagttgaactggtggtggtggtggttgtggtttgggtcagaccatgcccagtaaccagccggcgtcgtttcatcaatgccattaaacatgttacaaaggctttcttcttgaactatttcatgattctgatgatgatcatcatcatgtgcagatgatcgaatcgatgaagggaataggtctttgatcgtgttcacatgtgttgtaatggtctctctaggcatctccagattgatgtctgaactattctctgtgcttccgttgttgctccatgaagcttctgcttctctctttactatgtttccttcattacattctttgttctttaaagccattacctttaaccatcatcacacacaattcaaatgttaagttttagaaattcagatattaaaaattatcatttctatatatcattaaaataaacataattatatataatttaaattaacaaaatatttttaaaatgactaataacttaaaatagataaactgtaagactatatatgtaaattatatatttacatatacttagcttaagtaatttttgaaaatcttgtaactattacatttcaataagtagtaaaatcatttaaaacacacaaaaatgatatgatataaaaatcagtattcttgtcaaatttggttagcgcacacatgccattacttgatagtcatatgggaatgtattaattaaattgtaaatattgatcaagaatcctttttattaataaacaaaacacctactgtcttttgacaaacatcttatagtgttggatcatgtgcctaacaataatctattgcatttcgtattaaacgactttaatacacacaagatacatacatatatatatatatatacactgatatatatacacatatatatatactacataaatagtaccaatccaagccaataatcagaaaaatatttgtagtcctagatttattttacgttggttattactattagtgcaaaaccaaaaataaaaaaaccaaagaaaaaaacaaacacaatcaaattagaaatgaaagttgaattaaacaccttatttactatataaacacacatatatacttacttatatagatacatacctcagcaaggagtttcttgttataggcaagtagagaagcattgtcggatttaagagactcaaactgtttcttgagtgaatcataatctctctcgagctgtctagtcttccacctagctctcctgttttgaaaccaaatcgcgatctgtcttggttgcatccctaatgctttagctagttgtatcttcctctctggctccagcttgttaccaagctcaaagctcttctctaatgccttaacttgctctaattgcagcctcttcttcttctctcccagcatagtatgtgccccatcgtctgatagattctcctcatccaaggtttgattatgatcttcttgcacgttcattaaagacatagatctgttcatcatgtagtttcctcctcctatatacaccaacagaattcatgactcaaatctatttatgtggagaaatagtgagagaaagagagagtatagtaccattgaagagatgaggaggacaagaagggagctgatcttgactgttgtcttcatgaagttgttggaacataaaaccatgttgaggaaacgccatctctaatctcaatccagcttctgttgttggatcaaacacatacatgtatgtattccaccaaaaacctatcagtgattaatggattgtgaaatcagtatagtgatgatcaaatatactttgttgtttgcagatttggaaatcactatcaaatgagttaggtgtttcttgtggatctcatcaacctctcatataagagaaagagagagaaagaatgaggaaaggatcaagctagggaggtttctaggacccatccttaatattttaaaagctttaggcttattattatatttcatatatattctccagttcatgtaataaagttattttatagtttctgcctcaaatattttcgatcatgtaacgttactaatcatatcttcatgatggttttttttttctttttcttttcacaacaccttttatgctttaaaacctcacatatcatttatttatgttttccaaggaagcccaaagactttttacatcaattgcttcctcctccaccgatatgggccgctgcttttgcagcccggcccaaagcatctgagaaccataaagccccattagcaaagtaacgactgttgaccacactagtcgctgcagctgcagccactttccctgtaatggtggctgcggctacagcagctgtgcccgtgacaagaaccgcggatttagtgaaatccgagaaatgatacttctcgtccgctgatctcacgagttccatactcgactgaatgttctgtgtgaggccaaggtaatggctgatctctgccaatttggtcgctaccaagcttgaaaatctctgagactcatccaaagctttggctttaccaatcgcgtctttgcttaaaacgtagcctttagctaacatcgtctgcacaacttgttgagccacggttatggcctctccaggcgatgaagcaaacgcgtctgaacgagtcacctacaaagaaacattttcgagaatctttggcttataacctaaagtaacctagtaagtattgtttttaatgttaccgtaacactatagtcttcttcttgtctgagattgttagattcatgtaaatagacaccgtagaccgatatccaaacggtttgatcaacgatcgtagctccctgaagatcaacattaaaatcaatgccaagaagatcatactggaaatttctagctaattaagggacttacgctaagtaacacagccatatccagagcatacgcatctctgaaggttacataagccgttaatgcatccccttggcacctgaaatccatggagacatgaaacaaaatataaacagattcaagaatgattaataatttactgaacaatgaacgttgttgttacccggtgatttcaacgagctcgacgataccacagtgagagaagaacctatgaacatctttctcagtggcttgaggagacaagttggtgacttgagcaacgtaaccacaaggatacattatattgttctgttttctcacacgaacctagatacctaaatcaaagaacaaacataaacaagattcttgaatcacattccgtgaaccgttgagcgattttctagagatttatacagcaagaaatctacaaagctacgattactataatgattcaaataaaaaaaataaaaaaggtgtccaggccaaatagttagcggagagggaagaaagaagaagtaagaaccctagattataattgaatgagataagagatgaaagtaacagtaacaaagataatcaatgagatatgtatcaaccaaccacacaatcggaaacttcgagaagcagggcacgaaaaaaaactgatagtgtatgttctgttttagattacccgattaaggcacaatagaacaggacgtcacaggattgaagccaagtatcgaaagagacggagagaaaagaagacaagattcgtgtgattgtgagagagaaagaggattcttcaaatttaaacaaaaaaagaaagaagaggaatgttaacatttaaaccaaaaaagaaagaagaggaatgttcacataattttttttcttttgtcggctcgatcgatatcgatgttgtggtcgacgatacgcgtcaaacgtaagctctagcgatgcgcgtgttattattgtttccacgagtcttttgggcactttttacttaggctttttaaagcccaaatatctgttttcaagcccaagtaattagtgaggacattttcgtcaatttttcatcggaacgcaatttagcggttaacgccttaaccgtcgctcagaaaaaaaaaaaaaaaaaagttatcataaactttggcgatatgaatttacacggcgtctcgggccatcacgagcctaattccgaacctccaattccgacaggttcgtcgagtccgaagctgaagattagtcccaaattgaatcggtggtctaggggccgagctttaagatctggtgttaagcttgaccgtccaattccccgttccgataactcacctcgccgtcaagtaacggaagcccaaccgaccgatgaggctgataagaagacgacggcgatcgacgtggaggtaacggcgggaaagtctatatatttggtttccgacggaactgggtggacggcagagcattccgttaacgccgctttgggacaattcgaagatttttcgttgaatcgtggctcttctgtgaatacccatctcttctcctgggtaaatgaaaatcaaatcttcttactttcaggaaaaaatatgtcctttcttagaattctctgtgaatgttgctagtagaattgctcataggatagataaaattggatcattacatggaaactgattatatcttagtgaatgctagttgcaattagtgatcatctgagcaagaaaaaacttgacttttaaaccgaaagtgttaggttttgagaattgtcattactttggttttgggttggggattgatcaggttgaggatgaggagaggcttatcgagattattaagcaagcggcaaaggaaggggcaatgtgtttctacactttagcaaatccttctatggcaaaatccgcaaagcaagcttgtgatcagttgggtgtgctttcggttgatattctaggaccaatcatcgaagggattgcgtctcacttaggtgtttctccgtcaggtcttacacgtggagcacctggtagggtcaagactctcaatgatgcatatttcaaaaggattgaagccattgagtttaccattaagcaagatgatgggactttacctgagaacttaagcaaggctgatatagttcttgtcggggtttcccggacagggaagacgcccttgtccacttacattgctcaaaaagggtacaaagttgctaatgtgccgtttgtgatgggcgtggaaccacccaggacgctctttcaggttgaaccgagaaaagtttttggtttgaagatccagctcgttgtactgcaagcgattagaagaacaagggttaaaacgctaggcgtagatacagaggcagagaacaattactcggggattgatcttgttcggaaagaactagatttcgcgtcaaggatctatgagcgaaaccccggatgggcagtgataggtaaacaaaacttaaacaccattctcatttgctactcaaaatgctgtttttttctttccttttaatgctagtaagaaaaaaagttaacaagtaggcagagtattctcatgtgttattcttggggttgtggcgcttgcagatgtgacgaataaggcgattgaagaaaccgcggctgtgattctgcggctgtaccatgacggtagagacactagtactacggtaccgcgtatctcaaaacgctactaagcacactcctttgaccgtagagaggatgaaacaccagtgtcgataaagtatcaagtgaataaagtaatatatgtctataataataagttgaataacaaatccaaccgaggcatgatgaatcatatgttttagtcaacgaatgtaagaggatgaaggataacgaaaactaataattgtggctactctgaattcttttattactagtctataaaacaaaagaatatctgtcattagcatttagttgcaacgttgcaatttgggtgtgtttagcaagttcaagaaaagtcatccaaaacttaatgtcattttagttaatctattttgactctttctattcgtttatgaatgaatatttcggtaattaccaaaaaatcttctgattatccaaagtagatgatcagagatttgtgtccatcttcgatttatataactaattagtgatattttcttcctgtaagtaaacgatgaacctggaaacatgcaaggttttttcgactgtcaatttatgtggatgattattgctattcaatctgttcatccacatgattaataagatgctaattggtaacacatggcgtagtttagaaaaggttaaaacgttgcggtcaaatgattgacgtaattggaagaacatgcacgaaacattacaggaaacctataatgcatggatgcatgtgggatcaaataattgttatcgataacgtccaagtatcaattgatatgcatatatgtagatattttaatctacttgataagataaaaacttaattttaatttaagttattcttccaactgttgttggcaaagtattgtcccactctataaggcaagtaatacaaaatacattgttttaactatatccgaactctatatgtctttttcttgttaagtagaggaactagaggtgtcttagtgacgtgagacacacgaaattttcaattcttaaaaccccatttgtatttaatttgggcttaaagaaatttaggcagccattttttttggtggtagcaatatacaccatgcataagacaacatcgacacaaatattatatacacatatatatagtacgacttgtatcaatttgcctcttcttatttctacaaacaatgattggtcttaagaacaacaaaaatacaacaagcattccaccgcagaccaatgatagtcaactacattttgatgttaattaatctcaatcttctaaccacaaactcttataatattgcaagttagtttaaactacttacataattgagtataaaatagcttcaaccttcatcaacaattcattatcaatcgagcaaaaaacaaaagctaagagcaacaaactaaagattttttaagaaaatggcagcttctaagcgactagttgtctcttgcttgttcttagttttgttgtttgctcaagccaattcgcaaggtttgaaagtaggtttctacagcaaaacatgcccacaactcgagggtatagttaaaaaggtcgtgttcgatgcgatgaacaaagcaccaacacttggtgctcctttgcttagaatgttcttccacgactgcttcgttcgggtatgtttctgtaataagtgaaatgaataatgattttaatatatttcatgatgtcacgttcttaataatgtgagtgaatcgtgtatgatcaacagggatgtgacggatcagttttgttagataaaccaaacaatcaaggtgagaagagtgcagttcctaacctaagtcttcgagggtttggcatcatagacgattccaaggcggctctagaaaaagtgtgtccgggaattgtttcttgctctgatatcttggcacttgtcgctagagacgcaatggttgcagtaagtaattttcacataatacaaaatttctacatatatacaaatataatagagctctcttttaatttattatatatcctgaatatgttaatttctagcttgaaggaccatcatgggaagttgaaacgggaagaagagacggtagggtttctaacatcaacgaagtcaacttgccatcaccttttgataacatcaccaagcttatcagcgattttcgctcaaagggcctcaacgagaaggatctagtcattctctcgggtacgcaaaagtgaattaatgatatttactatagtctgaaaaatgaataattaatgatggagaatatacatgtttttctaaaggtggtcacacaattggaatgggacattgtcctttattgacaaaccggctttacaacttcaccggaaaaggagacagcgacccaagtttggactcggagtacgccgctaagctcaggaagaaatgcaagcccaccgatacgacgacggctctagagatggatccggggagtttcaaaacatttgacttgagctacttcacgctagtggctaagagaagaggacttttccagtcggatgctgctctactcgacaactccaagactagggcttatgtcttgcaacagataagaactcatgggtcaatgttctttaacgactttggtgtctctatggtgaaaatgggtcggactggagttcttacgggtaaggccggggagatccgtaagacgtgtcggtctgctaattaagagatatagaaatgaaaatatctcaatatatgtgagtttgattattattgtttgcttcttttattttgttgtcatccctatattaaatgtgattgttttcttgggtattgtttcttgggaataagctgtatctaaaatttataaaagtcttgaaagttcagaatgttattattaagttataacgtttagtcattttgaaaagccaaaaaaaaaaaaaactgaatcaccatggatttgaatattgagaccataattaagttaaacaatgtattttttattattaattaataataaaagttaagatttgaaggaaaatggttaaaaaccaccaacttcagcagaacatctgttccaaactttaagaatcctgggacgacctttagaggcaaatggtttgtaataataagtctgaaacaaaagattcctcagcaccatgtgacattcttggccatatatgatcattttcagacaacaatacctcgaagttggtatgttttgaagaatctcagacatgacttgatcgctacatttttctccccccatcaagccagcgcaagtcccggcaaactgaacaagttctgttgactgtttattaagcatgtctatattgtattcactcgtactcggagatcttgcaaacgtggaatctaaatcaatattgggatctatcaacggtttctcatcatctgccaaacttggataagcaaacagtaccaacgtggtgattagaacaaaagccatgtaaacgtgattatttttcttcatttttttattttataacttagcctcctctttcacctatttactccttgtaaataaaatttgtatgtgtatagagattatataccctaaacacacagtagtcaactgaatgttattaacttatccgttatattgtaattaataaaactacgttttgtttctttgtttgttttctattaacaaaaaaaatgatttactctataaaatttgacgtttttttttgtaataaaaaatatgttcagttacgttattactattttatgtattaaatgtaaaattgaaaaaatgctttatggaattctgaatttcttgaaaacaatttggagggtggcccaaatcatcaattttcttttaaggtatttattattcaataaagttttattccggagttatgctaaagaaaagagtgtcgatatctgtattttgtggacgatttagattacgaagaaaatctcgaggaataaaaatttatgtggcgagagatcaattgcatcataatattatgctcatgaatcacgcgagagtttatggtgatttcgctcattgtgtccccattctctcttcttttgtttgattcctcctccctcttggttaacaacaacttcactcacaaagcattcccttttttatttttatcgctactctccgacaaagccttcttctttggatcatctagtctaggttcggttttctcaattagctctgttcgatttcgcggatgaaacttgttcaagtttgtgtctgatctgctctgctctgctcatacttaaaaaaggaaactttatttttctgtaaatggcatcagttgccgagagctcttttcctcttctctgtcaaatcaagactcagcgtcgcatcaattcctctacgctgaggcattcccgtgtttcttaccatgatttgccttctggctcgctgtcttttcgttctcggagctttgttctgggacatcgatgcaagtgtgtgagccgcgtcgaggcttccggctcagacgatgatgagccagaggatgcgcttcaggctaccattgacaagagcaagaaggttcttgctatgcaaaggaaccttcttcaccaggtacatcctccttccttccttccttctatttgggccttttggcaatgatccaatgtgaagattaggtcacttaattgttttctactgatctttattcctaaaaggtccatttttttaacactatgagctgtaagtgagaatgtgatttgaatatcctaatctgctttggagcctgctctcgagttagttttatgattaatatgtgttaaattattatttgacatttgtgtttaacaatctttcactttatctatcatgttacccttcagattgctgaaaggaggaagctggtctcatctattaaagagagcacacctgacttggatgatgcaaaagcttcttccaaacaagagtctgcttcttctgtgaatgctaatactgatgctactaaaaaagaaattatggatggagatgcaaacggtagtgttagtccaagcacttatggcaagtcatctttaagtaaagaaccagaagctaagactttctctcccagtactgaatccttgaagaaccgcaaacaaagctcggcctctgtgatatcttcttcccctgtaacctctcctcagaaaccatccgatgtagccactaatgggaagccttggtctagcgtagtagcgtctagtgtagatcctccttataaaccttcatctgttatgacctctcctgagaaaacttctgatcctgtaacttctcctggaaagccaagtaaatctcgcgctggtgcattttggtcagatccactaccgtcttatctgactaaagctcctcaaacatcaactatgaagacagagaagtacgtggaaaaaacacctgacgtagctagtagtgaaactaacgaacctggcaaggatgaagagaagccgcctccactggctggagcaaatgtcatgaatgtgatattggtagcagcagagtgtgctccattttcgaaaacaggtaattatttcctttatcatctttgatcgattgtgcgggctatgtttgcataagtagtcttctcttggagtacacaaaactgaataccaataacttttataggtggccttggagatgtagctggtgctttaccaaagtctttggctaggcgtggacacagggttatggtaatatttattagagagtgccttttttcgtgtcagataagctctctggttgattgtggacattgtaactcaaacctgttagtcaatcattttctttgattttcttgttaggttgtggttcctcggtatgccgagtatgctgaagccaaagatttaggggtacggaagagatataaggtggccgggcaggtataaaagctgttaatgtatcaacattcaaagtttcttcttttccatttaaaattccttgacaaggtagagaaaacttcatgtggagcacactttgctgcaggatatggaagtaatgtacttccatgcatttatagatggtgtggattttgttttcattgatagccctgaatttcggcatctgagtaataacatttatggtggaaaccgacttgtaagacttatcttattctccctgttcttcaccgaaaaatcaatttctgcctacatgtactaagtttgttataattgaatccaggatatcttgaagcggatggttttattttgcaaggctgctgttgaggtaaacctctgcgtcaagattgtgaacgggtaatcgatatttagctttcttcttatactaatgttggtttctggagatttgtttcaggttccgtggtatgttccttgtggaggtgtgtgttatggtgatggaaatttggcttttatagcaaatgattggcacactgcgttactaccggtgtacctgaaggcctattaccgggatcacggaataatgaaatacacacgatctgttcttgtaattcataacattgctcatcaggttagtaaattcttcactcagtagaaatgacttactttatgcttatctatccaagagaagtatgcataacctagtggtggaaaattaggggcggggaccggtagatgatttctcctacgtggatttaccgagccattacttggatagcttcaagttatatgacccagtaggaggtgagcacttcaatatttttgcagctggtctaaaagctgcggatagagttctcactgttagccatggatactcctgggaggttaagaccttagaaggaggttggggtctgcataacatcataaatgaaaacgactggaaatttagaggaattgtgaacggtatcgatacacaagaatggaacccagaatttgatacttacttgcactctgatgattataccaactattccttggagaatcttcacattggtaaaccccaatgtaaagctgcattacagaaagagctcggtttgcctgttcggcctgatgttccgctgatcggttttattggaagattggatcaccagaaaggtgttgatttgatagctgaggcggttccatggatgatgagtcaggatgttcagctggttatgttaggcacagggcgaccggatcttgaagaggtcctcagacaaatggagcatcaatatcgagataaagcacggggatgggttggattctcggttaaaacagcacacagaataacagctggtgcagacatattgctgatgccttctagatttgagccgtgtggtctaaaccagctttacgcaatgaactatggaaccattccggtggtccatgccgtgggaggattgagggatacagttcaacaatttgatccctatagtgaaacgggtcttggttggacatttgatagcgcggaagcaggtaagttgattcatgccttaggaaactgtttgttgacatatagagagtataaggagagttgggaagggcttcagagaagaggaatgacacaggatttgagttgggataatgctgcagagaagtacgaagaagttcttgttgctgctaagtatcattggtgagttaaataaaagttaccttttttactgtctataaagaacatgtctttggaattgttaagaagcttagttgtgtagatttggtgataaagctacattggagcttggcaaattctcatgccatgtaagctccttgtggtaaaggatcaagcttgttaatctcttgctctctcactcttagtaattttaaagtgatattacgatttgacaaagtaaaacaatacttacaaatggtgaaaaccctaacttgaagaaatcaagaagatgggaataaaacaggagagaaagttttagagatcttgtcaccattaatgtgaatgttgtcgagcttgtgttgacaccacttgaggtgagaagatgagaccaaaggcatgtgtaaaaccctagatacgagctttaaatctattgttatgcatctcactaacataaaatgctcatctttctcaatcttatcttcatccatgttgaaagatttcttcttgaaccaaatcttcttcttgttcccttgcatttccttcaacaattgttccttcttcacaaatcaaaatattaattaatattcttaatagaaagtttaaagtctttaattgactgtaataggaaattaccttttggagtgaaatttttaggtcaagaaagagcctaaagtctctaggatcttccaattccataagaggagaattaaccaaagagttttgaagtctttcccacatcaaaggttttttaatgtctactttcacaaagtcataaaagacttcaatgcatgtctctattgctttcaacacttgtttgccctgtctttctttttctccttcatgaggtccctctctattatatccttttgagaaaaaaagtagatacggaaagtctataaattagttaaaaaaatgcgtaaaacaaagctacaatgtcatgagaaatcgaccaaaaaatgacttcacaatggataaatcattgtaacctctaaatttgaaatttcttttgagtttcgtcgtaagcacatttgtttcttggtcaacatatagagttgacaatttgcaagagtataattgattaaaaagcattgtagataaggttgttcctgtgacttgtgagttgtgtgacttatctaccaatttacgtcgacagattctgtcgacacataacccgttagagaccaaaacttgactgtttctttagaattacaaacaacaattccaaattataaggtattttatttgtttttgtttaaaaataataatcgatagggtagtcgtatctaaaatgaaatatgtcggaattttaaaatgttttcttaaggagtaaagtcatgaatcttgatagagagattttagactttagtcaagaaatctgttaaaacttatcttttgaccacatctttatataagttgataagaaaaagaaagattacttgttattactttaaaaagaatatatttgggttcctaagattccaatcaacgtaattaaaaattatattatatgaactctcaatttatactcgatgtaacccaccaagaaaagtaatatttagatctatagtataattttagaaaattcttacttagtattattaatatatgaggtgaatgtttgtgataaataaggtagagtcatttacccgaaagtcttgggacttgaaagaagctaatcaactcaaatcttctttgaacaaagctcaagactcgttttccttcacacctctcatcttccaagaacctctctaacaagacctgaaagttctgaaactctctagatatatcatcatcgaacctgcctctcgaatcagcggggttcgaactatctctcactaaaatgtactgatgctgaagagcttcccatgacaagcacacttgagcaacatagactagctcaaggtccttcttcatgctttgttttatcctcttctctgccgttttcccccataagctcaaactacttgccgttagttggtttgtgatcacatctagaaatgaaaaaaatgaatattaacatgaattttgacccaaaaaaaaaagaaaattactaatgaaattaggatatggttagtaaattgtagattaatgatttggttttgtatattattgatgttggtcatctagatataaaagtaaagacttacttagtccatagcttctatcgcggctgaggatgtcataccatctcattctttcgcaatatttcttgtatacatggtcatcttcaactccttgtgtttgaatattctctatcgtaaccgaatcttggagcgctgaatccaagcttgcaatagataaaggcgagggatgatctcttttgctagaaactagaaaagatagatcattctccacgtctgagtttacaatttcttcttcttcgtcatcgttggttaaagaagcttcatcttcttgatgtattggcatagtttgaatttcgaactcaagattcttctccatgtttacaccatcaaaaatgtcaacgtcgtgttcctcctcaacctccttagcatcaagaagctcaacaacatcttcttgatcatattcatagaaaaaatcatccacatcttcttcttcttcaagaatcttgcctttttgcatagatatacgaacttttaaatgactatccacttgatatttaaacgaaaagctaaatgcaggaaccgggttatgagtacttgtagagagttccaagttatcaagggtattcttgatctcttgcctagactcaatatgacaagtaacctcctttttaaacataatgactcggaaagaactactaactagcttagagaacgtgaacaagaccgatgaaaaggcgttgtaaagagcttgaaagggtgggagaagccataaaaagaagagataaagccatataagaagttgacaaagaaagagaacaagagggtgcatgtataatttcatgtaagacgatttcaagaaaccatcttgaatcactatggattctatcattagccaacatgctgagagtaaagccatcaaatgtctgagagagagatgagagaggggggagagagagagagagactcaagagagtgtctttataaagaagaagaagaagctgctgagaaagagccttgttgaaatatttcccccaagactaatcattaataaataaagttggtaaaaggtcaaattgattatcttgagtgttctttcctatcagttccaagactttggttttaaacatgtttggaactatccggatattgaattaaacttgttcaatttgtaacagaaaatattcgtctttagtgaattaactaaacctataaggccatgtattggctataatcatcttttttaattaaaagagccaacttgaccctccatagttgtaactgttaatcacttctcaagctccatcacaacgcacatatgaagaacatagaaaactaacaaacacacatgatgatgttcttcaatgtaagtaacatctctttcgcaaccttcacaattgaaaacctaaccagatcataccatattcaacatcaatatctatttcgatagggctcgatcccgaatgcgaaaaaaagcaagcaaatcagagagtataaccaaaatgttcttcactataacctggttcccacaatatccttacaatgcttattccaattgtacattatttaaacacatggactataacatatataagtttttgtaaaagagtgtgtatgagagaataaaactaaccgaagaaaagtgtagtgatccaatctcatttccaaagattgaacctttttttatatatataataactttgttcgcttattcatttcttgatcttcctctgctgcttctttggcccggaaacgactaatctccttacagaacaaccacacctcgctctgaaaacaagcacggctcgcccattaggcggagccatcttcttcagctcagcttccaattcacggtgatgaacacgaggcaactcaaacattcccctcttgttgctggagctcttgacgcattcctcagtctcaagctgaatatcaaactcaacagctttcctaaggcctttacaattcggtttgccgcatctctgcatagtacacaagagtataacaagccaagtagagatggcagcacagaagatactcaaagctaatgatccatacacaatcgggttctgcaaaatctcttgtttgactaaaagagagagatctgaaaagacctcaatcgatttgagggtgatgagtttgacgtaagggaagaagaggaagccgcaggcggtgatgaccgcgataaggatcacgacgtcgatagcagcggactgagatccgtcgcagacagggaatttggaacaggttggtgatgatgaagatttattacgggtgtttctggatttaggtgaggagtgagacatgatcattgggtcgacggaattgcagaccgagattgagctatgcaaatataccatctcactcacaaacacagagaggccttgaagataacaaacaacaatccaatcgaactagtgatagagattggatctccacgagtttaatcagaatcgatctatgagactagatttgaatcccaattcttcagatcgagcataacgtagagaaatatccaagtcacctgattgaaaagctcggtttcaatctgatcgacgaaatccagcagatgaaaaatcttcggaacttgtcggttactacaaactgatcgaatttcgatccgcacgaggttgaaggttcgtgaagccgattgaaattcaacgtgtagagagaggagactgaatcgtcgtcgtcgtcgtcatgatgaagaattcaaaattttaatctctttagtgttttaggttccaaatccaatcggaatcaatgtgaatagtagtaagtttattcgtctagtgacacgcaggcttttttagataactcttttttacacatgacgtcatgtttttttttttttttttgagcagacatataaaaaccctaattttccgattcttcttcgtctaccagagtcctaaaaccctagaagctccgttgttcctgaatcagtctaacgatgggttcaaagaataagaagcaaaggaaaggagagagcattgaagaagctaaaggatccagtggagtcgcagaggaaggaaacgaaatgattaaggatccaaggttttcgtcggcgcacacggaccctaaattccgtaggatgcggaggcgtgactccaaagtcgccattgactccagattccagcctatgttcaatgataagcgatttgccactggttctgctcctgtcgataagcgtggcaagcgtagaacaggaggcactggcaaagattcgcttcgagagttttatcgaattgaagatgaaggtaagcagaaaactgaggaggaatctggggatgagagcgggagtgagacagagataaatgatttgaaatccgaaaaatctagccatgtagaatctgaggaagagagtgagagtgagctaaaggttgcttctttggatgatgaatctgatgagaaagcagactctgaagagttatcctcgcaggaggaggaagaagaagaggatgatacagatgaggacgatgaagctatgtatgaagatgagggaccagaaattccggtaaattgctcaactttgattcatgtgccttgttcttctactagtttttgacaagtaattgattttctcatgttgcaaatttggtgatgatgatgatgatggcttctaggaagagaacataccgcttatccaagaagaaactcatagactggctatcgttaacatggattggagacatgtctctgtaagttctctcaatctatgatgttttgtttcaatttggccttctttgacgttaatatctttgctatggttatggaacgaatctaagattaagtagagcttgtttctttctctgccttgtctagactctagagtcactgctctgtgatttttggagttgttcttatggatgatatcttattttgttacttaggctaaagacttgtacgtagtgttgaattcgtttctgccaaaagatgggcgcattttgtcagttgcggtctatccatctgagttcggacttgagcgaatgaaagaggaggaaatccatgggccggtaattgatggcgacaaaaagaatgacgctagtgatgatgaagatgaagaagaggaggaagatgaggatgtcatcaaccagaagctacgtgcctatgaaataagtagattaaagtaagttcgaatctgcccgtcttaagctatatgtggtggagagggactattactgaaactctgcttttactattgcttcaggtattatttcgctgttgccgaatgtgattcaagtgctactgcagattacttgtacaaatcatgtgatggaattgagtttgagagatcatcaaacaagctcgacctaagatttattccggattccatggaattcaaacatccacctcgtgatattgcatctgaggtgtgttaccgctacttccttttacttgagatcttttggtttcattgtgaatacttgtgatcttatagttgttataaaaatataggcaccagctggttatgaaggtttagattttcagagccgagctctgcagatgagcaaagttaatctttcttgggatgaagatgaaccgcaccggattaagaccttaaatcagaaattcaatcctgaacaggtctgtatacgggtttataatttatgtgattaggcttaattgcttgcttaaaagcatctccattgttgtagtgttattgttctgataaaattttctcaaatcatagttggcaaatcttgagatgaaggagtttttagcttctgatgagagtgattctgatgaggaagacgacttgggcaatgaagttattaaccagagtaaaaaaaaggacaagaagaaagataagtaccgagctttaatagaagccgaagatgttgattctgataaagacctggaggaggagaatgaccaggatatggaggtaacattcaataccggtttagaagatcttagcaaagagattcttaaaaagaaagacaaccagtcagaatcggtgtgggaaacatatctaaggcagagacgcgagaagaagagagccaggaagaataaacagaaggatgatgattcttctccggatgatgacgacgattataacattgatagaaaggcagtgaaagatgatggagatgacgatttctttatggaggaacctcctcttaagaagaagaagaaagaaggaaagacaaagaaggaggaagtagcagcggaagaaaaaagtagagcggagcttgagttgttactagctgatgagaatgcaggagatggtaatggtctgaaagggtataatattaaacggaaagctaaaaaaggaaagactgatatttcggaagacaagatacctgctgctgaacttgatgatccgagattctcagctctattctcgtctccttactatgccctagaccctacggatccacagtttaaaaggtacattgatgaatatttgaatttttctgagaagtggaattgcgaaagtttaagaattttgggggatatttgttttgcaggagtgcgacttatgcaaggcaattagctttgaagcaaaaggaagatccaaaaggccacgaggatgtgaaagcgccaaaggagaaacaggagttgaattcagatggtaacttggggtctaagaaggagagacacgaactgacttctactgtcaaatctttgaagatgaagatgatgaacaaggattctgagaagaaaaaagcgggaaatccagcgtcttcatcgactttggctcagcgaattaagaagaaagccaaagatttatccaagaaataataatgtctttgtttccttcttcaaatcaattttgttttaaatttaaaattctgaattaataacaatttcaacctatattgtaccctttcaaatctgtttatgtttcattttgaggacgtttcacatcttgatcatttgttatttgagtataatagcaagcgcaacatattcgatttattattggtctccccacttaaattatgtcaacaacaaaaaagaaagaacaatcacacttttaacctcaaacaacctaaacatggaaatactccccattggcagcaaaatccgaaatttttagtaaacaaatatctcatccatagtaaggaggttgacctgagggtgaagccccgttgggatcagatgatgggtacatatatgggcttccgccataacctgagtattgactttgcgcttgcgggttctgccaacctgctggtggtgcagaacccgacaccgcgggacctttttgtgccacaagtaggcttagatcaggaagtgtatagtctctgcttttgtcgctaaaagccttcattcaatcacaggaaaattgaagaagataattagacgttgatttaatattttgctgcgaaatgtagaaaagaaagaagcatacgcaattccgttactattctcttcccctcacaattgtttttttttttaggtacacatctcaaaaaagcaacaaatcttatgtaccttaacattcagatcagtatgacgagagtatgatagtcgaagcttacagtagccaccgtcataaatgcagtgtccttccagtgcttctttggccattgctgctgttggtatatctacagagacgaaatagaaagcacgaaactgaagatgattgtacagtaacaaataaatgttcagaatttataaaacggttgaatcgggtcacaatcaaacattagtgcagatcagcagtcggatgtaccagagtattgaattaatgcttgcgttgaaccattcttctcaaatatagcaatcttctggacagttccatatgcagaaaacacctatgagaagcaaaggatgttatttttgagagactaagaatgcttagaagcagaaatgtgcatgactgttgttccttaccgtgtgaagaacatccacagtgacagcatactgcatattctcaatcaaaccgagaaggacgttgctctgagattcaactttcttgccgtcagcacctaaagcaggctgaagacaatgtcatagaccacgtaagaaaggtaaatattggtggaaagcgatagataaaagtgcagagaaatgcaggggacgaaaatgatacctgcatagacccatccattgcggtctgattcactggaaggtatggatttgtgtaatctctgagtacaccaacgaatcaaacatatgaatcaactattctaacataaggtgttcaacattactggcagcatatgcagaaactctacctgctccggtgggactgaaacttgatgttgagatcagtatgagctgaataagacattcgcaaactgcacgaaccaacatgtgcggaaagcagatacctgggtatacttctgccatccaacgcactccttgccgcggatgcagtctccacatcagtaaattgaactagtgcctggcaggttaggaaagcaaaaaataagattaatatcacttcattcatctccatagatacaagacagtcaataccaatctcaacatctcacctggaaaccagcagctttctcaaatgtggcaattttatgcacaaatccaaaagcagaaaatacctgaaacaagtttggactcgatattaatcatgaccatacattggagggagaacaacctagggaaccaaatcaacagaaagaaactcaaatgttcccggattggggctaaaaaagagaagcccagaaaagtacagagtgacacctgtccaattatgggcatgatagagcatagataggagaatgacgaacacgatacaatttccaaactctctccagaaagattttaataaagaggcatcaacatctgtgattcgagcatttcattaatgttgatatactgtaattggaatagtatatctaagtaaaaattactcgtagaagtttgcttgattagaaatttttatatattcatctgctcgaagcacaacacactaccgcatgtattgccacacccatctaaaaccatcaatctcaacaattttcatcaaaaacaaccaattcccacagagaaatacccattgattaaaaaaaatcagtgaaagaagctcacactcgaaatcgtaaaatcaagtaaatgcactcaccagatggataacatcgatgctgacttcgtgagattccactccttcaaaggtaaccaagaggacatttccagggacatctccaggactctgattgttaacaatctcatggcgattagagtactgaatatagacagttttcccacgaatctgtgcgggctctgaagatgaagcataatacgaaaccattgatatagcttgattcaagtcagcctgtaaaatcaaatgaatggttcatcaatagaaatcgccaaaacgaaagcttgaagagtcaaccatcatagctataaaacttgagaaacctattcgatactacaattcgagaaaagctcgattctagggtttgatgtttggcgctgcaattccaatttctctttatcctttcctaaaccaaatcccgggagctagaaattgggggactgtaagaacaaaaacaatttcaattaagctcacaaattcgacgaaagcttgattgcgattggcgccgacattgctcttggtattgacgatcttgccgaatcgtttgcaaaggtcgatgagctcctcttcgacgcattcccatggaagattccgcagatgaaccaccttcgacggcgtctgtgtataacggaactgagtttggcctgagctcgacatctccggcaaggcgttagatacttgtttcagatttagtaaacgaacgatcacacacacagcaaagccggcggaggaagtagctcgattcgatgctctttgtgatcggaaccaaaaccatacagctaaaatatcacgaatatttgctaatcacccctacaatttgtatcttctccatatttgacccttaatcttctaaggccgtaactactagtccaagtgtctatacaaggaagtatattaaaaaatgaaaaacaaaaaagacctaaataaaagggccttataacgtatattactagaaaacgccgagggtgatttgttttgggcctataacgtacattagaatttggatccaaatcattcaaagcccacaattgataaagcccatgaattaactgtccaataatgccctctcgcccatcctctctctaagtgcatccaagtcaaatttccatctcctctttattatggtttctttaagtttttttttttaaatggttttgttttcattcctacagatttgaaaacatttttcatttttaattcaagtttttctaaaaaattcgtttcaattttaactttaaaaaataattttaatactaaatttataaatgatggaaacactaatcagagtttagatcttgtcatttgatctagttatttgatcgttacagaattcacaaattcaatttgtttccattgttgtatagatttagcattgtagtttctaatttctatcttaaaatttaaaaattgttatttccgatatttaaataaagtttaaattttgacattcatgtatttgttataaaaataattaagtcaaattgttttatttgccaagattttctattgttgaccccttcagagaaatactatcattaaaccccaaaaaagcaaaacacttttcatgtgatcacagagaatcgggacttcaaaggtcacaagttagaggtcctacatgaactaactatcagttaaatctcatatccttacttccaatcttaatattacttgttgtctttgtcgagagggtctcaatagtgtgtactgtttgtgaagggactactaaattactaatccattaatacaattttaattctatcattaactaggctttaacactgtactaagtttgttgcagtttctttctatcacttgcgtggcttgtttcttgccttaagttggctaatagtaattgcttatgcttggtctactgtgattaagatgaaagttgtcttgtttgcttccttcctctttgttgacttttagttggatgatttggtcatgtcttgttgatgaagatagtgaatgaaaaaggttggaccataacttactgagagatgttttgattgagaacaagcaagtttgacttgctttttgcgatgttaaatcatcttctggcttaggtcaatggacaagaaatgtctagatccagtgacagattacagtctctgcgtttgtatgtcttgagttcagtaattactaagcgaacttaaaagtgttttacattgtttttctacgaaacagtttcgaggaaaaagacttgaagcattcatgcatgtacttgttgtttactgttttttccatgcgtgtgactgacttgttgttctattcggtagaacgagcacacacagaagcaaaagacttggagcattgatgtgagaatttaagaaactataatttctggtccaaaaactgatgatgaagaaaagcaaatggttatcagttgactttaaaagctttggcccctcttcttagctcactcaatctcagctacgttacgtggatggatgtgattttgacaagtggcaacatcatcatctatgaagtttattgagcactgtttggaccataaaagatgaaatcagccaagacaattaaagaggtgtccccattgtcctttacatcttttgcagccagtatgatttagtttttccaaaattcaattttgtttttattggtacaattcgttgggccttatgattttgtcttatggtttatctttgtgttgatgaagatactttcttctcttcctagaagcttggagcccacctcaataaatcctttctttgctaccatggcacacactaggatactcttttctttgtttggtctggtaaaatctctttaatgtcaccgtcaccgccattactcgtctacctttcttggcagccaaagttacctttgtcgacaacatttgatcacctgtaaactatccaaaccatgtatgccactaaaattttgcataatggtcagtaagtaacaaattatacaattctgattatggtcaaattttaccttttgtggtatgctactagttaaagggtaaccaaatagtggtttttacctcatcaagtcgctattttgatggttaagtttctgtatacttttcatcattcattgtctatgttagtttatctttgtgaaaaaatagattttgtgatgaattgacaccaagaacagtggagcagccagtgggactttcattaaatggtaaaggaaccagacaaggaaaggtttttcacctcctttcttcttgctcccaccacattagtgtttcctctcttcatttataagggttccaaatttttacaatggttgaaactcagtgtttaccgcggtcatagttttctgatactttagagacagtgactattagtgtaaaaatgtgttaccataaaactattgttgcttccacagggagaattataccatttgcagagcaatgactaattgaataaacaacaagtctaagctaatgacatcattgacaaccaattaattacttgcaactactttgcattttcccttttttttccttctataatcagggtttatgaatcattaagactttttgctctaagttactccaaatatcattaatcctctgtgtctgatttgcttttcccattatagtgccagcttccacttcttcaccgccatctaacagcatttactattgtggagtttctacaaaaagctaactaaaatgtgaaacgaagaaatcaataaacacgtttccataaagtagtgtaacttattagggtaactagttgtaggcaagaccgtaagtaagacaaaacaataagaactttgtagctttcaagaaaccatcactcaataggatacctgtaataagaaaccttgagcatcttttagaccctagtgtaagataattgagttttagtgagaagtgtttaaaacttgtaactagcttaaatgggtttagtgcatttggggactgtcgacagcgaaccttgacgcgagaaaaatgcgggaaagtaacaagaatggtttaaatgtcaaaactgttaaaggaccacaaagtttgtttaaggctaatgagaaaaacattcttctcaatgacattatcctaagttgcagggttatcaaagtgagagctattgatagatgttgaccttaaaatttactccaggttctgaaattcactgttttacttttgtgttgagaggtacaatttcaaggtaaagatggctacagtaattgggtgctctgttgagtctttaaaaggaaatcaaggtgttggagccacaaaggtaataatatctctcgaccccatccaattgaatgccaatccatgtcagagaccgggaaaaggggcgcttacagaacctaaacagagacatcttctgttgtgtttctccatctatatatcagagtgacgccaagagagcagcttttgtgatcatactgatcatgatcatgtaatgacaactatctcatacactaggttattaaaccgtggatcagattgaagctagctttttcttcagtagattagactaataacttgtgtgggaaaacaatgggcagatcgccatgttgtgataaggccgggttgaagaaagggccttggactccagaagaggatcagaaacttttggcttatattgaagaacatggccatggaagctggcgttctttgcctgagaaagccggtaacttgctcgctcttttctcttcaacaaaaccacacattttcttctagctctattcaaagctttgcttcaaactccttataggtctccaaaggtgtggaaagagttgcagactcagatggactaactacctaagacctgacatcaagagaggcaaattcactgtacaagaagaacaaaccatcattcaactccacgctctcctcggaaacaggtgactcaatcacaatctctgctttcaaaccaaataaccaagtgattgctttgaaagcaaattgatcgtcgtcctttaaatgtcataggtggtcagcgattgcaactcatttaccaaagaggacagacaacgagatcaagaactactggaacacacacttgaagaaacgtctgatcaaaatggggatagatccagtgactcacaagcacaaaaacgagactctttcgtcttccacaggacaatcaaagaacgcagccacgcttagtcatatggctcaatgggagagtgcaagactcgaagctgaagcaaggctagctagagaatcaaagcttctccatttacagcattaccaaaacaataacaaccttaacaaatcagcagctcctcaacaacattgcttcactcaaaaaacatcaacaaactggactaaaccaaaccaaggtaagggacacatcgtcttaaaaaaaactctcaactttgattggttttggtaacgtatcaatggaaaattgtgacaggaaacggagaccaacagcttgaatctccgacatcgacggtgacattctctgagaatcttctgatgcctttaggaatccctacggatagcagcagaaatagaaacaataacaacaatgagtcctcggcgatgattgaattggccgtatcttcgtcaacctcctccgatgtgagtctggtcaaagaacatgaacacgactggattaggcagatcaactgtggtagtggaggaataggagaaggattcacgagtctattgatcggtgattcggtcggccggggtttacccaccgggaaaaacgaagcgacggcgggcgtggggaatgagagtgagtataactactatgaggataacaagaattactggaatagcattctcaacttggttgattcttcaccgtccgattccgcgacgatgttctgatctaagggtcttcaaccaaacatttttaattctcagattgttttttaaatgtcgatagctttccaatactttttacttatctttattttctttataaactattatatatatatatatatatatatatatgggatgaaaatgagcttaattttagtattcgtttttgcagaattgcatgtagcaaacctgcaaatccaatttacaatttatatattatgcttttatgttgttggtatacagtttgttagaaaaatattttaagtgataacgtcgttgtcatttggccaaatacataaaccataataagggatcctccttcaaatcctaatacgtttttgttttgggaatgagctttcttgaaaagcctatcggcacaaagatcctttttagtatcattgctttgttcgaatttaaattactaattttgggaataattaggcgctttaactattgagttatagaagttgagctttccttaatcttatattgataagatgtttcaaaatataggattggaaccactccataattctttaaagttgctgagtgcaagcaattgaaggaaatagatattcatattacttatccaccggttgtggagtatttttgtctaattttcaaatttttctatatgagagatgtctgaacgaagaggctgtaattataacaacaacacgttgacatgtcgagtaaaagaaagaaaattcaatgcttggttgtttcatgtccttttctttatcataaatttatttatatacagtatgatccatagtaataaaacacagatattactaatagattcgagtccactaaacttaagacatttttaacaaaaggttacattacatccatcgaatttgatagtaaatccttaatcgtttacttaatgtgcatgcaaatttgggcgtaatagtaagaaggatatgggcctgacgtttggtactattgaataaaggcccatataaagcccaataatttgcttttctgagaagacggagacaaaggagtcgctctggtctttcattatcgcgaatctgagatttcggaagattcgatcgatttgggggttttagggtttaatctcaactgctaatcaatggcgccacctccaggactttactccggtaccagcactcttgctctggtaaaccccggatcaatttctcgatctgtagccttgacttgtcgaattttggattttgaagagttcatcgagtcttttctttttggtatcgatttaggttgctcgtgcttcggctttcgggttgggtctcatctacggcaacatcaagctcaaggctttaaaggtacatctctctatcttccttgtcttgtttttatcagatgagaaattattttcattgggtttcattttgacatcctaaatctgacacttgccattatagcagcaaattcgaatgtttatggcttttgaattatgatattctcgatcgaatcatgtgtgccgtgactattagtatgctactttgctccttttggtttggtcatctatacacaagtaacatgattctttgaccccaatgtttctgcctgagttctgatctcctattccactgaatgatcatagttttgacttgatgtttagtagaagagtttgtcaatgatttgcaacttgatcactgaaatgtaatttcttgcctttgtaaagcataagtttgcgatgttgtgtctggtttccaaaccctaagaaaatcggtatgaaagtagagcctatgttgcttcctttagagcatcccaatccttattcattcagattgtggaatctaattttctactatgatgtgatttgctaataagttatgatgataccaacaaatgcttcttcttcatatgcagataaagaagaattcgcagattaaggccgaagcaaaggctcatcactaaaccaactcttcttctccttctcaataagattatgaagccaagtgattgttatctctaaatgtagttcttttcctccttaagctatatctccctcggtgacattttttccatctttctgtttttttaatcaaaatcttctgtctgacaaagcaatcgtatacccgttttggtttaaacctgagttcttctttggtactttcctgctattcaataaacaccatatttttatcatcttaaccagataaataatttataaaaaaaaaaaaaaaaaaaaaagaatttttattgttttcaattaaaataaataaatatccgccgtggcgcagagttaaaagtaagcagttggctattcaggacgaccaatgtggtcactgcttggtggcaagaacaagttgtgttcgagctatacaaggtcgtggcttcgaacattggtcacactcacacattcgctgtctctctttctcacgtaatagaggcattcttaaatgcctttttctgttctctttcattctctacaatttattaagttatttgaacttattgtagaaacctaaatgtttgcacccaaaattaaaggttacaagatgagtatcttctttgagattttgagaagagtttctctatatggcgttctatgtctagtttgaataatcaaatcatcatttatattcccatcttgaaactttaaaatcactatccatagaatattcaaaaccataccatgaacactacaataatacaatactatataatatattcatcattatacttttaatgggagtcatgggacacgcagtaatcggttaatttcattgtgttggtgctttcttcattggacggatgagaacttaaagaataaattagtatgattttcaacatttaaatataaataccacttgaagtgtttttgtggtccattggctaccatcaacttgaggtatattaagtccctatatataataactaactaacataagttttggatttaaattactaaaagggtaaagaaaatataatctttactattaatagaaaataaataaatatttttatacaatgaggatattatataagtctaaatcctgagttaaaacctcaaatcctatgtttttttgttgtcattgcttggacataacatattgtttcgaccaaaaacaaaaaagaacataaaatgttcttaagattcaagttctttttcatatcaattaagaaataacttacggcatctttaatttatgtttgttttgatcaatcacataattatagtgaatagtatatttttagtgctattacctatccttacaaatccataatcgaatttcaaagcaacgcgacctaccctcaggtctcaaaacgcacgttcaccaatacaaagtggcattttcgtaaataacattaagaaaaaaacaaattaaaacagttttgtaataagatcaataattatatattattagatgactcggataagccattcggctttggtctttttgttattgccaacaattaagctcaggcttacgaaagtgattgtctgattgacgttttctttttcatttccttttttggtccctgaatacaccttttgagtttgaggtatatctgtcctctttcgaatctttttcttagtgattcctgattattaagaccatctccatcaatggtttctcattaaaaaactgttcaatataaaaataaaatataatcaaaaagtatgagagagagtagaattagtctttcaagtgagaaactctgagaaacccataaaaacacttgtatatcatctatttgtcaaatattattttattgttaaaatttaattatataactaatatttattaaaatacttatatcttttattttttagaaactaagaaagtatctcactgatggagatgcccttaatacaattcggtttgtatttatttctatttttcccgtaattttatgaccctgtaaaaaagttaccgtgtttttttttcacttttcttacatgacataattaattacaaagtatccatcaccacacaaatcaatacaaagctttttgaagtgtgatggtgtgtttatttaaagactttgaagtttggacccagaccattatcacacaagtggaccttattttatatttcgggtccagttgttagaaatttctttttacactgaattcattaattaaaaaaacaattatttaattagtacattttgatcgttcgttttcatgctacatttgagttttaaatagagaaggtctcaaactcacaactatttttttgactttaaatgtataaattagctgcaactttaacaaattgtgagtagttgtagttgcctagattctatttgaagactacagaccttaaaaaaaaaaaaaaaaagaggtcatagtcaaaaacaaaaaaacaccacatttggtaaatttatgatgtgttctctttttaaaaataaaataaatttcatgtaaaaaatctgtacgttcaaaatatctcaggtgattaatctgtaagtacaaattttaattttcaacatgaaattgaatgtttaacaataatgagtagttggaacttggattgaaaactcaacaacaactcattgtttggataagtaagtagaaatctggcaataaacgtattctatttttgtaacgtagaaaattagaaaaataatagtaagaggaaaaggcatggtttagtctggtcaagttaatgtaaaccagagtggttaaaaacaaaacgacaaagcaatttggcttcttaaaaacccgcccatggagaaagccctcacgcacctctaaaccacaaacaaaaagagagagaagagaacgagagaatcattgagaaacgaaacaacaatggccgtctcatcattccagtgccctaccatcttctcctcctcctcaatctccggctttcaatgccgttctgatccagatctcgtcggttctcccgtcggtggatcatctcgccgtcgtgtccatgcctccgccgggatttcttcctcattcaccggggacgctggattatcctccaggatcttaagatttcctcctaatttcgtccgtcagctgagcattaaagcccgtagaaactgtagcaacatcggtgttgcacagatcgtggcggctaagtggtccaacaacccatcctccgcgttaccttcggcggcggcggctgctgctacctcgtctgcatctgcggtttcttccgccgcatctgcagccgcagcctcgtccgccgccgccgcccctgtggctgccgcgcctcccgtcgtgctgaaaagcgtcgatgaggaggttgtggtggccgaggaggggatcagggagaagataggtagtgtacagctgacggattccaaacattctttcttgagctccgatgggagcctcactgttcatgccggtacctcctagatccaccagattcagtcatttcatatctgattttgttgttggagattgataaattaggttttacacaggtgaaagattaggccgtggtatagtgacggatgctatcactactcctgtagtcaacacatctgcctacttcttcaagaaaactgctgagcttattgacttcaaggtccgttgattgattcagtctctttcttttatggattagaataacacctattaggttgaaagaatctcttactagttttattgactttgtttatcttcaaaaaattgaattattgtaggagaaaaggagtgtgagtttcgagtatggtcgttatggtaaccctacgactgtggtacttgaagataagataaggttattattattttatctttaataatgtgttttataattgcacttgcctttcctgaagattatgttgttgatgcttttggatttgtttgattaatatattgctgtagtgcacttgaaggggctgaatcaactttggttatggcatctgggatgtgtgcaagcactgttatgcttttggcattggttcctgctggtggacacattgtcactactactgattgctacaggaagactaggatcttcatggagaattttcttcccaagttggggatcactgtaagaagatttccattgcatctaaattttttaattactgtcttcctttttccaattccagtttttcaacttgattgtttaacatcatgtttatgtccaggtcactgtgattgatcctgctgatatcgcagggcttgaagctgcagtgaatgagttcaaggtcagttctgtaacattattgtcctttttacagttggaaagagagtatgtgtctcaaatttattccgacttgtctggcaggtatctctgttcttcactgagtccccgacaaacccattccttagatgtgtcgacattgagctagtttcaaaaatatgccacaagaggggaactctggtttgcattgatggcacctttgcaacacctctgaatcagaaagcccttgctcttggtgctgatcttgtcgtgcactctgctacaaagtacattggaggacacaatgatgtgagtaaaacatgttccatatattgtaaaacatctcaaaagagcactcactggttgtttagttattaacaaagattgtttctcggtggtttaggttcttgctggatgcatctgtggttcactgaagttggtttcagaaattcgcaatctgcatcatgtgttgggaggaacacttaacccagtaaattacttgactgtctcatttatccctcttattatgctgttaattcatgaattctcataaaaggtttgttaacagaacgctgcgtacctaatcatccgaggcatgaagacattgcatcttcgtgtacagcaacagaattcgaccgcttttagaatggccgaaattttagaggcacatcctaaggtatgcaatatctcttttttgagtaaatatcctgacactatccaggtgagtcatgtgagtaaatatcgatgcaattttgatttgcaggtgagtcatgtgtactatccaggccttccaagtcatcccgaacatgaactcgccaagcgacaaatgactggttttggaggtgtggtcagtttcgaggtaatatgatctatcaccaacctaatctctatctactccagattagcatttaagtatgatcctgaacaccttgattatctttcttgggtagattgatggagacattgaaacgacaatcaagtttgtggattctctaaagattccttacattgcaccatccttcggtggctgcgaaagcattgttgaccaacctgctatcatgtcctactggtatgtctttggcaaaatcgaacaaagttatctttgattccatatgcttccgtctttgacaaaatcgaacaaatttccgatttctaatgggtggttttgatttcagggatctgccgcaagaggagagactaaagtatggaatcaaagataacttggttcgtttcagctttggagttgaagactttgaagatgtcaaagctgacattcttcaagctctcgaagccatctgaaaatgacacatcacacaaaaacgctgtcgtttctttgtcctttatttatctctctttgctgttttcagtcaccgtaataatgatgtctttgaactattgttccgcgacatttacgttccgaaataatcgtgtactattatgatgtttgttgtgctatataataaattctgtttagttcgttttgcgtcttaaagaggttaaattagataactggtcccatgtgaacgaccattgtggccattgctttgtggtaagaactccttgtgcttggaacctcaaggtcacggcttcgaacaatggtcatgaccctctagcttctgcttcttcttctctttgtttcaacaacatataaggcattcataaatgcctcgtctttttttgttttctttcctttcaatacgtagttcgatttcgatttcgatttgtagatctcagcaaaatccatgtcttgagagaatgattaatgggcctttttaataagtccactgataaagacgagagcccaaaacgtaattgtattattatcttctttatttgcttttaaattttaaattgacattaagacaagactaacttttgcttgtcaaatccatgtgttgtccagcgggtaatcaacccaaagttccggatccggacccaacagtaagcaacattttacgattcgttgtttttgaatcccaatgaaaaaaaagatggttatttttaaggaatggaaaaatcgagaaaaatggtatcgtgtcgcatcgaggacttattacgtatggcgagagagctcaaaccaaaagatcaccgcctcgactgattcatcttttctcctggtatgtattttggaaaattcgtctcttgctttttatttgatccagatcagaaaacgttgtgcagattgattctgggtttatcagttccttaccaccatagtactctccatgttcttctcaattgtaaattcctttcctttttgtgtgtcaatttacacatatctgatatcttcttcgtgttgctcccaaattttgcagattcttggcaggcttctcttggtctaagtgaatttggagttatgcttctgtcagcacttttaacttcagtgggaatcaatcttggcctctgttttctcttcttcactttgtattcaatattgagaaagcagcctagtaatgtcactgtatacggtccacgtcttgttaaaaaagatggcaagtctcagcagtcaaatgagttcaacctcgagaggcttttgcctactgctggttgggtcaaaagagcattggaacctaccaatgatgaaatcctctccaatcttggcttagatgctttggtcttcattcgtgtctttgtcttcaggttgattgattcattgagcatctgcttcaagtttgactttttttttgtgaaacttcaatgcttttttgtttggcagcataagagtgtttagctttgcatctgtggttgggatcttcatacttcttccagtgaattatatgggaacagagtttgaagagtttttcgacctcccaaagaagtctatggataacttcagtatctctaatgttaacgatggatcaaataagtaaagaactcgaagctatgcttaaacagtatcccgatttctacttgtccgtaaccgatctcttatgcttgtatgtgttttgcttcaggctgtggatccacttttgcgcaatatacatcttcacggcggttgtttgttctctactttactatgtaagacgccttttgttttgtccatccattctactttatatcgcctatatgggaacataaaataatgtttggactatctttgcaggagcacaagtacattttaacaaagcggattgctcatctttattcatccaagcctcagccacaagaatttacagttctggtcagtggcgtccctcttgtatccgggaacagtattagtgagacagtagaaaactttttcagggaatatcattcttcctcgtatctttctcatatagttgttcatcggacagacaagttgaaagttctcatggtaagcttctacctactaaggattctataaggccttaccttttgatatttctggatttcatatatctgttaatatttgcagaatgatgctgagaagctgtacaagaagcttacacgagtaaaatccggaagcatatctcgccaaaagtctaggtggggtgggtttctagggatgtttgggaataatgttgatgtggttgaccattaccaaaagaagcttgataagttagaagatgacatgagattgaaacagtctttattagcaggagaggtgagaatttgtctttttgtgactacttgcattcttcaacatattcattcctttttttttggcaaacccttttaggaagttccagctgcttttgtttcctttaggacaagacatggtgctgcaatagcaacaaacattcagcaaggaatagatccaacacaatggctaactgaggcagccccggagcccgaagatgttcattggccatttttcactgcatcgtttgtgagaagatggatctccaatgtagtggtgcttgtggctttcgtagctcttttgatcctatacattgtccccgttgtattggttcaaggtcttgctaatcttcaccagttggagacttggttcccttttctaaaaggaatattaaatatgtaagtaaagccctatttagataaagatggttcttcgtttcaattgaacaattacaaaatcttcttttttttcttatgattgcaggaaaatcgtgagtcaagtgattacgggatatcttccgagtctcattttccagcttttccttcttatagtaccacccattatgcttctactttcctcaatgcaaggattcatttctcatagccagattgagaaatctgcatgtatcaagcttctaatctttactgtatggaacagtttctttgcaaatgtactgtccggatctgccctttatcgtgttaatgtgttccttgaacctaagactattcctcgtgtgcttgctgcagctgtgccagcacaggtaaagaacacaaaattcagtattgaggtttccggaattcccttttcgtaccacgagtcatgtttattgtttaatctttggtgtaggcatcgttctttgtatcttatgttgtgacctctggatggactggtttatcatcagagatcctccgtttggttcctcttctttggagtttcataacgaaacttttcggcaaggaagatgacaaagaatttgaggttccttcaactcctttctgccaagaaatcccaaggattctattttttggactcctcggtataacttacttcttcctttcgccattgatactgcctttcttgttggtctactattgtcttggatatatcatctaccgcaaccaggtaacggaaccaatctcactcctaagtataattctctgttgatctctgataaaatcatataggaatcagctacacatattttcgttatatggaatctcacttttatcttctctttatatgtgatcccttttctaaattctcgaatagcatctttaaaccgaaagtattttttggagcttcagtcatgacataaacgttacatcaagaatccattttctcgtcacataattctttttcttcttaatgaatccattgcaacttgttgatagaaataacatcacctttttgtgctgcagctcctaaacgtatatgcggccaagtatgaaactggtggaaagttttggccaatagttcacagctatactatcttctctttggtactaatgcacattattgcagtcggattattcgggcttaaagagcttccagtggcatcttctttaacaattccccttccggttctcacggtccttttcagcatttactgccaaagacggtttttaccaaatttcaaatcttatcctacccaggtaaaggctttagagaaatagttactcatatttttgatccaatggaagaaaaatatggctagataatcttttattcctaacctaaacaaaacaaacagaacatgatgcatagtcctttattacattacagcatctactctaaacctttatatggtgatgatggatgttttacttttgcagtgtctggtaaacaaagataaagcagacgagagagagcaaaacatgtctgaattctattcggaactcgttgttgcttaccgagatcctgcactttcggcatcacaggactcgagagatatctcaccttgagatcacctttttacttgagctattgaagtttgcttatgttgaagctgttggtttactatacctggtgcaatccatgaaagaacacactaaaccggttgtcttgtacattgggtcttaaccgagaatcaagcggtttttgtcttgtacatttgcttacacttggcttgtgtaaaaaagaaaaaaagtttatgtcaatgtatctctctaaaccggtttaagacggtacaaactttttgaaagatgccaaaacaaaacggtggttaataattttaccacagagaatatttagcaaaaagatgatgactagatgccacgtccgcatgggggtatatattgtaattagtcgtaactctgggggtaatttagttaaagattgatccgtttatggaaccaaaaatcaaataatttcgtctttgatacttgcttgcgccttataggctacaggagcgagagcaatgaaagcgagaggaagaatctatcaataatttctgggtttaagctgatctctggatcttcctcaattttactttttcagctcagaaaattttgggacttttttttgctgcattttttggttccgaattttctcctccgccttttttaatttttggtaagtttcgatatctctcaattttcttatttcggaaataaaaaaaattctcgcccttttgcaaatcaatggattgatcttgaaatcgtcatttctgaatcgggtacgagagatccagtaatcctctgcgattgaattattattagggttcatattccgaattggggatagtctgaaaattgctattttaagctctcttcttagtgttggttggtttattctggataataaaagggatcctaattctcgctaaattctcatgttcaaacgagtagatgagtttaatttagtttcttcaacgatcgatcacagaatcttcaaaagtgtaaaaattacttgctttttgttcctattactcttttgcagtttgttttgtgtgttgtgtactagtagatctaatatctctctctctttttttgtagagaatggatggatcaggcacaggcagtagaagtggggtagaatcgattctaccaaattacaagcttgggagaactcttggtattggttcctttggtagggtgaagatagctgagcatgcattgacaggacataaggttgctatcaagatcctcaatcgtcgcaaaatcaagaacatggagatggaggagaaaggtacaagttttgttttgtgtatccattccaccttagttgtgacttcacggtactcttggaatatataaatatatagcttctttttcgtcttccttcctttgaacttatttggtctttgatgcagtgaggagagagatcaaaatcttgagactatttatgcatcctcacatcatccgtctctatgaggttatagagactcccacagatatttatcttgtcatggagtatgtgaactctggtgagctatttgactatattgttgagaagggtagattgcaggaggatgaggcgaggaacttttttcagcaggtatgtttttattttattttatcaacatgtaactttccaagcaaccattcgattttatattatatttgagagttaagaattagctacttggctttgatgtagataatatcaggagtggaatactgccatcgaaacatggtggttcacagagacctcaagcctgaaaacttgcttttggactctaaatgcaatgtaaagattgctgattttggcctgagcaacataatgcgagatggtcattttttgaagacaagttgtggaagtccaaattatgccgctccagaggtaagtgcttcagccctcaggtatctgaggaatactataattaggcttgtttcaaatgataggttatagtcgagatctataaattgtttcaggtaatttcgggcaagttatatgctggccctgaagtagatgtctggagctgtggtgtgatactctacgctcttctctgtgggacgcttccatttgatgatgaaaacattcccaacctttttaagaagataaaggtacattctattactcctcctctttcgtctatttgaactaatgcttgaattttttattttatttttcgtatcacccttcgactgtaaccttttttttttctcttttcgtcctatagggagggatatacacattacctagccatttatctcctggtgctagagatttgatcccccggatgcttgtagttgaccccatgaaacgagtaaccatccctgagatccggcaacacccttggttccaagctcatcttccgaggtatttagctgttcctcctccagatactgtgcaacaggcaaaaaaggtaagcctaacgtatctactcttattttcattagagaaatctctattcccatttttcgataaaggcgtaaaagcgctgtcttcatttgtagattgacgaggagattctccaagaagttatcaatatgggatttgacagaaaccacctcatcgaatcgctccgcaaccgaacccagaatgatgtatgtgtttcccacccacttgttcttttgctgtttctttcatttcaaagattaaaaaaaattccatcaaaagatcttaaatactgtattcttaccgactgtcttccagggcactgtgacgtactatctgatactggacaatcgtttccgtgcctctagtggttatctcggggctgagtttcaagagaccatggttagtcttttttgtccttttcgactttagcaaaagatctttgacgtaatgcttcattgtttgatttaatcaggaaggtactccccgtatgcatccagcagaaagcgttgcttcacctgttagccatcggcttccaggactgatggaatatcaaggagttggcttgagatctcaataccctgttgagagaaaatgggctcttggacttcaggttttgatattttctgtatttatggtataaagacttcagcttttgatatatatgtgattaatattgtaacaatttgatcgcacagtctcgggctcatccccgtgaaataatgacggaagtcctgaaagccctgcaagatttgaatgtatgttggaagaagatagggcactacaacatgaagtgcagatgggttcctaacagcagcgcagatggtatgctcagtaactcgatgcacgataacaactactttggagacgagtccagcataatagagaacgaagcagctgttaagtcgcccaatgttgtcaagtttgaaattcaggtaaatcctcttctccacttcatgatacatatcggtttcccgtacgacattgtttctgatgtgtgatttcgagtgaaagaaagctttgtgtattagtgtccatggccatttttgtaactgaattagaactagagtgaatcttcatgaatctaactatcaatcaatattttctgggcttgatgacgtttgttattgttgatggtgaaacagttgtataaaactcgggacgacaagtatctactggatttgcagagagtacaaggtcctcagttcttgttcttggatctgtgtgctgcttttcttgctcagctccgagtcctctgaatactaaaccggacctcttcaagaataatccccacttattcctttttttttttttttcttattcgtctaagaaattatttagaaaacgtaaccctttttttcttcttctctttctttctatttctatatgcgtgctctactcaaatacctcttttaacttaaatgtaagactgagcaagagtaaaaaaaagacactttgtacataacttgtagtgcatcatgccaccaagattgatttttgtttttgtttactccatatttcttatgattaaaatcaataagttaagggaaagacattttgacaaaaattgaaggaaagatgtttaaattagtttcattgaaaacaaattagcaaattcagaagtagttgtttttgtttcgtgtattatttgatgggtcaatattacactatattttttgtgtaaacaaattagcaaattcaaaaatagttgttttttgtttttgtcatcctactaatattaagacattgaaaaacgaacatttaggatgagcttgatgtgtttatttcgaactaagatccaaaaactatacaaactcaaaaacaagcccaaaaagaatttcaaaagtttccaacgtgtggttttacctaccagttaatcttctcctgcaaaaaaaaaaaaaacacatcaagtgtgagataaactctcacaaaaatacaaggaaatttgtaataataataaaaaaagacacaattatcttttggtaaacctgaaattgaataatttcacactgacttgggcttttttttttaaatgaaaaattaaacaaatatggactacaaatcatgatggtaggtaaaaaatgtatatatatctttggctaaaaattctggtaatttaattcgctttttccccaaattttaacctctctctattcgtggtggtcttcgaacaccaactctaacatcactttcagtcctccgtaatatttcattcatcccatttgtttgaaaaatcttcggattcgccccaagattcgtcaaatcctgcatgattttatcaaaaattaaaattgaattccaactgccggtttagatggtaccgggttcaatttgacttaccatatcttcttctgttttcttgtgattcacgccagagaacaacaacacatcagaggggtccagagaaacgtgcggcctaagaaacggtttgtcttcgtttatcgttaacccgaaagtgttcttagcaaaagccatgctcataccactcacgtggctcgcagatcctggctggatataagtcagcgttgaagctacgtcattttctttcctcttctttgtccctgcccacgcgaacccgctcgctggtgccgtggtttgagacaaactgttatacggaaactcgcttcgtgtcgtcgcctgagacgtctctgacggcgtctggacaacaatttctgtttcggcttccttctttgtttcctgctgaaataatgaacaaaaattacaaatatcgaaccgggaaatagactcatcggtttattccggtacatgaaacaccataatacctggtgggttggtaatctgttgagatttgtaggctctttgactgttgccctacgagatttacccaatttctttgttgccaagttatctcttttcttgatactaactcttctcctgcataacaaagtttaattaattaaatacaaccaatgatatttatacaatgcgcatgctagcaatcattgataccttcgttgaagttcttcgcggtacttagcatccatttctttattaggaggatacttaggtaatgtcgatggatcgcaagcgtaaggctgtgtgttaaagtactgaagaacaacaacaaaccacagagaaaacaaaagagtttcagcttatttgattagagtacatgctagggtttcgtttaggaagttttttcacctctgacataagagcagaagaagcagttcctcgtttctcaggatcaatagacaatagattctccaatagattaatcgcggttttcggaaactcatcaaatctttctctcaaacaaccttcatattgatgttgtggtctaaacatcttagtttgaggatgaagcttgttcttttcccagaattcttcatctggtgatccagagagtttataaatcttgtgaagttgttcaatctacagagaatttcacaaaaacaaaacattcagaaacataatcttttctccggaatcggtttggtccctaattcctcacctctgttcttcctttaagaagtggtcttccggtaagaatctcggcgaagacacaaccaacactccaaagatcgaccgatacgctataacttgttgaacccattagaagttctggtgcacggtaccataatgtcacgacccgactggtcaactgattcttgtttcttggtgttacaatgttggctaatccaaaatcagctagctttaaaactcctttgttattcaccagaatgtttgcggcttttatgtctctgtgcataatccctcgtagatgacaatgttctactccccatagcagttgcttcatgtaacatttgatctggaaacgaaattagggttgtcagagtaaagaaagaaacagagtcacttgcagaagagattagggttttgtgtgtgcgtgtctctctcttgcctgtgcctcggtgaatttgatgtcgggagatgaacataagccttcgaggtcgtgttccatataatcaaacacaaagtacatgctgtttgaattccttgatgcgatgatcccttcgagtttcataatgttgggatgatctaatcttctcaagatcatgatttctctcgcaatgaatcttatattttctgtttcaaaattttggatccgtattttctttaaagccataactcgtcccgtcgatacctcacaagcccggaacacgttgctatacgtcccttgcccgatctaagatttttagagaaaattattcgttgaaatcattgatagggttgtttcttgtcttgcaagaaaatgtaataatctatgcctctatggataggattattttaccttctctcttttctcgaagtcctcggcgcgtaatggaacccacccatgaacggcctcgggagcggcagagctgagccaggagggccaaccagccgccacctgctcagcctctacattgctgtgcggcaatcccgatcttaggctaacaccagtcgtcctcgattttggagcatcgtcgtcattgttgcgatgttttttcggagatgagttgacgacacggcggtgagatggtggaccgggaagaacatggcggttatggggatcttgggtatgacttcggtggacgttggtgtccaagcgacggcggacagggcgtggaggacccgccggagaagaatgcttggagttgaagcaacccataataaattaattgtcagaggagagtttccgggtggcggcgtgagtatcgacccgggtcgggtaaacgggtccaacgcagggagggcaatccccgcattagaccatagagaaacgaaaataaaggagaaaaaaaaacaaaaaattgaaggaaaatagtttttgttgtaaaatagagaagagaaccgaatcgagagagtgagataatcacggacaattcgacaatcctccttaaactttggacgacaaaagagacaagaaagcaaatctttaatctctctcttttgtaatttaaaatagatttatcttacaccctaacaaaaaaatgaagatatttttttactaaatttttgaagggaaaaaactgtaatgaaaaaaataatctatatgttacatcaaacaatgattaggtacaaaataataaattcataatttatgaagaaaaagaaaaaaacaaaacaaatttctttcgtttagtcaaaagcatgcactcaattcacatcacacatgttgttatacaagtcatcaataagtagtagcccggttcagaatcaatcaccaagcggctaaaccaatcctaaatatcaatctcgaaatctttggttcttaaaagtcaaattgtgattttctcttctttcaacctcaaaagaaccggagattggcctgtgttattattgttaccgaaactcatatgttgttgcatattgttccccgacattgatctcatacgatggtggtcagacggccccaccgcagctgcggttgctgccgcggtaccgtttctagcggcagggacatcgtgattgtgtttaccttcgtaagttgtaatcacagccttagcatccgtggaagctctctctacatgtttacggaccgtacaatttggcgttgtacatttataatagctcctaataataccaaaataaaacgagtatttaaacaaaatgaatgtgaaataatgtatacaataatcaaattatttctatatagattcaataagcacaaccctaagtattagtaccttggatggggatttcctttgacaactttttgtccgtacttacgccacctatagccatcgtcgagaagatcgacttcactttttgtctgaacgataatcttaggctcggtcaccgtccggtgagtcgtcgacacaccgtctattcttctataatcccgatatatattaactaattaattggcaatgccatgaccattatactaatactatgtatgataatcagatgcacttctactataccttatctttgaagccggaagatcttcatcatcttcatcatcatcatcatcatcatcatgatccttacgataaccactatcatcactagattccatcatttgccctgcaccaccaacctcagtggaatctctgcctccaccgccacggcgattctgaggcctctcgtgatcatgttgacctttgtaaatgatctgagtgatctgtccatccgatgaccgttcgactttcttcttcaccggacagttaacatgtgtacatttgtaataactccttggatattcacaccctttgataggcttttgtccgtacttcctccagttataaccgtcatccgccggtttatcaacgttcacaacgttatacgaccggttattattgttattccccggattattataatggtttcgagctctttgatctacttgtgaaacgtctaaagattgacgaccatggacggcgacggatgtcgatggtggcatatggtgaggaaacgtgtctggtcgttgtggttgcggttgtgactgctgccgtggttgaataaagccggtatgagctgacgactgcagtgtaaatcatactctcgatttaattgataccaatacgaaaaaggaaaattatatgaaaaatgtccaaacaaggttgtggtctatactattcttgtcgtgtttttctcaatttttagacgattgcgtactatataagttttgagataagccatgatatttcattaagaccttattaactattaatcataagacaaagtgttaatcatgaatttatttagaaattgggttaattaaggtttattaattattcattaagattttaagaccttattaacttctaacgactatgattatcaataaaatgaacaattaaagtatctagaaaatgagatagggtttaattacctgcgggggaaagaacatgggcgaggtgagaagactagaagggctgaaaccagaagggattgtaaacatcggacctcctccggcgaacatccccgccgttgaacgtcctccgccaccaggagacaccgacatagttccgttaagaagctgagtaaacgacgtcgtccgttggttatccggcgtcaagacgtcagggaagttatcaacaaacaaagaagagacaaaagaaagtggccctgggcttagactaagcccatctccaccgccaaagaaatacgccgccgtttcgatcgccggaggtctatgaggaactgtaatcgtgggtcttgttggtgccactaacgtcgtcgttcttatcaaagatacatcgtcttcaaccgccattttctgaaagataaattactttaatctcaatttttgtagatctctctagatatggatattactgtgtgtatatatacagagagaaacaaagagacaagagtcttctgtttcaatgtctaattttcttagatcgatttcgtgcagccttgacattggtgttcaaaagtctacgggctaaacatggaatttctttaataataatattattactaatttattgtggtccaatctctctgttctaattaattttcgcatttaagctatcttttttttattagtcttatgaaaaatattcaacttgcatcttttgttattaaattattttgtttaacaggttgatggaataaccaaatttatggtgtttaacttgtaaaagccatcttagttgctatttgtacattaacatatagtaaattttgtggaccaacaatattcggttgtttactagactttttccttgttgtaaattgatgttaagtatttgagtgaaccataatcaatactttctttatattatcaggtacggaaaattatttacttggtatttcttttttaaagttcgagttgatgtcacgagtcttactatccatgttaatctctctcacatcttaaaacaacaataatcatcagaagatacaaatctaggttttatttgatattagtagtgaaatagtgggttattatattgaaaccattatatatgtgataagaatatcaataacttaaatggatcacatatatagaagcttgttttttttcttttccgaagcttgcctcacaagaccggcactacgaggcaataactccaatggcgacaaaatgcactttttagtttaaacgaatgtaagtgtaagtataatgtaattaagttctttgagtcaatggttgacctagtgggtatatgttacgttcggactttgatttccaaagaatacaaactattgtagtatactataaataaatcgaaaatatatattaggccgtatggtagagcactagagccttatgtttatcgtgtatggttctatgtagtaaaaataatgttgtacgtcgtcttgtcgatcgtataagtgttggatatagaactgtttacggttccaagtatatgtttgatcttcttttgttcactatttttacaggtcgatattaaatgtgagatatggaataggcaataagcattcaccttattcttttatgagccaaacacaaaaggaccaacttgcatttgttataatatagttcagaacatcatcttcaattaactaaaatagccaacagaataactactatgtgtggtctctctagttattgcttcaccaaagtttcgaaaatctactaatggtatctcattagcttatgcgttgattcatctatgattattttatttgtataccatatgatgcccatttgagaagaagatgaataaagttaacattagaataactactatgccatttataacttttttgttataaataaaggatttgtatgtgagatatgtgtaaatatatctccatgcagactggggtttgaatggatacaaaaaaaaaaatcctaaaaggatttatttgattccaaaatcataattttgatcattcgctaattattaacatatatattgcggcatgactttggtcaatttattgatactatatgttacaccgttcgaatcattatgagtatttttcctgtgcctaaactgaaattttgaagccgaaaattgtcaaaagactcaaaatcaaagtatactaagtctgattatacagatctaatctctttgatattaaatgacataatgaataataacgtaattttgggaatattcggccaacgatttgcgtttcataaattatgttttcggatttgctgaaacaaaacataactagtgtctgccttgcatgttcttcagagttttgagagaattaaaggaatcaacttaaactaattaactgacatttgtttttgcaatgagtatttctattttattctttttttgacacctaaggaacagcctattgataccttatgaataacggaaagtatcagttccattttcttaatcatgtttccatatttttcaaattagattttactattcgaatcgatatatataaactcaaaaaatttattttagaattcactcgatatggagttgttatggacgcaacagaaaagggaatcaagtatattgaaactattttctgaaactaaatgaaaacattaacaaaggtttgacatttcttgatatatatacggtattgtatccaaacgactaagacgtttacttaaactcgagacaagaagggtcaagaattgtaacctggttttagataattttaacatggatacatcttaaagaaattgaaatctatgtttgcaagaaaatagtcaaaaataaaaaatataatcctaaagttggggtcagagaattttaatatcgtaaagattttgatgtttgaagaaacatggggaacaaaaatcttatgaccaaaaaaacccttcaagagctgtttgttttgtcgggacgtgtggttgacttttggataagggtcaagctattatctaactaatttaggccctttacatagtcgaaaatccggaaagtaccacaacaacaataatttaaaattgaaagtgaattcttttatgggtttgaactataaaattaaacatcttcaaatgatcaaatctcgtggtcagattagtttacaatcacgtcattttcgatgtgatgaacaaatgatacaatttaaactgccagctttagtcaataaactaaatagtctgactagctggttaatttttaattattttttaatttaaaccatacaaataaaaaatctagggatttgataggctaaagtgtctaatcatggtgtccactgtttgggacatgactagattaaaccctaatcatgggttaagtgtaatatatatatttgttttgcatagtagactactagtattagtgtattactaattgtttggaagaaggtattaagcgagtcacaaatattatcacactgcaaatatcgtatatggagtttatataggctaaaaatccagattgtttggatttaacgagaacatggacaaaagatcctcattttttttcgttgtaagaaataaattttgaaacaaaatatttaattaaatatgaatataactactaaaactaaacattatattttcttcaaaatagttgcctaaaaaacgaagaaggatattcttcaaaatcaacgtaagagacttggattatgatttcaacaaaatggttattttgtctaatggatttgcaatatttttgatagtggcgtattgatctagaccaaaatttcttatcatcaacaaaaattagttactcggaaaatattcaacacataatccttttttttgtttggtcaacttaacacatacataaagacgaaggaaaaagatcaaagaagtagagaagtaagaatacttgttttttggtgtttcatatagaaagaccttggtcgatgtcaaaattcaagacgaatctatattggacttggtttatcaagtgattatttttacccattacaccataaaacgaatttgtacatagatcgcagagatagtgtggccatccttgcgtaaataaaactcgactaaaacaaaataaaaatagccaagaaatataaataaaacaagttgagcataagacgacttgaagatggagaaaagtgtggtcgttgaaaggacactaaaaggataaacgtgttcccaaacatccttttgtctttgatgtcaagtggcaatgcgacaaaattgcaacttattattatatcacctatacatgacaaaacttcaattattgtttagttactttctcattctacgtatattttgttttaatacaaaaaggtatcggagctcatttctcttacatccattatctaaagaccgttatctgataagtatcttgatatttttgatcggtgtatataccattttcgtaaaaatgtaactaaggtactttagtttggattcgaatctagcggaataaaactaccattttccagctgattagaaatttagaaaacgatcagctgtttggactttgggttagatttcttttttgagtttttttataaaaaaattaatttgtgtggtgtgagctaatattttttttttggtatttgttttgttgacagcgcaaagcgagcaaattcttatagtaagtgataaatatagtcaaatgttctaaagcaaatactaaaatgaacgtggaaatttgatcaactgatgaaacaagtcaaatgctctaacattcctttttcacacgtttatatcataaaaatctataaccatacaaaaaatgtgtgttcaagaattagtaagattttgttttattcaaagtgttaaatgatcgttcggataaattttgtagttattcaagggaaacatcagattactgtacatacagtgtcggtaccactggccaaagtcatctgtatttgcatttattaatttttgaaaaacaaaatacatatttttgtcaacaatcaaaacatacagtacatacatatcatcgatatggacaagtaccatttatgggtccacgatgaaaaggatatctaacttacaaatcgaagcccaagtttgtttgtttttttggtcggtcgaagcccaatacataggcctaataaagttttacaagattgttcagttgttttttcaacacatgatttttccccctaacaaaagcaaaagcatgaacaaacaaattacaactacaaaaaaaatcgaagcccaatacataggcccaaaaaagtttttaaagattgttcaaacaaattatattacaattgtttatttcgacaaatgattccccccctgaacaaaagcaaaagcatgaacaatctccaaagacacacacacacacccgagtgtagaatgactagagaaagatccaagaacccaacataataaaagagtaacactaaaactacaaaagagcttcactttgcgaagatatcaatcgaatcggatttcaccgataacaatcgttttctctttaaagattgttaccacaacctcagtaccgtgtcccaactgctgcgaaaacagctactggaataagaaactgataggcaaaaccggagaccgagaaggttcttcttgcactgttcttgttaggtgctgcagctggtggaggaggcggtttctcaactaaaacagcgagcttcatacctccgtaacatccaccaccattaccactaatcagatagtaatgccttgtcacattgagatgaaccaagtcccttccagctccacgactccaatttgcgatcgggttattgggattgcagcttatgtagttcgtctcgttcacttctataacgttgtattggtttctctcatatacaaaatctgaccagacacaatgagaatgaaacactatataagtcaacaagattcatgatttgagatcttactgaagtacagaaccagaacctaatctatttccaattacaaaggatgctgtgaaagaagcatccttttttttaataagaaaacagagctagtgaagaaactagtggtcctttttcaaagttgtaaaatttgaaaccattcatttgccaactgatgtaaaacgtatattaagtccgaaagcctgtgataacaagtatcaataagagttagagagcgtacagagccaatcgtcgaggtagaaatgtttgtcctgagcccaaatggtatagttgatattaggattccagaacttgttatcacccaccgtccacctcttcgccgtcacattcgtcgccgccagcagaaaagccagcaccgcccctgcaaccaaaaccgcaactctcgccatcgatcagtactctaaaaaaaaaaggatgagtcgtcgtttgtggggggggatgggtttatcgaagttcaatctgagagataaatatgtctctttttcagggaaaagatctctctagatccgtaattccttcgactaaccttcgaaattttaattaaacctcgaggttgacgaaaagtacaagataagcgttatgtaattaaccaaaagtaatattttccttttcattttggtcatatttcttaccttttttccggatattaatttcctttttttagtcatccagttggtctcaattgcttaatcataaagtcaggatttatttacttaaataacatagtattgaaataaaacgaatcttataaaaatgtgtttaatcgatgatacttttaaaagttgtaactatatacagtatactgttgatagccgttggggaatttcacattttgaatgccatgtcacatatgacaagtagcttttcgtgttctattattttccatcatagcttccacgcgcaagcttgaccaccgccattaaacttggtaatttagtataattcacatgaatgaattagtaattttgttaaaatgtgtaaattaaaaaaaagaaattgagaaagttctctaatgttcctttcagtttgaccaagaatatattcttaatttgtttcctttcttttgacgtttcaaaatgatataaacggagtaacattttatgtccacacaatatttcttgtaatatccacgtaggatgaaatatccatttaaaccggtccacgtgtccagacatcagcttctagttccattgtacaataataataaaaaaaccttacctgaactaaaaaaaaaaaaaaaaacgaactgagaagcgaagaagaaaatggcggcagcggccatggccgttcatctcccgaaacattcttcgtttcttccgaaacccaaacttccattggataaaaaaaccaactttctcggtgggtcatttaatttaggtcgacccatgtccgtaaaccgggaatttaacagtccggtgatggtctccgcttcttcgacgagcaagaccgtccttaccgatgacgtagacggcgatcaaagtaaacgcttttatattaacttcactggctttccttttcctcttggtcctttccttaaccggcgcaccatcagaaccgaggttagcttttgctccatctctcaattccgttagggttctttaatcagtcatctccaatttcagaatcacaagtcaattatgcccgaatccctcttaatttttacaaaattttgaaccttgtttgtttgcaggcggttaaaggttgcatatggatgtttgaacaagaacaagctttagggtttagcagcgtgtccactaatatacgaatgactgtcatcaaactaaaatctggaggtttatgggttcatgctcctattgctcccaccaaagagtgtgtccaggttctattttgttctcttttttttttttttttgacagtcaaaacataagttctattttgttctttgtgtttactaatatagtagctccaaagaattgttgaatgacaaagtatcatactttttgttgtcatttctctacttacattgacatgtaacacttagtggttgataaatagagaatgattgaactctattggttgtttcgcttctcttttttgtgtggcagcttattaaggagttgggagctccggttgagtacattgtcctgccaacgtttgcttatgagcacaagatttttgtcggtcctttttctagaaagttccccaaggctcaagtatgggttgcaccaagacaatggagctggccattgaacttaccacttgagtttttcggtatctttcgtgctaaaatcatcaaagacagggacttatctacgccatgggctgaggagatcgaacagaaagtcctaagctccccagaagttggtatgttcctttcagtatttcaatctggtttggttggaagatttagaaatcatactttctcattgtgtatccaggaattggaccatatgtcgaagtagcgttctaccataagcggtcaagaacccttttagtcactgatgctgtgatcttcgtcccgcggaaacctccctcgagtatcagcaacgaatccttgttggcctcggctaagaatggactagctgtgaagatacttagcaaaggaaaagacattcctaatgatcctgtggttgataatcctaacacccgccaaaaaggttagcagttcttaaaagtcaatttcctatttcttgatcttagatctcagtggcctctgtttgttttaccacttgcaggatgggaaagaatggttctgcaaatcctatttcttggtccctcgaatctcttggaaccaaacgcaagcttcgcacgaatgtcacagaagctgatcgtttctcccattgtaaagactttggtctttagcaaagtccctgagaaggttccttatctctgtttaaatctttgttttggttccaaaatgtttgttttgatttgatcatcactgatgattcaggtgagggattggatcgatgagatagcccgtgactggagatttaaaaggattatcccagctcatttcgaagctccaataaacgcaggaagatcagattttctagctgcgtttgggttcctagaggatcttctaggggaaagatatgtaactcgtccttcgctctctcttctcttcacttcactaatgggaaaagctgcgagctattttcctccagacgatatgagaactctctcttcacttgatcagttcttagtctctgttggggctgtgaaaaagacagtatccggtagaaaacgaagatgatggcaaaacagaaaaatggaagatacagctttaatagtcttaaagaatatcgaaaggccttgtaatgaaggatatatatagccagaaacaagtaaaagcttccatgttggataaagcattgtatttactaaagttttgcagacattgcctccaaccagaggcgatcgcattgatgatcaaaccaagtctaatcaaactacaactaaccatcgttcattaaccggtatataagaattgagctgaatcactctacgccaaacaaataacgtgcagctgaatccaacaatttcttcttgctccttagctcaaaacgacctcgaattttccataaccagctgataaccggtttagttattagctcttaaaccaagtgtgataaccaggtagaggatatcagaaccaatttcatcaagagttttatatttgacgtcttcatttttgataattacaacaaatttatatagcgcttagggtttcactatcgaaatagatgtttgtttgagcaaaaaaaaaaagcaaatcgtgggagacaagaagaaaaagaagcaaacgggtcggagctatgtccggacttgctgcgatgtgttttcaaacgattgagtttgatatctcttaatcgagctaaatcggtagtggcactctgcttcgagaggctgcggccctgaccaaaatcagattccatggctgattctcttctctcccaaggaggaatccaacaaacacagtagtagttgtgtgttgtacgttccggaggatcaagacaacgtttacagaagtagagaacttggtgttgactttccccagagaccagagtcgttgtctgacgacttgtggtagctggctcttgttgttgaaacctcttagtatggatctcctttagctggtgagaggattgatctacccgatagcaataagccatatttaaggagttacttaagatacgaccgagcttgttttcggatggacaataaaaccaaagattacctagttgtaatgttggagtacgactttcgtgtgtttaccaagaaaggagataacaagtggcacgactttcccttggagtgttttgaagactttgtctacactcatcaaaagctctaccttcgttatgcccattctcttgtcactatttggacccttgattggtattctgtctcttgattggtattcgttcaatcatcacgattttgacccttttcttcagcaaaaagatcaaaaactctattggaaattgatacgccgctccaggacacgcattgcagtcacagtatccggagagtttttggtggtatcaagtatagtacaagacagcaaaacattatattttcacatctagaagaaaaaccaagtgggtggcaaattggtgaaagtcgattctttgggcgatgaagcattgatctatgacatgggtatcactgttgtccccagtggcgtcccagggatcaaaaggaactctatctacttcagtggcgtccaaatatttgtgtatgatctcaccacccaaaagatggaacctatgcctcaatgtgttttctcctccataccattctctgatgctcgttgattcttcccctgctagtcgtctacctgcgcaacagcaggacagatcgcctctgttacttttaatgttttaagctttatatgtgctttaaacttgttttatttgtctctttttgctttcaattctaaatctttgatgatacattattatttcttcatctgttgttgagagttcagtctcacaattctctgccaacagagaacaacagtctacttaattcatctctaccgatgatttggagatatttctagttttagtctcacaatactaatattctggaactcttctatgataaagagggtttcaggtccattttgttcccaatgcagaggaactgagaaatagagctaaaacagagactccattaagaggaactgaatcaccagtaccttgatttattgatgatctctttcaatcttgcaacaagctagagtagagctttgatttatactatttttttttattataaaaaaaaatggttcaatactctttaattctgtatctgtattagtaaacaatctatactaaccacaagaaagaccaaacttaaggaccagaaatctgatgagtctctcttgagattttgctactctcttacatgactgaacagacgcatttgttcatcttcgggtcacctttaggcttcttttctgtttcaaacacaacaccatctctctgtcaggaggtccacaacagattttgatcctacactagaggctgctgtctctttgaatatgaaggagctaagaaaacaagagaataatctaaagaatgttttacctttttccgtaaccggagcttggatgataacgtgcattgtggtgacagcgcctgcgagattagagacaggacttcggtagtctttaaccgtcttgctgttctccaataccttccctgcgcttatcaacttcacctctttcactgttttcggcccattctccttctctatcattagtcaaacacaagagaacaaaatgacaagtagtatgatcagtacaaagagttgaacacaggttcatgttaggctcaccgataacagaacaagtaagcaatcacaggaacaggtacaactctacggatggtgagtaacattgtgcgaattgatctactcaaaaaatttgtgaagtttcttttgcataagatatagtattgggacatgattttcataactagcaaaaccattgttccaagaagattcaagcctttacaatctcaaaacacagtgcctaaggatattacaatttattagccataagagtaaataagcataaaaaaaaactgacctcttggccattcagaaataacagtttccttcaaagccgaaacagttgtagcatcagggaatgctttaggaccgatatccgaaccatcggttaaccgaaacttgatctctagttgattatggacttctgccatttatccaagaagcaaccaaccaacaaacaatccacagaaccacaagaaaatctcaaaagacaccacagcactagacagtttctctatgtatcaaattccacagaggatcttgtttgctatttattctatctgcaaagagccaaaaaaggaacaatttttttcttcaataagtgtgattgtgaagatgaacaagaaacctgagaatctatatatataatggtttaaagcaatgatgatgatcttgtaatcagagaataaatgaatcggcatgcaaaacagcaataaacagaggattctgaaaagagatacacatgtaaaagatagatagattgcatataaatgttaaaagatgagagaaattaaagaagaagaaaagagatctaaacatgaatgcacaattaaacaggggaatatccaaaaaaaggaggaaactttaaaacgaggaatctccagccagatttgaaaggaagccggaaaaagaaaagccctaattaggtctctctctcgcaggtgtaatcaaaatcttacttggtgactgatctgagccgatgaatcaagaacacgcatcagacagagaggagagagaagaaatacaagaagaagagatctcgtgagtgttcaatggcggtcaaagtttccatttttctctcattttcttcccatatatgcgcctatctctctctctctctcgattccttatttttgttcttcgtgtaaattcgacaatttgatattgatatcactacttggaaacaacgcactacttacttaatccagaaacaaattttaattttttattttatttctgttcccagaaattctttatgcaagtaataatagttagttagttacttgcatgtaaaaagcttttgcttctttgtgggacaaatcacagcaaaattaaactaaaaagattaccttttgcatgacatatatatcattttaactttattttgtaatatctgtcattcacataaagaatacaataacttttaatttatccatcaacaatcattattatctatttttggttccaaataattcttgaaacactttttattttaattagttatttacttgcatgtaaaaagcttttgcttttgtgggacaaatcactgcaattaaactaaaaagattacttttttcatgacatatcagcaatcattaattaatttatccccaccaagtttacaaataattggcaagtattttttggggtcaaatggtaagattcttacaaaagacattaaattaatattaaaaagtgtggtatttacagtactaaatagtgaatattgtcataaacacatattttcgttagatatcttatctaaaataacatcaaacggagagagataggagaggacagaggaggagataagcacattgcatctgaccaaaaatcttctgcaccaagaaaagtcttatgattgatcaattagagaccttaacaaaacaataatgtccatataaaatccctaaaactaaatcatttagtaaaaaatatgtggaattttaactgtcaaaaatcgaaccaaaaaaataaaaagagtacaagtggagcaaatgcaacagtgtgttgttggtccttggactgttgtgatcatgaccaaaatccaatttcttctggtgatgtccttaaaccttccttgttcttataacagatccaaaattggaatctttacttcaaaaccaaaaagaatctcaaaaagggtaccttctatttttacagaagaatgaatctttatttctatctttctctttctctgctgctctgcaactggtctttcatggtccagctaaattccgagtaaatctgcagaacccgcaaaatccccagtctgcttcgagattatatgcaagctttctgtttgctattccaagatatgacaattcttaatgaaatcattggagtagttaacatattttgtccagaatggtctgagatgctcgaaacctatctcaagccacggctttgattggccattgtaatgaatcactgcagctttcttcgcattttctaagttggtcttgctctgataacctaatccaagcatatgccaagaggaatctattggctgaacatgacctttaaatgctattagagcaggaggcaatgttccaagtttccacattgttagattcgacttcagattctgcacatcaaagcaaaaccagtaagcatgatcaataatttgccaatttcgaatctaaaactcaaaacattacaggcttctctgatactttacctctttaagccaagaatgatacgtttctctgatatttgtcttcctccaagtccgtagatcaaagatattcattccataagcccaagcacattcttcgggatctaaatgctttgcgatgagcgggtgagaaaaattgaagtagttcctaagacgctttgacataacccatacgtcttctcctcgacaagtctccacagctccattaaccttcccgttaaggtcaatatcccaaagcggagataaatctttctgtatcactatatcatcatctaagaacactaccttgtctaagttcggaaaaagctgtccaaataggcaaaaaaagcaagcattacattcatatcctcaatccgaacatttaaaataaaaggacagaaattttcatcctagacctacttcatttttacgaaatggcaaaattttgaaacctatacattaagagccatatagttcatttagacgagaaaggcgaactttttgaaagtaaaaggacatattttcttttacctctggtagatatattctaagatggttgagcaaagatatgtatttgggacttcttgactgcagtttcgaagcaaatgttcgaggggttgtttcgctgaggtttgcaccagcaatatgattcccatggtaataatttctgatactgttatggctttccacagcttcaagaactggaacattctctcttgttaaccaatcaaactgatgaacgcttttcacttcaacaatcgcaggagcaacagaattgagtgcaaaccaagaatgcatacccgcataggttttcttgtctgtgataacatggaagacaattttctcgggttttgaagatgattgaacagcagatgagaccacaaccgatgcagctaagatattatctgtagctagaacaaaatggtggtaagcattgtctgagagaacagggagaagctccggggaaggaagctgtctccgggcatgagcattggaggaatattcatcggttagtcttaaagagagacagtgaattccttttggaattgaacttgcagcaaagtgcttgttcatgagttctgcaaatttggattcccttaaatccctttcaaacttctctacctgttcaaaaagagtaatcaaatcaaatataagtttcggatcaatctacaatttaagcttttattgaagattagagaatgtaccatagctcgaaatacgagggcaaatgttttagcatcatagtggttgttcttcatatccgaaaccagttgactaaaagactctggaagctttaaaccatctggaatttcttgagtgcttacttcatttagaattttgtaaaaatctctaactagtctctgctgcaacagaacgtgtgaaaagaaaagaaatccggacttaaacatactgatacagagagttttagatcataattcaaacacctgaaaagaagcaatcactcacctctgaatcatctatcctaccaagaagacgtggtcctagccgcctcccgaaacaatctgagcaaacaggaaaaaaggcaagaaagtttcagctcatcatcacatgagtataacaagggatttgggttgcaaagctaagcatacgaactataaaagtgaaaaaggaacaactctaagattcatctcatcagtatttggttctgatctagtaatactgatacaaatctgtaatttttagttcacacaaacacaacaatggaattctcaaaaccttaacttgatagttgaacaaaatgccattttgccatgaaatctgagctcgaagcttcatactatgatacaattgtaactcaactgatacatattcatggataccaaataagaaaaattcaaatgccgaaactttgttgacttcaacattggatccaaacaacttaacaagatgcaaaatacgtagctgagcaaacaacatttaggtggtagatccgacggaaacaagtgcacatcaacaaaactagaatgaaactagaatgattgaaggagaagaaaagaggggttaccaaaagaggagcacttgttgacaccttcaagggtaacaacagcggttaggatgaaaacaaaaggtaacaagaaagcgaggattaagatagtgtggaagagagttcggtaagagatgtgacgagctgcgactttgatcttcatcaaatcaataaactcattgctgctcgatatcgtaatgcttctcatgctaggcgatatgtgaagctgcatccttgttcgtgcagccccgctgttgtattcagatcaatcgaatccaataaaaccctaattccacccaatccccaaccaaacaacatcacctccctacgcgattcctcttcttctccgatctcgatgattgcttttcgattctcgatctagtcgtagctcccaaatccgatgatgttagactccgattcgctcttcttataatttgtagtcttctctcagaccgcatttggatttacgacaacccagcaaaattctgaatttgagattcccgccgtctctttgattcaagaaattcgatacgagaatcgaaatgggttgtcctccgaattcgtgatacaagcaggatcaaagacaaagcaatgagcttgtcaaagaagaagaagaagacaaaaaagatgagaggagaagaagaaaaatcaagccttttttttccttaagtgatttcgccggtggatctaaacaactaatgcacgcacagccgaaaaaagaaaagaaaaaaaaaacgtaattaataaaagatctcaattataaatgggaatcaaaattttaattctaatgataaaaccgtgtttgagattggtgtcttgaccttgagtttagggtttttgtatattgctaattatagattctttccgactttcatgcccaatcgaatagttttgctctttttctttccaaaaacaattatctaattttgatagaaagtttgagaaaatatagatagactaataacgtgcaaatttttcagaattctgatggatctgatattcctataattaaacttgaaataagtgtttttgttttgtttcttatcgacgtaaaatattttcttaacagctgttttctttacataaatagaaataagtggctgcaaaaagaagaagaaaagtatacaattaggaaactctaatattatttcaacacctcacaaatatttctgaaaactatcgtacgattatctttctgtcgtagtcatttaatatacgcaagaaaggaatgtgtatttagtttcatttataatgaatattcgtcatactaattttgaaaagttttaattttaatgcgaagaccaaccgacacgatatgatacggtcaaaaaaaaaaaaaaaaaaaaagatactgtactttttccagtatgatctctcaacttaaagttgcaatatcattaccaatatattgtatagttgaatacaatttagaaacgatttacgagtttttatcatctgatttgtttatgattgtattcggctcctcaagattttgttgtaattcaaaatattagtaacacattcaaaatgcacaaacttaagggaaaaagatttgaaagaacgattaatgctaaaaccataacacagctacaagttgctgtacaactttgaataccaaaccatttgagaaaaccaaagacgaaacctctctacgtatgaaaatacaacaagtcacaactccattagacaacaacaacaacaaaaattccaaaacttcattattcattagaggggatcttcttcttcagtactcctgctcaaatattccactagtaaccatagaaacatccacatggaatctaaaggtctctccatcatttgctctcgtgtggtgacacttcttgtaacctcttaaagcatgtactgacctaaacagccttcagcaaactctgcacttattgtcaacgtcactgaaccattattaatcccagcttcagcttctatcgattcttctctgcatctcttggtttgacttttggatttgtttctcattctatggaacgtctgatgaccaccaagagtttgataagtcgagaaaaccttgtgacagagcccacaccgatgctctatattcatctcaaatcctgatactgaatcttcaaatgcagtttcttgacgaacaagtttctgttcgttatcagtttcttctctaagtattcttgctccagcctgtttctgctgacccaattcatcatcttctctgcccttcttgtttgccaagtaacccgaaagctctttcgatgttccaacagatgctctgcttatccccacaagtttcttctgctcattactcaaaagcccatattcaaagtctccatcttttctcaaattcacctctggattcgaatccagagcttcaccaacaagtctctgctcatttctcaataacccgtcttcaaattttctctgagtcgaacccagagctttaccaaaatgttccaaaccattcacgaactttccaccactcatggacaagagaatcagagactcagcgacttctaataatcctccatcatccacagaaacaggaaacatagtacacgaagaagaagaaacagagaatcgaggaagaatcttcttgtacctggaaactctcttcgatctttttctcctctgcacaatactaaacctacaaaacaggcttcttcttgtagattcttcagaatgcgtcacttggagatgattaaacagacatttctcgtaaagaaaccctttcccgcattctttgcatcgaatcaggatctttttatttctcctcctcctcgtacagaatcgatgatcgagtaaagatttctgggttttcttcgggttttccctcaatccgtagttgcaagagagctcttcgtaatgattcatagattctctgaagccagtcttcttcatgagatttctcgaaactcgagaggttctgagcttcttaggacggaattcgaagatgggtttctcaaattcttgttgttcttccattaaaacgaagcttgttggaagacgagatgattggcgaagagtatgagggtagaaatagttgaaagaatcgatcttccgttacttttctcgagaaaacgcaaaagaaatcgccggagactgagcaataactgttgagcaagagtgatacgtaatgctctgaatcaatcggattaagaagaaaacaaaggaaatttttggtttttcgtagttctctgggaaaatgagaagagaggtagagagtgagagcgagcaagagagaaagtggaaacagagagatcaataagcactgagagaagtgagagcagctacggaagaagaaaggggcactttcgtaaattgctttgcctataagaagtggaggagaacttttgtttcagttagaaggttcgacgtgacaaatggtgactgctgtggcaaggctttgggcttttcatttgttaaggcccttatttggtgacttgatcttattttgtgaatgttcaggctgaagcttgtgtcattataatctcacagctatgtctaacatcaaatgatcaaaattatcaatatcacagcaacaaattattccataagacattgaagaggaatcatcacaatgcagaaaaaacttgggatctgggtcacatgctcagctatttttattcaaagcacttaaataaacatttgaaaagaagagaaaaactaaaacaaccaaacacacctctctttgtaagtttgtgtaattcatcatcagcagcagcacaatgcggtataagtggaatcatcaggccttgacggtttcttctgcagcagcagcattagtctttgcttgcttctccttgtagtctctgaccgcggacttgatagcgtcctctgcaagcatactgcaatgtagctttaccggtggcaacctaagatgcttagcgatttccctgcaaatttaagaatcccaaaacaatgactcattcatcaaaatgttaaccatatcactagatttgggatattccaagcactagaacagagttagagataacaatcctgacgatatatctaagagacatgattttgatggttaaaaggcacttacgcgttcttgatggtcataacttcgtctaaggttttgcccttgatccattcagaagctgaaccaaacaaatatacaaattataacctgtctacatctacctgactctgatcatgagcctcttaacgaatcgatcaaaattgaaaaccctgattcgaaggcataccaacggaagatgaggcgatagcggagccacagccaaaggtcttgaatcgagtatcaatgatctgacctgaatcatcgaccttaatctggaggctcatgaggtctccgcaggcaggagctcctaccaatcccgtgccaacgttagggtcattcctgttgaaggagccaacgtttctagggttttcaaagtggtcgattacattctcgtggtataatcgacgacctaaccctagaggagacgcctgtaaccctaggtaagcctttctcgacgtttgccttagcatcatcatattctctctttctctttgccggaatcaagggcagttttgttatatatgcgatgtcgaggggacacgtgaacggtgagaattataacaaatattggaaattaatcatctcttttattttccacgataatcagtaatcagaatcactaaaagctttatatatgaaaatgtagttagcaataataaccaaacctagtctcttgttctaaccaacataataagtataggaaaatatctcgtcaagaagaaacagaacaaattatttgatataagcaacagagagaaaaacaatccaaatcttgagaaagggcaaagagtctgagctaagcaagagcaggcatgtgccactggtccaacggcttaccaatagagtaaacaataaaccctatcttcctcagcttctctgcatcaaaaacatttctgccatcgaagacaaacgctggtttctgcatgttttcaaaaatccgctcatagtcaagcgtcttatactcgtcccactcggttaacaagcagattccgtgggcgtctttggtggcagcgtaagcgtcccaagcaactgagacttgtttcacagtggttggactcatgggttggaggtgaagtggatggtcccagtcgaatgtgttcatggttaagtctctttggatttgttcttccgtgacttgtggatcatagatgctgattcgggccttgtctcctaacaaacctttgcagacgtcaatggctggagtctctctcgtgtctttcttgaaggcgaactcgaggacaacaatctttttgttggaaacagtattgaacatcgatgagacaatgcggttcacgaaccggtttttttgtataacaatcatttcagatcagtttaacaattgggtttgggccagcccaaacaaacatattagattccagcattaaactaattttttttgaaattaagcaattaatcgtagtaattacgaaaatccagtaaatgactgagcgagccgttacatacaaagtcgagagcttcctcacaagtcgcaacggtcagacaattccctcctctccctctctcttcttcttcttcccttcactcactcgaaaagacaaaaccctaatttctcacatttttctgctctcatctttcgatggagtcgacgaatttgaagaatgctaaacacgagactctggtgatggatccgatcagttttcaatccaaggctcaagaggtttcacgattctccgagaattctaaccctaacttcgtctcacactcgactccactcgagaaatcgagtaaatcttctgcgcagaagaatccgaaatggaagcctaatcctgttccggcggttttctcaccacggaatcggatcagagagaggaggttcgtggtggtgaagaagaattcaaggaaggagaagaatgattccgcgtctgtggattgcaaatgtggagctaagaccatttccaatatgaagaaatgtgtctgtatagcatacgaaactctacgggcgtcacaggaagagttcttcaacaatcgaagagaatccgtatcagaaattggagaatccagccagaatttggaggatggaaatgaacaagtcgaatttggagattctgatgaaactagggtttctttgatgaagaggagaagagaaaaagtattggaagaagcgagaatgagtatacctgaatttggtaaagtgatgcatctagttaaagcttttgagaagctt

SEQ ID NO: 47 - DNA, 140064 bp, Arabidopsis thaliana
aagcttaactaaacataaattcttcaaacaattctccaacgtttactgatatgagttcctaaatgtagtttgtgagagatcaaagctaccttcatgtgaggcagaacacttttttctgcagctttggctattcttatgaaagatgtgcaaatctgcaatcttgcagctctagatgtactagtagctggatcctgccaaagaaacaagctattagataactcatccacaccttgacatgtgcaatgtcaaaaagttgaaaacgtcttatttgtatatacgagcgcatgtatgtaaaataaatacaaaaataataaaaataaaccttcacaacgtgtggaagagaggtgagaagctcaaataatttattgatgagacttccaactgcatctggaaaatacttgagaaagggacccattgcatccagatagtggacatgcactttcataagttctggttcattccatttcaaagagagaagctgctgaagcaatcctgggccatcaacagcacaataccgagtattagtattgtacaagcccagacatagtaaacaaaacttgagaatgtgaataaatgctgcaatataccctcaaatattccacgtaatgcataatgaacttcagaacttccaccagcaaactcatttgatccatcaaaaagcgttgccacaatacagtcaagtgctaattgctggctgtccatcactgctacatgctgagaatgtttttaccatgagtttaaataagaactggatcatcaaagaggcctccatatagcagaaatctaagagtgcatgtttgtcaaaggaagtcaacagaggaaaacaagtgctcgagacaaaacctgaagaggagctggagaagccaataggtgcttaatgagtgtaatcaccctttcagatattttggtactggagatgagaggcttgtgagaagcagtaagcttgatcaattctagctgcacgaaagaaagaagtttctagttaagtgtttttctggaaagtaatacccaatgcatttgattcaggaacatacaagctttgatcggtacgggccaaagtctcccttcccttcaaattcatcactccagagttctaggggcccaagcgaaagagcaattccagtaggaactttttctttcttgagcatccgctggaaagatacgtccagtatagcgctcgagatgtcatcattaataagacttaaagtctttttcttttcactatcaacctggcttgaactatcatcaccgccagttgatgatcccccaccacttggataagtcgcagccttgggttttggaagtaaatcccgcatcagtgactaaaacccaaaaggaaaaagacgctgaaattagcagcaaatatgtctgtcttagaaatttcccaatgaagaaggttggattagagaagaccacataccagccaaaagagaagtgcctcgaagtgaaggcccaacttgaagtgttggaaaaagccaagcatctataccaatacaaacgattaaggcaacataaacacaacatgattattttgtggggaaaaaacactactaatgcataatattattgctaacatgaatagaacgattttaaagttataattggcttagatccctcaaaatatatcagcaagcattcaaaatttagtatacacttggaatcgggtcattcaagaactaaaataatatctcaaacttattctgtttcagaatgccattgcaacacagacagcgggtttttttccaatataaattaatagctccaccttcttcactgaaaacatccatttaagtatcaaaataacacattaaaaatacgagatcagtacctgctgaagataaacagccataacaccaccatcagaagagatgctttgcaagttagttgagcctaaagaggccatactctcacacatgcatacagcaaaatcataatcattgtcatctataacgctagaacttgaggaggatctacataagaattctctggaggcattcgtcagaatctgaaacaaattgctaattgcagaatcgaactctgcagtagaagcatcactgggtctttttctgcagacaagaaaagcaaacaaaaattaaagctgtctattcgtgctcacgtaagcacatcagatcaaacaacccagttgcataccttgagcagacgagtttgaaaacctcacaagcatgaagacggaagtcagaagaagaaagtaagaagctgcacctgttatgagtatccgagcacgtcatcagcaagatataatgcagggctaatatcaatataacaatcttcttaagggtgtgaacaaaaatcgtacccactaagaattccatatctggcaagatctggaacaggagcccactcagtgtatgcaacgatggcattcaagcaagctataactacatctgcatgctgttttgccaagtcaaagtgctgcataccagcttcactcattgcagctccaaagtgtctctcaagaagctgcatttttggtatattcagcaaattaccacagcaacaaaacaactttactgaaaggaatttatcggtggcatacattatacaataaaggcaaaatctcaggcaacgattgagtaagtccccgcaacaatagcctacgcctgtcacctgaagagatgtccaatacagaagttagacaggaggatgaaaagatttataacccaaaaagtgatatgcatttttggattgagtataactaaactgaaaagcataaggtgagcacaaaaaattacaagactaacaaatattagcatacgggtctgtccataaccgattcaatttggcttaacctaaacttcaagattagaaaaagcttccccctgtggacagactactacgaaaataaagtgtatgctaatcgtaaataccttccaagtcgtcattgtaaattgtaatatcttcaggaagccatctaagagtcatcaataccaattcagcctattgtttaagaaaagaagatgggaacactttcaatgattgccgcgataaataaaacactaaagtaaataaatgaaagaacattttacttgtaaggggccctgagcagacaatgaagttaataaagtaaatatctcttgccaacgatcagggccttctcttctaacaatctgcaaataagataaagatatcaatctgagaaagtgaacgggaacaagtagcaatgatcatagcaagtgaaaaaaactcggaccaattagaactcttacctcagctacaagggcagcagactgactcttaagaggccaattctcgcttgcattagcaacctctgacattagttcgatagaaagattaacaagacccctgcactccggaggacttaattcgtcccatcgtagtctaaccaaatgctgcaaaagaaagatagcttcaccataaggtttcttctatgctcttgccttcagaacctaaaattgtgatttataagtaaaagaaaataaaaaatcacaaacctgtagcatcttaaaagcatggagacgaatttctgaagaccactcttttttcacaagatgaaaagaagtctttgccaaaaccctgacatctccagattttacctgcaagtatttttcaaagaccgcacattactcaatcaaacaccatcataacagtgcaccaactttcaacagctaattgaacaaaattaggttaagataataaacaactcttccgacaacacagttttatctttctgaccaaaaaggtaggaaatttccaattagaaccaactcgagctcaatcaatcaatcaaatcagacaaaaaaaaacgtttgcgtatatgttccaagagatcaaatcatcgaaacgaataaaaagctcaattttttaattaaaccccaaagtacaacaaatcctcctttaagcttgatcacaccagctacatcatcattatatgcaacatgcaacataagtacgcaaatcgattacagaaaactaaaagcgagcaaattgagacagaacaaattacagaatccaggaattggaccgccgatttgcgagtgtcggacgtggagctgaaatcgacgacggcgagaatcgctcgagccacattacttgccgtggagttgctatcttccattacttgcgacgaataattaccaaaagtagagattcccacactttcttctgcaactcgtcttgcagaatctctgatttggctttgggttttggggtttagagcaaacgcatcggtagtttcttaatagaaactctaactattaaagacaagaaaaacaaataaaaattaaaataaagatgagagagaatctctaaaattcctaaatcaaagatcgatcctataaattcacattagtggtttgcatatattaaataaatagaatataattataaaattaaaatattattattttttgattttgtagaaactttcacgatcctaagcgttggagttgctcttatgtctctaaattaataagttttaggtctctctatatacgaaagctacgatttttattggcatctataccaatatacatattttcaatttcaaaaacatttatattacgtcaactcttacaataatgacgtaggcttctagaacaataaatataaggatcaaataaataatttacatagaatgtaaattaattcctctcatttctgtgttttgtcaattctcttgtacaatacacataacaaccaaataaagaacatataacccaccaaaaagataaaatttggaattttgtttttttctcaatctatcaaaaaggaaacttttgaaatttggagatgaataataattattatctcaaacaacgattcttttgcctttgaccttagaagccattcttctctctttgttaatatcgtttcttctccttgtggttgagtcaggtgctccaatgggagccaaagggcctgaccaagtttgaaatggctctttggagtatgatgatgtgaatgagtttgtgctatacggtatctctgatggatccagtcgccttgaagatcccacctgaaaaccgagtgacccgtcttgatgcggtggaggaaacttctcgctcttgctctttgcattcgcgtgtgtgatcatacgcatcctctgttttaagagaacaagttcaaagtactcaagacattaaccaatcaaagattcacttctttttttgttttaaattcttacatcaatgttagactggttctcggcgttggcttcaggagccggcattgctcttggggctcgttctcggggtctcattcttcttccgctctctccttgggccttgcgcgcttctctttgtctgcagaaatgaatacatctctcaagcaaccatataccaaaccaaaacatattctgactaaaactgagattgtaccaaacctatccatactagaacagaaacgctttacctccgatactcttcgtctcgtctcttggcatcaatctctttacttggaggatatttcgggagatcagaaggttgacatgccaatggctccgtcgtgaagaactgcacaacaacaacaacaaaatcggccatggaagttttaaccactatcaagtcacacgcctaaagattcacaagttccaagcatttttcattcttagcgtcactctcatttctgtaatctaacttgatacccctaactagtttgttctattcaaagtttcaaaatttccattgcaaaaaacttacatcactcatcaacacatctgtagctgtctggcgttcagctggatcgagcgctagaagcgtatcgagtagagaaagcgcctcaggagagaaatctttgtaaacctctcttattcttctcttatactgtggtaaaggcttgtgatgagcatgcttatgagtagaaggaagtctaatcttcttccaatattcttctgaaggcgatccacataacttatatatcctatgcaactgctcgacctgctcgtgaacattaagccagttcacatttcatatgaaataactcaaatcggaaagaaaaagatcattacttgagaactaacctcgttacgacctggcattatcgctctaccagctaataactcagctaaaatgcaaccagcactccacaaatcaactccgacactgtactcaacaacaccatgaagaagctctggtgatctgtaccataaagtaacaacccgattcgtcatctcttgcctcttactcgcatcaaaaaacgttgcaagcccgaaatcacctattctaagaactccaccgtcatctataagaaggtttgatcctttaatatcacggtgtagaactcctcggttatggcaatgctcgagccctgaaagtagttgcttcatatagcatttaacctgaaaacatagacattattaacaaggttaggatctgcctcggattttgtatttgtgaatctatttcaccaaggcctaacctgttgctcagtgaattttatctccgggctagcggcgagaccagctaaatcatgatccatataacggaaaaccaagtataaactactcgacatcctcgaagtaaccaaaccttccaatttaatgacattaggatgatccaatctcctcaaaatcagaatctctctagccataaattttaaactctcccgttcattaacatcacaccgcactttctttaaagccacaatgtttcctgtcagcgaatctttcgccttgtacacattactatacgttcctgatccaatctacacacacacacacacataaccaacaaacttcaattacccaaaatcattgcaaagaacaaacaaaaacagattttgatctcaccttatcaatcttctcaaaggaatccgcttttcttggaagccatccgcttaacgcttccccacaaacttcagacaaccacgagggccatccagcagcaacttgctcaccgagcaaattctttggcgggttgctccgtctcgggtcaggaggcttagacctttttctttcgcctttcgatttcctctccttggcctcagtcacaacaaagccattctctttcttctgatccacaacatcttcatgattcctaacttcctcaccattagaagcagaagcaacaacaacagcactagtgctctctgttgtttcggttttggtcacagacacattgttaacttgatgtcgattagactcaatcctagtactaacttcgtctctagacccagaaactgatcctgatgatccgggtcgacccaatacacaacccatctcatcaaacaaaccttcatttgctcaacatgtttctaaaagagagatctctgactcaatcaaacctctttgaatcaactttgactgcaacacacacacatacatgaaaaattgaaacagaaaaaatcagaaaacaaacaagaaaattgattccaactagaaacacatcgaagatcagatttgactaaaacaggagacttagagaaaagggttggtgaaatttacttactttatgatcgaggagaagcgaaattctggaccaagctggtcaaatctgagacttgaacagagaaagaaaattaaaccctagttttaagacaggagacaagtcaaaggaaggtaaagatctgaaacttgtttagaatttagacacaacacaaagctgactcaaactcaaagagacaacgaaaataggaatgaaatgagggatgatttcaaaaactccacaaagagaggcaaaaagataaaggaaaaggaaaagaaatggagtccaagaagattttaaaaatgaaacctttaaagcatacacaaaaaaagaagaaagaaaaatcaattagggctttggagaaaaggcaaggtgatacatacacatatacaacagagtcgtagaccaataataactctactattgtttaagaaggaagaaagagaccaacttgggtaaaaatgtctcaaggagaagaaggattcgttgaactgctcttcgaattttacttgaaaaagaactctctttagttttctgcgaatcagacaagaaaaaggaataaatagaaacagacgaagatctgttggctctttgttattattattattatgtgtaagtaattgtttttggacgcaacaccaatacggtcaaaaaggctcaaagttactactcttcttcagcccccaccaacttaaaaacctctgagcaccattttgtactcatttcttctctcttttctctatcacaattttcaattttaaaaatttgtggagtactataagtctataaagtttgggggagattttaatgtgtaagaggtccaatggtgttaaagaagtggttttctcaatgacattagaatattaaaactgatctataattttgttggtcaaaaacaatatattacttagcatatgtaaagaatatttggtatgtacccacctaattttggaatttattattaaaataaacactaagagttttttttaatattaaaataggaattggaaaaacaaataaaataagaaatatggtatgtaatgagagtttacttcatctatccaatcaaagaagctcctttatcaagactctattgtaaaccaaacaaggaacaaaagcttaaggaactaatgatttacgtctgtcctttagaattagccattttatttcttttatgacttaaagctacatatattatctatttattcattcattcccagcattattgctaactactatgtattcttgtagacgatatactaattttattgacctcattaatttgattaaaatcttgccagacaataaccaaagataaacatgcatagtcaacaaagagaaatacgatcatgaaaaagatactaacgcctgtaaaaaatctttaaaatcaaaacaaaatcaaagagtattttatttggtgaatctacagacacgtttagtagcaaaaaactatttgattttttcagaatatattatttttcttcaattctttcctcttccagatatatataaatcatgcaagaagaatattgtacaactacaaactataaattgaaaaaagagttccaaaattaataatctagagtctggaaggctagaacaaaaataaagttcgggtgaaaaggatttaaatatgaatccatcattcaaaatgacgatttcagaaaatttaagtttcatcttaaaacacctattcctctagataaaatgcaattcaacaaaaacagttattaatcttacactcaagagatttctcaaaatcggtttctctccctcagtccttactcttctttttcttctctttcttatccttcttcttggctggtgtctccgttgtttcttcttcctcatgctttctcttcttcttattcttcttcttctcctcctttgcaacctctactacggcttcagtttctgcttcagctttcttcttcttctttttctctgatggctcttcctcttcgggtttctcttcttctaccttcttcttctttttcttatctttcttctttgatggctcctcagatttagctgaggtttccccaagaagagaatctgcagcagtgttgtaagtctgcacataacaaaaaacagtcaagatcacttcatcataatcccaagaacaaagacaatatgtacacacatccaaaattagaagaaaagatgatgaatcaaaaacagagagaatgatcgtgaccttagcaggagtgataagaccgcctgatcccatctttttatccttgttatagacttcaatcttaggtttgcctttagatgaaccagacagacgacctaaatcttttccttcaagatttctcaaccgcgcttcaagctgtgagtttttaacacatatcagaaacatcatcagttaagaaggaggaaaaaagattgttcagagagataccaacaagaggaaagctattgaagaattttgttaccttagctcggttttcaaggcccatagtgttatcttggctatcaccaagagcatcaaccctaatagcaagaacagttttagcagctaaagaccgcgagatctttcccttgtgctttggtgctgcttgaccaaccagagatgcgtgaaaaatcaaaccgtacttgggtgtggcgtgttttgtcttaagagctctaaagagagctttttcggctccgagtatctgaaccgtgctcccaggttgcttggagaggttcaataaactacctccatgggaaataagacgagcaccaacaagctctcctaccagggcagtcagattgggagcaatagtgttcattctgctctttaggtaatcgtaaagctgagctctgtactcagaaagagagagaacctggtcacagagttcacggatgtgcaacaagtctaagtcactgacttctgttcccatggatatcacagctgcgtccttaagatctgcctcaatttcatctgctaagatctacaatgaaaccagaaacaggagaatattaggtcgttaatcaaggcgtttgttcatggaagcctctacacagtttacaaaattgaaagttacctcggagaagtctagcttagcagcattaactcggtttcccatcaatttaacagatttggcatataggatattgtctgatatgatcttagcaagctcgggaaaatgccatccataccattctctaaccctcatggcgtatgtgttcagctctttgtcaagatcatcaagcagaccaatagcttggataatcatggtatccacctgacaaaaactaaacagttaggagatgcaagagaagcaaaaacaaacacaggaaacgtttaatgtcggacaatcaaaggctagttcaatacagaagttccataatttaacacaagttagcttcgatcaattaacaaattcatatacttcacatatcatatcaccaaataaaaagaccaatacaattagtcaggaaccgaagataccttgtcagaactaaactttagcttatatctggcgagactgtgagacagacccaagctcataggagccaagtcttgatcacccaacccagatatgagttcagtaaactgacttctaacaccacgtagaagctccataacagcattgttgtgaatgcaatcaattttctgtatgaaattaagaactttcattagaaacaaaacacagagcagacaggaatatgggtgtaatgatgggaattacaaaccagtttctccttgataacattcccaagctttgaatcagccacagccaaggtttcaccttgacaattagctttcaaaaacttgcgcagacctttgcttggagctccctccagcaatttagccacagcttcgagagcttcagatgtattgtcaaacttctcaaaagcttttagcttaaccatctggtacaccaataaaaacatatgagaaactcaacactaaatctaattttagatgttctgaaaccacacttgatgaagaagcaaaaaaattacctttcgtgctgagtctggagtgtcgaactctttacacaaatcctgcaaaaaaaaataaaaaataatccatgaatacttttagagccttaaggataagcaaagagagtacaaaagaatgaagagaactcacctcgacgttagccatctttccttcatctttaactttaaagagggcaaaccccgccgctgtctcgtatagcactaagaccatcttcacaaaactcttaagctggacctgaagagaaaattaagacaacacttaactcagaacagtaaagatacgtgtccgagtcacactaattaaactaaaagttcgttttgagattaaaaactagcgagaaacagcattccatataaaccctaatcctacttttagatcacataagaaatacaggagaagaaaaaacagagagataaactacaatagccttaaaactctgtccgagtatgagtattcgaaactccacaatctccagcaagaatggaaaagtgaaacaccgtgaagagagaagatgagagatattaaatacctgaagagttaatcaaagcagctgcgtgagagagaggaagaagatgaagacggagacggacaatcacttagggttttaagagtgtgttgttatagcagttaaagacgagccgagccttcttaaaacgccgcgtattgtaaggggtatttctataacttccatagttagggtttaggttttaagattaatgggcctgactgaatggatattttaatctggcccgtttataatattaatacgtgggcgttttattgttctcttcccccttaatagtttttcttttttaatccctttgtttctctgtggtattcaacaaatttgtctcgaatttatagagctcgaagcttcaaggtacggtttcaaattttctcgttgattttctgggtagatagcgttttccatacttctcttcaactttatttcatagtatagctctgattttgctaaaacttcatctgattagttccgtggatcctgaaaatcacgattttgcgtgttgtttagggttatactctgtagttgtgtgattagtgtttgaagaagctgggctagtgttcgatgtttacgtcgataacctaattttgcaggaagttataatggctagtgaagatgaatcgattgaacaaaaagctgctgctcgtaaagaggcacttaaagctctaagggcagctcaggaactgtctgagaccaaggaagacggagaggatgaagctgtcgaagaagagtgagtttgctttgttctttgcttattttgtttgtcttgactagcacatggagttgttaatgttgtgtgttggctttagcataactaggagcttctcttgtgctttgcttctcgcctttactatcactgtttgtgagagaatcaataatggtgctcttgcagcatctgttacctaacaattttttccaatttcaagttgcattgttgtgtatactttgcttaggtggttggttttgttgattgattattcgaggtagattccctttttattcatatgaattgtctttgattttacagtggtccagccatgaagtttagaaactatgttccccaagctaaggagcttcaggatggtaaactagcgccaccagagctacccaaattcgaagatccgatcgttgcacttccacctgctgtagagaagaaagaggtgtgtgtgacagtttttcttttctctgtacaaggatcaccaaaagcgactctgtttagcattgttgtttcctttacttgtgcctcttaagcttacaaaaaatgttatcattgtaggacccatttgttaacatcgctccaaagaagccaaactgggacctccgaagagatgtgcagaagaagcttgataagctcgaaaggcggactcaaaaggcaatgcataaactcatgggtaagtggcaactgtatctacatactgatatcttctatgtaagcttgataattaagacattagtctgtggttcgtgagtaagtgagtaacatttcactgaatctgttggtagtatgataccaaatcatagaagtccaaaatagagtgatctgttggtgtttgtttattatggaactaacacatgcactttcatcatctaattgcagaggagcaagagaaagaacgtgagatggctgaagctgatggtaacaccatagaaagttgaaacccaacgacgtcatcaaagaaagccaccactgaacagtatattctactcgattttgtttaactgttaaagcattcgaagtgagtagaccatgtaaaatcctacagccattggcatagacatagtaggtttatcttcttgtgtgaatcaaagaaagtcgcaatttatttccgagtagaattaagtgcggtccggtttttctctaaatttggttcaacatcggtggtaatctagtttgatcattaatggaactgcgttttttggtttgattcgatttactgtggtttgataaagacatcccaaactagaaaccaaagttttgattcgggctagacgggtttagtttggagtctgggaaaacaacacagagagcttctaagacctttcttctcggcatgttgcttccacagtgggatgatggagtttagatacaatatttgtttattaataccgaacaatcaaaaatagatactaagtttttttgttttccaaagctcaaacctaatgtacaaattcagtaaagctttcgacaccatctcacctaaatatcttggacctttattggtgcccacttctcatgaatccaagctccaaagaagagaagctaagtaaacactaggccaaggtaaaccaagatatatgcttttcgaaggaacaagcaatgaaaagctatagacttccatgtgattaaatgcaccagcagacagatcccaatctgtagagcaataaatgaatatggtgatattcaatttcaaggcttcgatcaacataacattattgttcctatcatttgtttcaaaccaaaaagagcaatctacaaaggctttggtatcaggagttgtgaaaaagctcacatgaaaaatctaccaactcaagtatctctatttttctttctgatgaaaatacctaatatgaaatcaccttcccaagtaaaaactgtcaagtagatggagccgctcaataaattttatcttgacaacacaccaacataatgcattaccacaagttttcacctttttctaatattttacctcaaaagttatctagctatagccactctgtagttgagaatcagatcctcaggtttcttccatacatatgcccgtacagttgctaaactcatatctggagataagacctgaaataatcacagagaaacagctcgttcagcctcatactgcaaacagttaattgaaaccagaaacagggcaatagttggatctcttgaagtctgacttgcctggctattacataagatctcaatggaaggtctaagtttctgccaaggctttaatccagactgtaacaatccatttcctgaaaacagtggctgaggttgtcctcctgaaacacttgctgcatcaatagctagactatccaacggattgtcaaggaccatcttttccacaacgtaattggtaacctacatagacatttaagaagccattgaataacagagagtgcaagcaaaactacaacttaaaattacagataaatgcaccttgtgaactcttaagatccggggtgcactaagtttccctagtgtaaccacctgcaccgatgaaccttcacatggatgcaggaagaagcttaatctgtaaatttgaagagctttcaaagtcagacattttatgaaagaagttttatctatttataaaaaaatgtaaaaacatatgtgatgaaattgctaaaagtccaaactatttttttttttagagaacaaggtactgccgaatactttgtattttctctaggtggaagccgattgttcaagacagcgtccaagcaccacaatgggaagtccttctcatcttcagttccagtaaactcggttatcttcttcctccatggtcctccttgagaaccctcagttatgatggaaggaggggagacggaagaaaactcgaatggaggatacaccggatcacttgcagcactactctcttcagtttttgatgcacttagattttttttggtatcttttacagataaagtatctccagaggcaagaacttggggttttggtttgtgtttcttctttgccagccagtgacccagcaggcctttcagtgtttcacgagctagattaatctacaaatcacaagatccaatgacaaaattaggtttactttgactaggttagagcaaacgaaaatctaaaatattcaattatggtgaacagattcaaatattaattgcatacagagatttattagtatatgcaacagtaagataataataaaatatctgattagattcaacataactaaaatgcaggcaattaatctaccttatcatcttcaggtcgcccagaaactttaaggtctgctgaatacatttcagcagagaagcattgtggagtctccaaatgtacagataagcatccaagtcgtgtatccacagtaaaccacgatggaatgcttacctaagaaagtaatatgagcaataagtaaacaaacctgctagcctcactaacgataaataaattataacctttgaaaatcgatcaagagacttaccatctcaaacagttcttctttcttctcttcaaatgaaatctgtaacgatgggaacagatatatttctctgacttagtacttctccatttgcgtttggagttgaatataaataatattccagaattacagcggcagatacataaatcaaatatcagaaactcaaaaaagatgtctatgttccataaatacctttccatagtcctctaccacaacacccctagttatatcccatagtttcactgagccagctgcgtcctgcaaaagaaaaaaccaaacacatatcattgacccctctacaaaactatcaatggtggtctcttacaagagcattcagagaaatctattttaccttggttaaaatttgccttttattattcaaaatctcatgttgcacaatcgggtgagttcctgggacagttattgacggctccttgtatgcaggggcctgcagacaagtgaaagttaaccacactgaataaaaaaaggttcaacagcagcatttacaggaggaaattgttttgcttactggatttagtccttccaaagataccctcgccctattaaaagacaaattcccagccaagaaggagccacctcgttgaaagaccgttttaggactctgtacttcggcaggccatctctctacagaggagtctgtagttgcaacccatatactattatcttgcaacgctaattgttgaattggatgttccttagtgcacagcaaaacactctcccttgttgccaagtctgtcaagtataactgacggaaacataacagataaatgaaattaaaaaaggaggttatacgctggaagaaaaccaaagaaagaaacaagtttggtgtctactcacacattggtctcttccaccgctataaacatgactaaatgatgggttgcatgcaagcgcccaaacagaatctgtatgcaccgcataggtatgaagacatcgctgctgacctagatcccatagtctaaacatgaatttagaaccagttagaactgaaatgattcagctatcatagttatgtactagttaagaaaaatacagaccttatcatagaatcagacgacccagacaagcaaaacctgcagtctcaaggtgagaaacacgaggaaacgcaagtaagtcagagaaaaaataggtaccaaaaggccccaaaataaaccattgctggcatgtacaactaaaaaaaaaaaaacaagttacctgccagttgagtccagaagcagcactctaacattatctgtatgccctctcagcttcatactctttgaaccggttctagggtcccagacacgtaaaacctgcaataaataaaaaaaacttagttttaagaaatcaaaaacccaaaaaaattatccgttgttgttctcaggtatactctctgcaacttgggaatgtacgaataccttttctgttccaccagaaacgagcatcgttccggtatcattcatcgccaaagcatacacagactccttatggcctttcgcaattgttggtgtgtacccatgagatggagatgactgcacagagatattgttgcttgaaccaacagttcttaaacttgtaacaggaccatttgcaccatttgaagaactatcttcattagcgtcattaggtttggtaactggtgacaaagcagcttcaatatcccatataaaaacctccccaccaaggccaccagatgcaacaacattattctaaaagttgtgaaatcaagatagaatcagaatgcgacaatgagaagcacatatatcctcaaaacttgcaccaccataccaatcaatttttttcagtgggaactataaagaaaaaagcatgacaaatgagaaattacattttttgccgcaactgccaaacaagtaacatagtcagaatgctgacggagagtcctcgtacagactccatctgataaaccgtcccatgtctagatacaaaataattaagccgcatttagaaaccaatatggaattacaaaaacaaaacaaagtaaaatattggttcggctagcgaaacaaattcacaaaccttgaccgtagtgtctgaagaacaagaaacaagagtgctctcaccagccagagcagcgtcgttcacctgaccagtcaacatggggtttgaaattattagatgcacaatagaacagcatccacctcaggaaacacaggatcctaatcactgatcatccctatacaattaaatttcagtgtcaagaaaactatatacccagtcaacatgagactcaaatgtagctgagcagaaggtcgcatcctcgtcaaatgcccatctcttgagtgtaccatcacgacttccagtgaagaggtagctttgatcattagaaacagacgacttcaacacatccaagcaatttatgccagcacaatgctgcagcttgcaaataacataagaagaacatcatcaggattgagttgagaaggagatgtcttataacttcaaactatttcaagtcatgtcttaatgtataatacgaaggaactagaaaataaatcaaacaaagagtaacacaactcctgatggcaataaaccatattggtgtaaaaaaactaacctttgtatcgttggcatcatttaacacataagtaagctttttctctttgcgagtgcgaacagaaccgccattactgccggcacttccaacccggtgcatttcaaattattctgaaagcctgaaaggagaaccacaaaagggaaaaaaccagcaagtgagggacaagcaatctcttcttcaagcagactagttatcatcatcatccaaaacataacaagaccaaaccgaatattgctactaagaaaaagctggtagtagtagagtgataagaacctaagggacagacatagagatccagctgagagtaagattctttctcttcacgagaatctcaaatattccggaagaaaaaaaatcaacaattatccacatcgaataacagctgataagctcccaaaatcctccattgactcatcaaaaggaaaatagtcggaagaagaagatcaaaatcaaaaggccacactcaattgagatagattacaaaatcatcatcactagtcagctataagaagactcttcagttttgatccatacacagtacccatcaccattgaacatatacgattaattcaactacttgctcaatttctaacaggagaacaaaaactgaacaataacaacaacaaaaaaaaagtggaatcagtcgtgtacgaaatcatcaacatacctttaaaaatctcaacttcagatgaaatcgatgatagtaacaaggtgattcagcaacccaaaacacacagagagaaaccctagaatcgctcgttgggggcgggagtgaataacgagatttgggaatcggattgatctagaaagtcgaaagtttttagcacaaatttggaaattatgagcaaaatttaatttaagagtcaagaaggacaaacaaaaaagagcagcctttttccaaaggcgtgatggcgtttggagaattggaagaagaagacgaagaagaagaagaaacaaaaaaaaaaaagtgtttttttttccttaagaaacacaaactcttctctcaaaggctctcgagcgagacttggtaaaatcagcccatagaggacaaaattgcgtttagtaaataaaatcgaaatagtgtttgggattggataagattatatcaaaatcctcttgtattttcttattggataagtgacataatttttgacctcacacaaaaattagctattgagatttaataaatttatgctaaaaccacaaataatccttaacaaaaatttatgcattttcttttcatttgtattttagtaataatcattcacttgtttaaagtcacatatattcttctaattaacacatctcatattccagctaatattgttagaaagaaaaaaggattacttggttgacaaaaaaaaggaaaacttttgacagtttaaccgttgatcgtgcaatgaccatgtttgattagagtaaaactaaatattgacaatactataattggtaaacgaactcatttccactcactagtttccttaagcgaccagagacacactgagatctctcctctttctgtcttcaccaatggcgttttcctcctcttcttcttctccggcgatgcagaaaggaatctttgtctccatgcctgtacttgttctcaccgtttcctttgtagctgctgtcttcttcctcctctcttcttctttctcctcttgctcctgtcctgaagctttatcttcttccccgaccgacgccgttgaagcttctgtcggtggaagcggtggtgatgtgagatttgaggacaggatatctccgacgcaggatgatattgagtgggttagagatctgattagatccaacggtttgcatatgcagaagaatgagcttcgtaaagggattaatcctcgcactagagatcaacaacttgcagatctgatacagtaatcaccttctcaaaaaatcttttttttttacttcctctctattgtctgagcttcaagctcctttattgttggaaacttgagtggctagtaattgtcttcaggttccatttgatgttagcttagtgcttaaagtttggttattgctaaatccatctctaaatttcggaacaaaaagatggaattgaagatatatgtatgtgaaattcactagctatatggcttcattcctctttaagtgattagaaagtgacattgttctcagcttttgaatccatatctgtgaggtaatctgattgctgcttaaagatttagctgtggattgtattgttgttatagaattgtttcatcaatgtaggctctttgatgagatcctattacgttctgctcttttcttgattcttaatagtcactgactttgcttaaccagtagttaaataatcatttcccgttctgtttttataatctgaagacttgagctttctctgtgttggaaaatcaggtacaagggtatatcccattacgaaggagatgaagcaaacaaccacacagctcttccatgtcctggtgagttactagttgagcagcatcacagcaactatggtgaaccttgggcaggtgggcgcgatgtattcgagttcttagctgaatcatccagtcttaaaccaaactctcgtgttctagaaattggatgtggcacgttacgcgtgggtttgcatttcattcgctatcttagtccccaacattttcactgccttgaaaaggacgagctttctctaatggctgctttgaggtacgagcttccatcacaaggacttctacataaacgacctcttatagtcagaggcgatgatatggaattcagcaagtttggttcagatacagcctatgatctgatatacgcaagtgcagtctttctccacatgcctgataaactcgtgtggactggactcgaaagattagtagacaggttaaaaccttacgacgggagaatcttcgtgtcacataacgtaaagttttgttcacggttaggacaagacaagtgttctcagaagctagcaagtttaggacttgagtatcttggaaaacaaacacatgatagcttgctgtttaatcactatgagatctggttcgggtttagacggtttaaaacataaagccgccagttgaagtattatcttgagtgtgtttcgcttttctctacacgccattgctctccattgtctgtagattggatcaagacttgaagaaggttcagaagttgttttggtgaacaaaaggaaagaatctctacaaaagctgtggattagaaagtttgttctgtatcagttactttaatttttgtgtttgtggtcagagagatacatgtattgttaatatacagtagtagccaaatgatataagagatgaggctagattcttttgtttgtaaccaaagacaaattctttttcatatcttaaaacttgttactacttgtttgtttgccagtaatttgacataatctcaacaataatactgcaaaaaaaaagaaaatttcacctgatattagcattcaagagacaaagacatgtcctaaaggatcacagtaccattttctgcaacaagaagtagaaaatacgacatactagaagaactaagaccatcagacccacaaatatagaccaccctcaatctatgacaatggggaattctttccttgacccatctctatcttcaacctcatcagtgttaccacaatcctcactttggttttctgtttcttctgcttcactacggatagagtgatcaggctcgagtgtgcaactggggatagcagcagggatagcaactggggattccctctttctcatctccattcaacctaaatgacggcactctgtgagagaatctttgcatttcctccggtgtgatcatgaaagagatgactccatgctgcacagcttgtttatagaccgatgcaaatccctgaacctttcctaaataggccactccaacgcctagagaatcgtcgaagctgactagaacttccacaaagtcgtacctataaggagtcttgtgctgttccgggtcattgttccagcttttgctccagtctctgaaaagagcccacgtttcgcctttactcggattcacagcgatgaagtgtttgccacgtatgatgggatgtatctcatgagaaaaggccaagtgactttgtatggtatctgtattctcccatttgaacctgccgcaagcagcaagaacagattcctcagctttaggttctaaccatgtcacttgaagactcgactgacacttgttaactttcttgatccgaccataacacctaggcatagagtctataccatcatacagagcccatacttgaccagccatgaaagagctcattgtcttgcggaaatcattgaactctgaatcaacaacacacattactggctcatgatcctcatcattttcaactgtggagacaacaattcttcaatatctttttcatgtgcttcacttatttgcacagaagctgaaagtacagaagccgaatctttttccttgtcttcatcattatggttgcgttgttgtgtaagaggctcagcatccaccgaaggtccatcttgtattgatcgttcttgtacttgtctctgtttcaattccagctctttctccttctcttcaagttccttctcctttaggtcgaaaaactttctcttagcttccacctctctggctaatgcttcttgtatcagttgaaagttctcttctttctcctccaacacaatcgatttctgttggatggtctcattaagctacctaagctcattctcccttgcttcaagttgcttaagagaagtttcaatcagctcagtctcctttctcattctctcagactctgtacagatttcttctgaagaatcttccttctgaatctgctctaaatcagaaaccctaaatattcaaaaaaaatcaaaagaaacgaacaaattagaaaacaatctgtcatgaaaagtaaaccatactcagacattcatgtgaagaaatataaacacacaacagtaaacggaagttttcagagtaagaagaactgaaaaaaaaccagaacaaaaaaaaaaaaagcaaacctttctcgagattgatcttcagtttgtgccggcaccgattccttctccggcgtctcgcttctcaaagtgaaaagttgtggattttccggttccattactggttgctgtaagagttgagtttttgagctctagaaagtagaaagactaagaaagtttgctttttaatttccggtgaacacagagcaattttgaaatcaaatttgaaaataagagagagagatgatgattaattgattgatgtttactgaaaataggaaaatggagggaggaagctcagaaaaagtttgtaacatatatcgggacaaatatgtacgtcaattgatttacagccgttggattaaaatactcctaaccgttggattcctctctaatgattttgtttgaccagactctctaatgactttgtagccgttcgatttcgtttaagggatgagaatcacgagatgccatggaaggggcttggttttcgtaaatggtcacttaaagggcttcataagatgaataggcccattatattttagttaaaagaaaaatagtaagcccaatagtatttttttggtcggagcccaataagaaaacaaaatgtggctagtatgaaacattcttcttgtgaaaaaatttagaaatccagtggtaataattgagaaattgaaagacgagaacaaaatttgagaaattaaaaataaatattgtgttacttggaatgtctaggataagcgaatggtatattttaaaatattaattttaggtgtaatatattttatattgaggattaagtaacataattatatgtacgctaggatgtgattgtaggtttgattttgttcaagatatgacttgttttttgggattaatgatcttgtagattagtcgtatgtttaatgtgaggagaaaaaaaccaaaaaagaaaatcatgtaaatgagaatcggaaaaacatataaatccgagagaatagtggagaccgatgatgatgaatagtcgtcgtaataaataagtgtaacatccatgatccatctactcgtttatgtacttgatctaaagaaacaaaagttaattattaaagaagttaaatagtgataaatgaataaaacaaattgaggggaaagagataaaaaggttagaggaaaatgacaaagaattattaaaggagatagggactggtgaggtgatcaaatttaaaccctaataataggacaagccactaaattactctattttataaaataaatattttgagtagaaacaagctgttgtccatagatgttgaccgccaaactctaatgcttccaaatcttcatttatcatatttttgctataaacctttagtattttacaagccacacgcctctccatatcctttttgttacctatatatctaactcggaactcttcaaatatttatatatttcatacaggttatgtctatcgtcactcacatatgcacatacaggcttgtgttgaatatggtcatgtggatggtgatacaatgatgctactcttaacaaaagcatctagaaaaatataagtctcagtccgtcagtcgtacacatactgtttttggatgttttactttttattgttctaataaaaaatcaattatactgtttttcctagttgactaattttcaacattatttaccttactgttttcatttcattaaacgttttaccgacactgctttattctaattaaacatcttatatattaccgacattactttttagatgaaatttcacgagcgagatcgtgacactcatcacaattaaacagcttagagagagacagagctagagtaggcaataagaagcacgttgaaaagcagctattagacattccagcatccaatcgtctcactcaactaaacattcactaattcttgtttagtatgcatgtacagtattgcatattcttaagatacatttgatacaattattaaggaccatgcatacatggttttattgattattgactagcttgacacacttctttcagtccagttatttagcagagtgattctaccgttctacgtaactcataattagaagaaaaaaaaaacgagaaacaaaattaggaacattttagataactggttttataaagttaaagctatcggtataattactaaaaatagtcatatgctttttccccttttaattaccaatctaatttacttgacataattacacttagctaattttttgtcgttatttggcaagagttatcaacaatgacataatgatagacaacactctacacaaatttaaatgctttttcccggcccatagtttttaaaagttattccacgaataaaattgacacatgatctaattaagaaaaagactagcctactccatctaatttgcacaattaaactaattggtactattatttttatacaaaatgttgaaatctaataattgttactatatttttcaactcgaataagcatagtattgatcaagaatatactaaatcttttaacaaaattcttttctttttcctagattttcttaatagaaaatattctctctttttttgttagtgacactttgaaataatatcatttttatataaactaaaaggtttttacaaaaattaaagtaacaatttgttttttttaaataatttttgttttgaggcccacccatgacccaacagtgatcacacacacacacacacacctccctactcatccctcaacgcgtccaaacttatgcgcgcacgttaccccagactcttaccgacgctaaaatacgcagatattccttatcctccacctcttggcggaatatatatctttttgtttctttttaagccttttgttgtttatcccagtttttttttgtttttaatcactcaaccattaaaccccattttgatctctagttttttaaaagcaggagattttccttttcccagaaaagaaatttcccaaatcaaagtttcgagctttcacttctcgacttgcaaattctcgtcctttttactgaattcgatctgggtttttgtttttgattagtaaaataacaaaaaaaaaaaaaaggatttatcagaaatggctgcgagcgatgaagttaatcttattgagagcagagtaagtttgttgcttcttttttttctggctttatttctgttttttagcttctaaatatatatactgatgtttgcgattattgggttaaattttatgagtgattttgacatgggtctctttcgatttctatgtttaattttgttcttgatgttttttagtcttttgcttttgtgtttgcgcttatgttgaatggttttgattgggttacaaattgaaagctttaggatctcaaatcgttttaggtgatgaaacgtgtcgttagtttgatagtctctgtgcttctccttgcctttttctgtcttcttctgtttgattcttaatatgattgattaatcagattttgttattcaatttcacacttaacttcaactgactctttgttgaattggattctactgtgtagtgttaagataaaaaaaagtttgaattttgtttgttgtgtttgataaagacactcctttgatgcttcacttgaatgcaaaacacttcctttgtgttacttatatatgataagcctaaggcctttcattgatctctcttctattggtgttttctgggtttgatgcagacagtggttcctctcaatacatgggttttaatatccaacttcaaagtagcctacaatatccttcgtcgccctgatggaacctttaaccgacacttagctgagtatctagaccgtaaagtcactgcaaacgccaatccggttgatggggttttctcgttcgatgtcttgattgatcgcaggatcaatcttctaagcagagtctatagaccagcttatgcagatcaagagcaacctcctagtattttagatctcgagaagcctgttgatggcgacattgtccctgttatattgttcttccatggaggtagctttgctcattcttctgcaaacagtgccatctacgatactctttgtcgcaggcttgttggtttgtgcaagtgtgttgttgtctctgtgaattatcggcgtgcaccagagaatccatacccttgtgcttatgatgatggttggattgctcttaattgggttaactcgagatcttggcttaaatccaagaaagactcaaaggtccatattttcttggctggtgatagctctggaggtaacatcgcgcataatgtggctttaagagcgggtgaatcgggaatcgatgttttggggaacattctgctgaatcctatgtttggtgggaatgagagaacggagtctgagaaaagtttggatgggaaatactttgtgacggttagagaccgcgattggtactggaaagcgtttttacccgagggagaagatagagagcatccagcgtgtaatccgtttagcccgagagggaaaagcttagaaggagtgagtttccccaagagtcttgtggttgtcgcgggtttggatttgattagagattggcagttggcatacgcggaagggctcaagaaagcgggtcaagaggttaagcttatgcatttagagaaagcaactgttgggttttacctcttgcctaataacaatcatttccataatgttatggatgagatttcggcgtttgtaaacgcggaatgttaacactgggttagagaaagaaggttgttttaacaaagccaagacatctttcaaactaacacacaggtgaatgtattgcctgtggattctctcgtttagttttgtttttgtgtttagtatctaagtgtgtggcggtctgcggcagcctttgtgatgactgtttaaacgctggattctgaaacgctaaagcttgtggaagaacagtgaggcgtttagagacttggaaaggaaccaagcactagtaaaaatttctcctttttttgtctgtaatatttggcatttagcttttacccttgagcctttttactaactaaaagctgattttttcagcatgagagtggtaattagatatctataaatatatatatttcaagaatgtaatgtttatacacaaattttagtgattttggtaaatgtatgtagggtctgcactctgcagttgtattgttgctcctctttttcattgtactctaatggattttacaaaaataagcattacctgttttttttccccaatctttactaatggatatctatgatataatgtgtttcaaaaagccaaaaaggtattaaaagatttttgtttcgacctgtaaggaatcttttgaacaaatgatgagaaacagctaaagctttgaggaaacaagaaaaacgagagaaattagtttgttcagaaagacaaatgtacaaaataagtggagtctaccttgatgaagaccatatatggaatggaccaagagtatgcaaactcatgacatgaagaatgtggctatatttgcctttggattattaactactgtatgaaattatttcttttagatcataaaagttcctgtaataactccaaacagttactcatatacatgtcgaagttgtttacattttacaaattggtaaaatttcatggaaatttctacctcttgtttaagaaactttcataagaaccaaaagtctcctaacctttgcttgcttgctcacaggccaattcaaaagtccaaaaatggctaaagaaaatcaatggatgcacatatatagagctcatgaagaaagattctatttcatattatagttgcagagacctaaacaacattatttgcaaggtaaaggtaaaaagctcatatgatactgataaaagccgaatgagataaatgtcatgatagtggttaagtggcaaaaccattctgagacgtttaacgagccctagcggcataggcaaaagatgcagcagcaaaaaccgttgttacagacgaaacgagagtccagaaggtctgcttcttgtgtgcctcttccgttgattgcttcatgatctcagcttctttcttcatttcctcgattatgtcctctttgtttttgaaagctttctctatcgactctagctccatcgcatagggttcagttccaatttctcgcttctgttcctcactaatcaatctatcttctcggttctctaattgggatagcatagatgcagcactctttagcatcaccatgctgcgttttgcatccattccagctgattctagttctgttttcagagcttccatagcctttctgagctctacaagctccttttcgagtttaacattttcgcttttcaatgattcagattgactctccaaatcattcttcgctgaaaataaactcttacgctcaatcttaactttctcaagctcttctagagtttttgcaaccatcttctctgatttcaaaacctctgccttaagatcctctccatttctcttctcctcatcaagtgccttatcagcttcttctctcctgagctcaacttgcgcaagagcattgcttagctgatcaactttgcagctaagcttaccgttaatcttggtttgatcatcacaattcttttgcagcacagcaacagcatgagttagctcatcagcctttcgattcagctcaacaagcttcctctcccgactaaaaatacgctcctcaagctcaactttctcccgagacaactggtcaatcaacttccccttatcagatgactgtacattgagcatctccatctgtttctcaatcaaattcttctctcctattaacctctcaacctcagattccttgattgtcctctctttccctaatgcatcaatttccaccatcattccactctctttctccatagactcatcaagattcttctccaacccgataaccaaatccctcaaaaccttctcttcctttgtcaaactccgcacagtctcattcaacttgtctaactttctctccagctcctcgattactcctttttgttcaatctttacaatctccatctcattcttctcacttaaaagcactttgatctctctcttcaatccatcaatctcattcttcttctcctccattatcttctccagaccaatcttctccttctttaccccttcaatctcctcttctctcaccttcctctccttcaccaatctctcattttcagattccaatttcccaatcactatctccaaattggattctttctcctccaaacgaactacacactccttcaatcgattcacctcctcatgctgtaaatcaaacccattcttgattaagtccctctcatcacaaaccttcctcaactgttccttctcaatctcaaccttacccgtaagctcaatcgcttcccctttcaaaaccctaatctcactctctctatcactcttctccttcaccaacatatcaactccaacacacatctctctaaactggctctcaacaaacacaataacaaaatccaattcaaacttcaacccgaaattctcatcactcacctgatccaactcgtcacgcaacccagtcttctcctgacaataacgagctaactcggtctccaattcatccttggcctgaaccagcgaatcgatctggtttctcttctccatagcttgtttgagaagcatcgcattaagagacttcaaattctggaattgctcctccgaagaatcgtgttcttccatggaagactgacggctaagtaccgtggctttcttgtcagtctccggtgctttctggtcatgttgttgttgtcggttatcattagcggtgtcgttactgttacgcgacgctttcttcttggccatcgttttgaggattctcgaaggttgcaaaaaaagtggtggcggtgattagggttttttgaggatttcgatggtcagtgtgaagagagacgaaacgtctttgggggtaaatttgcaaattcaaaattcagggcccagattttaagatttgatttatcttatcacatcagtcttctctgtttttagatattttcgtaacgtaaatccaacaacgttgcacgtgactgccacgtgatactagtgactagtgagagtgattataaaccgaatttaagctggaattaaaccggttttaatttagtttgttccattcccatccataaacaaatttcagctattttgatcacataatagttttttttggtaattttttccaacgatttacattcaccaatgaaagaaaccaaaatagttttacataataataatttggatcgatttcaagaggctaaagcaacctctcgaatgcgatcaagatctcccaagtacttagtggagttatattctacactatctaataattcttcggaatacgttcgttgcatcatctttatcttcgcttctcttggagtcattacgacatcttcgtggcctagtaataattccacaacctggatacatttaaagaaacagtatcaaaaccggaaccaaaacgaatttgacatttggttctttcccactttgaaaccttaaccgggatggaattacaatattatacctggctcatccggggtcgtagaagagaagattgatcgatgcataaagaagccgtggaagttaaccggataagctcttctcggttatactcatctccaagagatggatccaccaattcttttatagcttttctctctagcaacggcttagcctgtaagcaaaaaggaaacgtaactcgtaccagactgataaaaggatagtgaaccggtccggtttagcctcaaatgtcaaactggtctatatactcacccataagacaaggctctgctgagactcgtcaagggcaggatgtccggttatgagctccaagaggagaactccaaaagcgaaaacatcagtcttctcgtccacgattccgtgcatgaaatattcaggtgcaaagtacctaaaacattgtccaaccaaattctcaactgaaccacataaaaaaaaacttttcctaaaaaatttcaaattgttacccgaatgttccctcaaatttggatacgttatggtgtgtcaattgcttgggaagccatttggctaacccgaagtcgcaaatctgcggttgaaaatcttcggtgagaagaatattatcagctttgatgtctcgatgaatgattcgtctttgacaaccctcatgaagatacactagtccatctgctgttcctaacgctacattgtaacgtctgctccaagtcagcttatattttgatggtcctgtacaaattaatttgagcatttagatatgataagcttaaaagcccgatatgtatatccgttaagtttatgggtggatatagaaaccatggaggagagagcctaagcttccaagaggagatagccggaacacgagatgcattccaccctcgatgcaacaaccgatgaatttggcagtgttaggatgatcaacatgagcaataatcccaagttccgatagaaactcagctgtttgctcgtccggtgtgccttttgtcaaacgtttcacagcgattagctttccttccggtagaattccctggtatacatcggcgtaaccgcctctaccgataatgttttctgcatagaagcgtcgttttaattgcagtaatagtagcaaccaaacagtccttcaagtaaaaaagaagagagtatattgttatgaagataaactcgatacctggactgaaattgtcagttgcaatttcgatgtcagatattgagaagttttggagagatgattggaaatcgtagatatcgtgaaggaccatgccattcatgtttggatctgcacttttgttttgtttgatgatcggtggggcggcgccacttaatggaggaaaggaagagaggcgtttcatggatctgcgtttccatagcttgaagaattttccccaattagaagatgctctgtgattcttgcactgtacgtctgtgtctgcatctgcattgtcgatagcttctctgtttggaggaggatcgtcagatgaagatgaagcggaagagattgagcaacgagttaagcaggcttcgagggctcctcttggtgatttggggtcttgcttctctttatctacctctagtaatcttagatctgggaggagaagggagagaaaacgttggaagaagctaggttttttggtgtacaagcaatgaataagaatacagaggacaagagaaaacagagcaaacatagaaacagaggaaacagaggagctaggttttaccatgagctgaagcagaattcataagaaacgcgttggttcttttatgttttgacgtatgatttatgtcgtttggatcttcttcagtgacataacttgaatatttagagttgtacctgcctcgggagattcaaaagaaaagaacagactaaacatgtcgttcttatgtaaattttgcgggaaattaagagaaaatcggtgaaaattcagggaaagttcgttaattctgcttaaacgttcgttaagtatcaatgaaaatcataacagaacagaagataaacttctagacattaatatcatgtctaccaaaaaaaaactcaaatcaaatataagaacaaacagagaaaaaagtgatttgattgaatgattacattggaagagcacaacacacgggagaagcttctttgctttggtctaccgccatgaaagagtgttggtaggacacttttaagattttctcagaaacctgaaaacctaaaaatagagaagaggatcatagaaaggaaatagaaagaagttaacatttaaaccaaaaataaataaaaatagaaagaagttttgaagttggtgttcgtctcgagacacccgaaagaaaaggttttgtctgtgtgtttaaaatttgatttactaatttaattgttttccgttgaccaatggtatatctactagtagtttttttgttaagctaatagttagactctaaaatgactaaatcctatatttggcaatatgcttttgattttctctttttggattgaactcagaggcattctcttagcttcattcatttatggcagaaagggttaagggtccttaaaaatcgcttcatctgtcggtctcgttatccaaactcatattcctaatttaggtcttttaaggttttaaaaaactactttctttatcttgttgataaggaatttataaaagatcaaacttgagtaatctaagtagttttagttttactaatttcatttactgttactaatcaattgtagatattgacattcttgtatatattgcgacctgatagtaattatctttaattttctatatgtttttattcaagtagtactctgttttgtattttctttcttgtgaatagaatattttctgtgtgtatatgatgcagaaagcctgcattaaaacctgcattggctttattgctttgcaccgtttatttatttttatgattcttatttttgtgattaacaaatattatttcaagtgactcttatataagttttggatagttaaaccacggaccacaatcatgttggaagtgattgttcaatacttcattgttgtataagagaggggacatcgatcatttatgtaaatcttgttaggtactgttctgttctatcaatctatcaatagtccctacgctaactttctgtaccctcgattaaataggtttttgctcaatgacgctgggtccaaattgtaatgactcagttcaacttccgcgacaaaatcattttcatagattttgatgatttctatagtgggcggttttttctatacatcttacattcgcaagaatttgaatgatattagcccatatgacgagaagaagaataattcattacttatgtggttaatgcggagtggaaacgaatatctcatggccaactacaaatccaaatactgtcttttgaatccctgtagttttatactatatgatctagagttttttttggattttgtctcccaaattagaaattattatagtatcaactatccatcacatttatagaaaaaaaaaaaaaaaaaaactatccatcacagcttggatcttgcggtgggccaggaaaaaacacatgagcatcggatctgtggaaaacaactgtcttatcgggtcaaacctttgagtcaattacacgttactgtgcatgtcataaaccatcaccaaaaaggaaaacaaaataacaaaccatgcatcttacttacccagtaacacaatgcatccataatgtacatagtatttgtgaattttttgaggaaagtattagtgaatattattactatgaaataccatgtaattacttctgaattatcttacttaagaaaattcaagtttagtcaatcaacattaaaactatagagaacccccaacgtgtaataatgcattgggagttgggactttcataaaatctcgaataaattaattcaaattgtctaattcgtccaaaattatcctgcatgggttttagctaagccagcctagctacatgtactgatttatacagagataaatatagacatgatatatatcaataaattaggaacaaatcagagtttttagatctaaaaacacggtgccttctcatttcctccggtgagttatccaaatcttgtgtttcttatcatatatcctatattttatctacataaaaattgataagtattcgttgaattcaaagggcattttacgaagaaaatggagacaagaaaagacgacatggagaaaaggaacgacaaatccgagccgttgctgctgccggagaatggatccgacgtctcagaagaagcatcatggatggtttatctaagcacgatcattgccgtttgcggttcctacgagtttggaacatgcgtaagattcttttacgacacctattactttggaaataaaagatgatgagaacctaagaatttgtgacgattaatctttttgatacgagaaaatctgtgtttgttttttaataggtgggatactccgctccaacacagtttgggattatggaagagcttaatttatcatattcccaggtttatattaaattgattaagtcttctacgtttatagatgcatgtttaacaatattttgcttaatcttttttttttttttttctctattggaatctagttttcggttttcggatcgatattgaatatgggagcagtgctcggcgccattacatcggggaagatttctgatttcatcggtcggaaaggggtaaaacctacctaaacaaaattgtttttatctcaatatacacacaataaatcctaagaaaaatataccatttttacgaaatataaaattactttttggctcacatggtttttgtctttgagacaggccatgcggttgtcttcagtgatctctgccatcggctggctgataatttacttggccaaggttattcttttggctgaatttcttcaatagctgttttcaaaaaaagctttaaaataacatggaaaatctgcaactaaatagtgatgttttttttttaatattagggtgacgtacctttggatttcggaagatttctaacgggttatggttgcggtaccctttcctttgtggtacgacattttcataagcattttccccttatggataaaaagccatgcatagtgttataaattaatcaataaataaaaattcctttttatatatgaaactttttggaaatccacatttggcaccgattttgtgtaggtaccggtcttcatcgccgaaattagtccgagaaaattgagaggagccttagcgacgcttaaccaggtgatgatgatgtccttttatttactactgcattagaaaatgtactgattacaatagaatcagagctagcatatgtgttggtgttttcgagatatttgacattgtatcacaaattaggagtattttgtggtcaaaaaaacaaaaatcaaaacagtatttagagttatttaaatcttttaaaagacaacaaaaaattattgttttatttctgaaataaattgaaattgttaatattgcagctctttatcgtaatcggattagcttctatgttcctcataggcgccgtcgtaaattggagaactcttgcactaaccggtaaacttgtttgtgcggtagctgaaccggaaatatttgttgttggtttagtaattatacaaaattagatggtataaaatttaatttgggtataacaaaacgaggtttaattaaccaatttcaggagttgcaccgtgcgtggttctattctttgggacttggttcatccctgaatcacccagatggctggtaagatcaacgatcgtaactcaacatatggttgaaattaacctcttaacattaaaaccaaaaaaaaaactaaccgacccaactcatatgcattttgcgtttcaaggaaatggttggccgccacagtgattttgaaattgcgttgcaaaaactgaggggtcctcaggccaatatcacaagagaagccggggaaattcaggtacaatctaaaaccagaaaatcggttttgttacgtgacatgacatttttcgtgttttgaattccggtttataggagtacttagcgagtcttgctcacctcccgaaagccacattgatggaccttattgacaaaaagaatattcgatttgtgatagtaagaatctctaattccattcaaccgattataactatttcccggtttgatttggttaaatcttatttttctatctattcaggttggagttggtttgatgtttttccaacaattcgttggaattaatggcgttatcttctacgcacaacaaatattcgtatcagcaggttataattcgaaaatgatctagcaaatgttataatctaacatactccatttctagaccattcatcggtttttgttccatttttggagtaccaggagcatccccaactcttggaagcattctatactcgatcgaacaagtcgttctcacagcactaggcgcaacattgctaattgatcggcttggaagaaggccacttcttatggtatggttcttgtttcagtttccaataaatcctagaataccggtttagagtattcggtctgaccatgcggtacattgcaggcttcagctgttgggatgctgattggatgtttgctcatcggaaattcatttcttttgaaggtcaatcatatgaaaaataaaattaaaaaattaaagcgtataatgtcaggaaaaatataggacgtttaggttaaccggtttgattttggttttgacaggctcatggtttagcacttgacatcattccggctctggcagttagtggtgtcttggtaaacatctataaacctaattttggtttcaatatatatggtttggtcttggttttttcctcggttgacccaaaacccaatttccaggtctacatcggttcgttctctattggaatgggtgcaatcccatgggttataatgtctgaggtaatttcaaaacaatatataatgttcatatttcattattttttcttaatcttgtcattacattaatttactctttttttatacttccagatatttccaataaatttgaaaggaactgccggaggacttgtcactgtagtaaattggctaagttcatggcttgtctcattcactttcaactttctcatgatttggagccctcatggtatattacatttttttttgttattttatatacataactactaggtgaacaatcagtattgatcgcatttctttgtttttaggtacattttatgtgtatggtggggtatgtgtattggctattatcttcatagcaaaacttgttcctgaaactaaaggcagaaccttggaagagattcaagcaatgatgatgtaactctgtaaatatataatacatgttaattttttattttttttattaaggtataactatctacatgcaaacgcataccattatcaatataaccgaaaggctttatatgtattttatgaatttaattttggattttcagatttcgtaaatcgaaagaattatggcatgaaaatgttctttagtcaagaagtgggcatgttctctcgtaaagaggcttttctcgaatcaatcaaacacacagtcatacccttcaaattagtgaggaggatattgttcactactatcccgccatcgatttttcttcttctcaattatatcatacataatgggccttacttttgggccttcagctttcaagagaattttactcggtaaatgaataaaagagtcttaactcttaagtgcgtttacgatttccgatattcttctaacgtttagtttgatttgacttgatacagtggaaaaatatgaacgttgtgaaacggtaacattttcttaccgtttgaatctataatatttgattggaaagaaatttaaataatgactctctataaatactcctttcttgactctgaaatctgaatcctctttacttggtttatttcttacaaatgtcgagtacaatctttttttagttctgtttttccactggaggagttctctcactcaaattttatctacattgctcattagccgagagaaacaaaacataaaaaatcctcttacaaggtaaaatactctggtcttgattcttgtatatcgttttgctatttaaacggttcttgttagttgttaataaatatacacgttcttcatcttttaagctgcatctttaatggagttgaactaagaacttaaatgctctgttttatacttagtttatacattgctgtcttgacttcaactatgaactatgacattaactgatttttaggcagctatttgtgtgtctgaattaaactgaacttttgtagctatatataattttttttgtaatgagctagatatattctgtctgcgagtagaatgaagaaataatcggttttgactaaattgctaaaaaaaatatgctatttttgatttttgtgtaatatatatatgcgtgtattaacaaacggaaaataatgatgttaatgaagattgattaattttgcagaggattgaagaagggaaaacaaagccttggggctgtatccacgggcttccatcttctaaaagcctttgaagtggaccagactctgtatgtagccatatttgtattttcctttttctttcctgatatagatacatggatgtatgtagatatgaatgataaatgggttatgtatagatgtatgattaggatgtgaatgtatatgactagggtgtgaatgtatatatgtatgattagggtgtgaatgtatagatgtatgaatagggtgtgaatgtgtagaactatagaggtgtgttagtgtagggtgagagtatagatgtatgtataggctgcatatatgtgaagtgagtgagcgtaggcaaagcgcccaatgcgtaacttagggaggaaacacggcccctataaccatccctagtcacacaagtaacaacaaacactctaaacggcaaaaacaaagctaggaaaaaatatgtcgaaatgctagtcgaaacactaaatgttcaagtgttttacgttaaaataggacaataaaaattgccaaggcccaaaataaagcaaatataattttgtaaaacacttttaatagtctaacataacatacattccaaaaagtatttggtaccagtgtaaaaaatgacacaaaataataaattaataaaatttgaattatggttttatagaaatattttaaaagttattaaattaagaaattttctctataaattaataaaattttgcaaattccaatatttcaatttcttgtggaaaagactagcgcaatggcttaatgcatttcattgacagtaatttatagagatttttactgtataatggcaaaaattaacaaaatacgtcaaaaatggccaaatacaaacaaggataatgtttctcagtaaaatgttagataattaaaatacaaagtggtctcggttttgtcccaaaaaaaaagtggtctcggtcagaacaataaatcaaattttttgttttagttttttagattttgtataaaaatttaagaagttaaaaaaatgtaaagaaagagtttttttttttggtaaagaaagagttcatttaaaatattatgcaagctttacaaaagttttgtgatcattgatttaaaatttcttaataccaccagtaagagattaggcaaaaaaaaaaaatgattcatatcctcaaaacactcgttgacccgataagcagctagtctaaacattttaaaatagcaatgcatcgtgctattttatgttaactggacaaatagtttgaattaataagttttcatgttaaggaatccgatgggattcttcatgatatcctatttgtatcctccttttttgatgtttgtctattttttcttttatcagtcgcaactttagttgttaacctgatgctttggcgaacgaaatgttatctcgttatattgaatcctaaattatgaaataatatcagttatttgactccaaaaaaaaacaaccatgttacacatcatataagtatataaaaaaacgttacactgtcaatatataatatcgacataaataaatttaaaataggaaaccgcgtgaagacattatctgagttattgacattatcaaaccgcgagcaatacatggccgtatattttatgtttagtggaatttataaaatatatttttcttacttgatttcctcgtagtctactctacttaatactctaacagtaagtaggtagacaagggccttcatttttttcttgtatacaagcgtgatccatatctactcgtctacaaatttggatcaatttggatctctataaaccatgtaatctggcaaaattctgcgtgaaagactttaaagaatttgagttattgacataatcaaactgcgagatatatggccatatatttaatttttattggaagttttctgacttatttttttttcgtaacatcacgtaggcctgattagggccatcatatattttgtattaggacaaacgtgatccatatccacttgtcaagataaatgtatatgtataatgtttcgtgttcataacgttaaataattattgtaatatttccatatatatataattaacaaaataggacccactgcaatttaatctatctaaaacatgtaatccgcattaccctgacaaaattcgaatattgagttgtcgttattggttaattaatcatgtttaactataaacaaagaaaaaaagcatcacacccagtgagagaccctatggaaaagggcagattattctttacacacagaccctatggaaaattgggatgcaaaagacaaaattgtgattaaaatggaaatgcctttatggattaggatttgtggacttgggagaggctatctatatacgtcctcatgtgaccttggaagttggaacaccacgaaaggagttgatatactaattaagtcgaaccactaattaatgggaagacgtgcgtcgaccgtcgatgaagttgcgtaacttaaaaaatttaattccggatatgataatttccaaataatcatgcttatttatatatgtctggtctaagtctaattaacaatgcaagcaaactgtagtcatgctagtgaaatggataaattaataatcatttatcatttccaattaattcagtctggcatttacactttctgttaattttagcactataacgttttcatcttttgacaaatacgttaaaaaggtggaatactactgtacatatacatgagcaaaatttaaagagtatcttggataattattattacttcagatatgtatttaaaaagggctagctagggttggaaaaatgatatacataatacatgttaattataaacatacaaaaaaaaataaaaaatttataaacatacaataaaaaatggcaaacgttgttaataaaactgaagaagacgctcttggtttatagttgactaattgtactcgcaatatattcaaaggtgttattaattttgaaaataacataacttatattgctttagtccttcagtttctttctatttttcacacatttgttggttggtaagtttttaaattgtgatttttttattaattatagaaatggggtaaagtacgtaatagaaatagtaacaacaatgatgagcacgaatccaatctaccataactgcgttagataaataaatgagttaattatggaaaagggacggaaaagttaaacaattataagattaggaacaatgcataagtgattgtgaaaaccagcacttctataatgctaaaagacgcttctaccctcgtcaaactttgtcttcaagcttttcccgttctctgttttgataagggagatgcaaatctctgatgaagatgacgaaacggttgccgatcaacttcgaaaacgcaaacacgaaacggttcgtaaaaccaaacaattacgtcatcggagatgcagatctgtcatgattctggtaattgtgggtgttgaaaatacaattaatcatgaaacttcaacaaaattaagccatatcaaacttcgaaacgagaaagatttacaattcttttaatttttctctcttgggttcaccaattattagttccttacgctttaattttcatcaatggagttcatgatagcattcagagatagtagaggaagagaacgttagagaaattgcatgggtttcctaaatagtatcatcttagggtttagtaatcttgaatcaaccagggtttttaattataaatgatttttgggataatagattttgttttttcggaagaaacgttagagtgatagaggagaagcttgcgaagatgaaggaaaagaggaagagaagctgagattgaaagggtaaaatcgtcctattccagaaataaaagttccttttttcaaaggacctccccaatgtgcctaaaatcaaagacttttgagaaaatattctcattttgacaacaatccctaaataaatagatggttctgtaactatccttgtgtttaatatacaatgagtatacagtaattagcaacgaggtcaacccgtctatatgaatctatatataaagggaaagcatagctagttctcagagtatatctatctctcttcttcttgttctttagctcggttcaattctatagtatttgaggcttatatttgagtgaagaaaatggagggagagaatagtagcattgagaaaggattattattgataaggaaggaagagagtgcaaatacaactccatttcttgtcttcaccactttcatcattgtctctgcttccttctcctttggcgttgccgtacgtttccacctctctctctctctctctctagatacacacacatatgatacgagattcgaaatttagaactgggttttgagtagaaatattccagtgttcaagttatttagatattcaggcatgtatctcaattattttgatgataatcagttaggacatactgctggtacaatggcctccattatggaagatcttgatctttctatcacacaagtatgtctcattactattttagatcggttttaacaaataaaaaactatttctgataagtcttatgaaaactggaatttggtttttatggatatttttcgcagttttctgtatttggttcactattgacatttggaggaatgattggagcactatttagcgccacaattgcagattcatttggttgtaaaatggtcagatatttcttattgtaaatcctatatacattggcaaatccttaaaccactaatcacttttaataatgttttcgctctaataaatttcttagactttgtggatcactgaggtattctgcataagtggatggcttgcaattgcactagccaaggtttcttcactacccatttatagtatccctactatataagcttcctctctaatctcgattaagttatctttgcgtagaacattatttggctggacttgggacgattctttgtaggaattggagttggtctccttagttacgtggtaatttctttaaaagaaaaatggtttctggatagaaaaattctatttcttttttttttttaacaacgctagtttatattattttttttgtaggttcctgtatatatcgcagaaataactcctaaaactgtgcgaggcacttttacatttagtaatcaggtaatgtaattttatatttatatattgctatttttgggttgatatatatttattgatgaaggtctagttattttcagttattgcaaaattgtggagtcgcaacggcgtattaccttggaaatttcatgtcatggagaataatagccttaataggtgattcttctcatctactataattttgttttctacagttttcatatttagtattcataaagaaatttaaatattacttggataaatatatcatcaaatatactttaacgtcttcaggcatacttccatgcttgatacaacttgttgggttgtttttcgtccccgaatctccaagatggttggttagttatatgaatcatctcatatatacaatttataagtaaattgtctattttgtaagtaaaaatatatgcatatagatgtaacgtgattcattattgtaggcaaaagaaggtcgtgacgaagaatgtgaggttgttcttcagaaactaagaggagatgaagcggatattgtgaaggaaactcaagaaatcttggtacacatacatataaatcatgataaaaaaaacaaatattaacatttcatttaattttgatcaaaatttattttattactatttcttccattatttcacacacagaattttaaatttaatattttcttcttgaacaaaatcttgctgatctttaacaataataatatatataaaaaaatctcatcttcattcattttttttgcagatttctgttgaggcttctgcgaatatcagcatgcgtagtcttttcaaaaagaaatatactcatcaacttacagtatgaaataggggatttcattcatcagcagaattttttaaaattattaaaagtaatttagttgactgaactgatttttgtttttggttaattgaatcaagattggtataggtttgatgcttctgcaacagttaagtgggagtgcaggattaggttattacactggtagcgtatttgatcttgccggtaaggtttcatcaatgtggattcaatggttatcattgttttattcttttaatgattatttacgtaaatatataaatgttttctttttcaatatattttcaaactcttaaggatttccttctcggattgggatgacggtgttgtctattgtcgtggtacgtatatgtaaaaatattcataatgtgatcgttgattcgattatgaaatgggattgatcatttacacttttgacttctaaatttcttcgactcgattatgaaatgggattgatcatgataggtaccaaaagctatattgggtctgatacttgtggaacgatggggaagaagaccgcttcttatggttatgtaacttttatttattgctatagtgttttattgtgttaattggttaattacgtttatagaaagcatacaaatttgaatgtacaaatttgcaggcatcggcatttggtttatgtttaggttgtatctctcttgcattagcgtttggattgaaaggtgtccctggggttaatgtaaatgttactcccactttggcatttataggaataatggtaagtaagaaccaattcagtaatttatattatcttcaaaataaaaaatcatacttttttgttctttgtaaatgttattttttagtaatagctagattctatagaaatttcaaaatttgattaaatagagtttatctataatccaaacagacattcgtaatgatgttcgcagctggattaggagccctaccatggatcataatgtctgaggtatatatgtttacttttatatgcttgaacaaactttttatttagtttcctttttctaatggcattcaaaattgttcatttaatttcctttaatattttttgtttagatatttccgatggacatgaaagtagtagctgggagtttagtaagcataacaaattggtttactggttggatcgtcagctactgtttcaattttatgcttctttggagcccaaccggtacgtcaaaactagtccagatcgcattaaactgtacctaatttcgttttcttctctaaaccttatcaaccaaatttagagattcattatttatacatattcacataactatataacttaacaacagagacaaaaattagataatttttctgttgtcagtttgaacatttcttggaaacccagtctcgagttctttagttttggatcttacaatgatatatgatttatgaatttcaagattccaataacgatgcctatatcttatttttgcaaactcgaattgcaggaacttttatcatatttgctacgataagtggagcaacggttgtattcgcatggtgtttagtgcctgagactcgaggattgactttagaagaaatccaacgacgtgctaattaattctttgagttacattgatctcaaatatgaaatatttataagaaataaaatcataattaatcggatgtcatatatacaaacgctgaatgtgattcgattatggtctaaattcattgatagttttttttaatgtaagatcatgttgtttacaacaaaaattacaacaaaaaaaaggggaaagatcaggtgttcatcatgccgacagttgtgctataatcttttttattattatcaaaccaaacctgttggatttagatcatattaaaaagtagagctaacccaaccaaaattatctaacctaacaacgaagaacaatacaatgactgatgttatatttgaacataaactaattataaatttacatgacctgcttgatttagatcataaaaagtagagacatgccaaccaaaatcttctaacctaaaaaacgaaaaataatacaaatgactgatgtgatatataaggtgaagttctacaatgcacgtttcttggtccccagatcctaatcttagtagttttgccttttgtgttcaaaacttcgggctaaggcccaaatagtatactcgggctagggccggtttgaaaaaaatcccctttctttctgccgacgtaattcagagaacgaaatcatgtcgccgtatcttagatgcgtcgtcgcgcagtacatccattattcagagtcagactgtatcacaattcatctactttttctctcttttttttcattgtttagaataattcagtactgtatttttttttaaatgtattgactggtgtaaactggaaaaaaggtcatccagtgtgacacagaaaataatacaatgactgatgtgatatttaggtgacgttctagcatgcacgtttctacctttcattttgcgtccaggttcagtgactgatcagtcatgatatagcttttgccacttttcgtgaagggttaattaaatccaactaattatttcatttaatgcaattcatattttatttatatgtatataatgtttccactgtctttgtttttatatatctatttatatactttccaaactatgacaaagcgtatgtcgtgttttgttttatttaaatttatgtaacattcattatggaaaaaatatagctaggatatatacgacaatgttcgcaaggaaaaggtttacacatcaatcactatgaagagcaggttgtgtactttattatgtaaataatgtttgcaaagacactgccaatagatgtaaatgtgtatttaggttgtccccgtaagggatgcttgcaattcttcaagcgactgtcctttggtttccggcacgagcatccatataaaaagcaatgacaatccccccaccatcgcaaatatgtaaaaggttcctatttaattaacaaaaacaataaacaatacgtataattggattagtagatttttttctggattaaggtgagttttaatatctttttaagccttatgttcatattaactggaaaataaaagagaaaataaagaccttgtgcgctccattcaaacataaagttgaaaccataactaacgaaccacccagtggtccacgatgttaatgcaacgattgaccctgctgaaacttttatatttatcggaaatatctgaaacaacaaaaagacacaaaataaacctttcttttctttgataaatatttggttattggattttcttttctttgaatataagttattaacctcagacataatgatccaaggtagccctcctataccgattgcaaaaaatccaaagtagacctagccagaatagtcgaattacgttcagttttgttattacaatttaataacgaaaaatataatttgaaaaaatgaatgctttttaccagaatatttatgaagacgaaaactggaataaattcaggaaacagattcatttcctgttcatccccacacacaaaaaaaaatcatatagatttaattgtaatattataagtgctaatagttatcttatattagtccaatattaggaaacaagagtaacctgtaacgtgaagctaaccccaataagcaaggatccgatagacattccaacagcagaagcctagaataatgtttatcaagataatgttaataattattatactgttatattgttatgtctatatataaactgtatttttctaaccaataggagtggtcgtcttccccatctatccacaagaatcagaccaaccaaagcttttgggatctacaaagagtaaaaaataatcataatggtataatcgaaatagctttgagaaatttaatatcgtaaaaaaaaaatcaattagttaaaggtacgcaccacgaacacaccaaatatcattgatccaagtctctctgaaaagcctgtttaaacgacgaaaatgcagataacataaataataggtagtattaaataactcctacgagtattatttatatgaaagcaaaataaattcataaataataatagtaagactatgaatatcctaaccagcttttctaaatatggcatttgaataatatgtgataccgctagctccagataattgttgtatcaacattaaaccaattccaacctgtacataaaaaaatgaaaaggtatgattttataaataaatcattactttcaccaacagtaaaatcatcaataactagccttttcactttatatttctctatatgtgaattaccgtaccactagagttcgtctatacttcttctgaaacatgtcacaaaaactggactttgaatcttcttcaagcatttttgtcataacctaaacataagtttaccaaacatgtaactagaccaaaaacttcaagattctatatataaaaaaaaaaattatttataaagaaagtatactaataatatttaaattgctaatgtttataaaatatacctgaatttcagcggcttcatctgaaacatcagcatctttccctctaaggcgatgcagagagttttctacttctttaactgaaccgattttagcctaaaaacagtaataaataaataaatttaaaataatttaagaaagctctatatattcatatgaaaaatttcacagtcgatctgaaatatataaagaaaataccaaccaaccatcttggtgattccggtatgaaatatataccgatcactggaatgaaacatggaagagcacctgaaccggaatatatacttgaataaaactaacatgtagtcttcacagaagattgaaataaacaaaaatgtacatgttgaaataaatattatactattattgaaagaaaaaaaatgtaaatggcttgcgaggagatatttcgttacctataacagccagaacccgccaattaattacagttccgaaaaaataaatcagagaaattccactgttttgaagaagctataaaaccagaaataaaaattggttggctacgataaaaatggtaaaatataaaaatgtgataaccaaaaataaatagataaaatttaccagggttgaagcagaaaatgcgccacgaacatgtttaggagtgatttccgcaatatagacagggaccttttgcgaatatttaaatattgattttaagaaatgtgaaataagatgaaaatgaaattatgtattaattatagataactttaaattaccacgtagctagtcaagcccactccgatgcctaaagaaattcttcccaagtccagccacaagacattcttttcgtttccacataaatcatgtctatgtattagatatattgacaatttttatagaaaataattaatcgagttttgggattcacacctttgcaaaagcaatggagagccaaccaaaaatgcagaacaaatcgcatgcccacaacgtctttaattgttattcataataaaaaaataaagaaaatttattagaatttagtactaagaaaataattttgaaagaaactagtgtataattctctatgtaatagtaattactaatttactagtatgattaagaaatagggtaaaatggtaatactcgtcttctgccaaggatgactgctaattgaccgctaaacaaagctcccaccgcacctcccaagttcaaaaaggaaccaaacgctgaaaactggaaaaaaaaatatatatgaaaatttgtgaagcacacttacttcatcaaaatgctaagttgttcctgacaaaatgcaatgctaaatatagtattttctctcaatgtagtgtgtacttgcatgtgtctcttaatatatttttccaagccatttttttctactcataactcataagaagtagtcataactgttggaccacaagaaacaactagatacagaagaacctattatctccagttgcgaaagctatatcttatttatcattgatgtctttatacgtaactacatactatagattatcaatttcattttcttcatatcgacctggcttgtgtgttaagagtctgatcaattaggattaaagggtatttaaatatttattacaaaagctaaattgaaaaagaaagaaaaaacaaagtacatacttgtgccatagaaaggtctaactctttcatgattgcagtttcagcgccggaagtataaccattctacgaaattaaatcatttgatcaattaagaagaaattacagggaaaagatctatataaaaaagaaagagattaagactaaagagataaataataggtaaacccattggtcggaaatccgagtgactgttgcatgtatagctaagattaatcattatcttcaatacaatttgatcaaaatatatgtggtgatggatggataatgggtgaaaaagtcccttcgggaacatccgataaaaatctgtggtgatggcaaaaaagagtagagagagaaattaagaaactcacagcacatccatagctgaaggaactacaaacagcaacaaaagtgctgaggataacacaagctgtgatacgacgatcatctctgtcgttttcatgccgaagaagtccttcttccatgcttttattttcccccgccaccactcttacgcttaatttctcctctctttatatattaattttccaaaaatcttctaataaacaaaaagaaatcttgctgattataaacagaggagaggacaagatagataaaatagagagagaaaatagatagagaaaaacagagtttacacgtggggttcaagcacttattgacttgcacaagtggccagtggccttgctctagatctttttttcctaacaattataaaaatatttgaatcataagaataaaccatcataatgtacttagccagatatgacaaaatcctcagtgccaaaaatttaaaactacacataatttaaatgtgagtttccattaattctgagcatattgtagaatagggaactgaatgattctattagataggttaagtacaatatagattacaagagagattaaatgacagtcctagcctttacatatctatactctacacatattacccaaaccaaatactctaaagagcgatcagtttaattacaaaagtaaaataatcgagtgggattcttttttgaatcatggatatcggttcggttcaaatattacccaaaaaccgattaggtaaacaagcttttcaaattctttgacatatacattagcttttgggttagtttgtccaacttccggtttttgtgagaagtttgtccaattttcctcttgtcaagacaatgaatgatcaatgtacacttcctcttctttggaggagagaactcttccttcaaactccttctccatgagaggtatcattccggattcaatttcgaagaatatttcatcatcctaagtactgttctacaattttgtgtaaaggtctttacaagaccggaagttatgacgaagcttatctcaatgagaattgaggttttggattatggtaaaagtcacaatgtaaggtgactatgtcaaagtcgtatgttttcatcgacatctctttcgatgctaattcaaacttgtatcagtttgattatatatccttttatgattatgctagctttgttttgaaatcgtttggcatgcttgacttgtccgatacgtctgatcgttgctctatccttcatttgttgtcttaaactaggataaataaaccactgatttgcgaaggaaaaaaatgtaaaatattattaatatcaatatgcaaataatgttacaaaatacatttattatttgcaatgcgactgacaacagaaaataaattttatctttttaccaaacaaaattaatagtatattacaatataaatgtgcatttaggatgtccccgtaagcgaagcttgtaattcttccaatgattgtcctttggtttccggtacgagcatccaaataaaaatgaatgacattcctccgacagccgcaaatatgtaaaatgttcctatttaattattatatataccataaacaatatgtaaatgacctacttgaatttaaaagtatatttaacaatatatacctaaaaataaaaaataaataaacaaaaactcaatcatccaatctaaacaagaaaacaaaagctaaaagtatttgaagaaaacgtgaatctaagagatattttccgaccgcacattttgcacatctaaaactgtttgatacaaatgtcaaaattcgaacacgatttttaaataactttatgtttgatttgtgtatttttataaagataactcttaactttttttggtaaattgttttatccaaattaataaaaaagtaatagagaaaataaagaccttgtgcgctccattcaaacataaagttgaaagcgtaactcacgaaccacccactagtccatgatgttaatgctacaattgttcctgctgaaacttttatatttatcggaaagatctgcaacaacaacaacaacaacagcaaaaaacacagtaaacttttttttttctttcataacgtctaactatatgatttatataaattaaaatatgttatttacctcagacataatgacccaaggtagccctcctataccgaatgcaaaacatccgaagtagacctaaccaaatttaatttaagatttcttataacaagttaataccaaaaatttaaaataaaaataaaaatttgcatgaaaaaatgaataaatccttgaaagaaaatgaaagattttaccagaatgtttacgaagacgaaaattgggatcaattcaggaagcacattcatttgctgtctcagaaacaaacaaaaaaaaaaacatattataagacgaggattgttttgtccaaaaaaaaaagaggcgaggattgtaatattgatagttatctcatattagtccaatatagaaattctacaagagtaacctgtaacgtgaagctaactccaataagcaaggatccgatggacattccaacagcagaagcctagaataatgtttatcaagataatgttaataattattatactgttatattgttatgtctatatataaactgtatttttctaaccaataggagtggtcgtcttccccatctatccacaagaatcagaccaaccaaagcttttgggatctacaaagagtaaaaaataatcataatggtataatcgaaatagctttgagaaatttaatatcgtaaaaaaaaaatcaattagtttaaggtacgcaccacgaacacaccaaatatcattgatccaagtctctctgaaaagcctgtttaaacgacgaaaatacagataacataaataataggtagtattaaataactcctacgagtattatttatatgaaagcaaaataaattcataaataataatagtaagactatgaatatcctaaccagcttttctaaatatggcatttgaataatatgtgataccgctagctccagataattgttgtatcaacattaaaccaattccaacctgtaaattcaaaacaaatcattactttcatcactgtaaaatcagaagtaaataattagccttttcactaaattccttcctagttcctaacttcctatatatgttaccgtaccacaagagttcgtctgtacttcttctgaaacatgtcagagaaactagactttgaatcttcttcaagcatttttgtcataacctgaaaaagtaaaacaagcatataactacaattacatatagagaaagtgtcctaataacttaacaaaagaaagaaagaatattaatagtaataatacagtaatatatactaatagagagtgatttcttttaaacatatatacctgaatttcagctgcttcacctgaaacatcagtatctttccctctaagtcgatgcaaagaactttctacttctttacttaaacggattttagcctgataaaaacaacaacaacaaaaaatatatataaatgactgaagtaaaacgtttacatatttatgtcgaattcatagtcgaaatgattaaaaggaaatgccaaccagccatcttggagattccggtataaaaaatataccgatcgtttgaaggatgcatggaattgcacctgaaccagaaaataaaattgaaactgatcaacaaaattcacttgttgatattgaaataatattgtaaacgaggtatttcgttacctataacggccataacccgccaattaattacagtcccaaaaaaataaatcagggaaactccactgttttgaagaagctataaaaccaaaaaacattgggttgttacaatagaaaaaaaatatataaggcaataagggtaacagatttgaataacttcttagagaaataaaataaaagaatagactttataaaaataaaaaataaaaagagtataatagagtttacctggtttgaagcagtaaatgcgccacgaacatgttttggagtgatttccgcaatatagactgggaccttttatgaatataaaaatgttggttttaagaaatgtgaactaaaacaataaaaatgtagatgagattaccaaatgtaattggtgtaaatatttgttcaattaccacgtagctaatcaagccgactcctatgcccaaggaaattcttcccaagtccagccagaagacattctttttgtttccacatttattcaaatatatatattagatatttctacgagcaaaattattttaatcgaaaaataatttaggatttctgtggatttacacctttgcgaaagcaatggagagccagccaaaaacgcagaaaaaatcgcatgcccacaacgtctttaatcgttaataaccacccaaaaaaaaaagatatatatcaatcagaatctacgaaaatcattgcaaagaaacaagtattaaaaataaacaagtgcataatttgatgtactaattactagtagtatgatttaagaaatatggtaaaatggcaattactcgtcttctgccgaggatgactgccaattgaccgctgaacaaggcccccaccgcacctcccacattcagaaaggagccaaacgctgaaaactgatttagaaaatgtgatttagttattgagaaaaattagccttaaaatacttatcgattacataaaatggtggaaaaaagttagcagtaagttgtgtggtaaagagttactaatcacaaatacttaatttttaagaattaaatacctcaactttttttcaaaaattccaacagtagtacttaaaaagcttttgtaaacatttctaagtacttcgtatactatttgattattataaaattaattcaaattaaaatgctatgctgtttgctaacttttttttgttaggtaagtaaatcgtgtgatcttttgattagtttacctatcatattaaaatttgtcagaagaactatattcgataactgaaataattattaatataattgaaaatacagctatatacaacattttaatattgctcatgttcaaatatgacatacggtgtcggcgtcacatatgcatgaatgcatctctgatctctccaagtacaaaacagctatcatatcgcattttcataatattcacttttgtttttttaaaaatataatactttatatatgggaaaatattcattttccaatattaaaatacgtatctctctaatattcacatacgcatctctcagaacgtctgtacatgtggtctctcaatatagttaactttggaccgcaataaaataaataattcgtaagataatatttattatagaataatagtaataaataataataattcactttcagtagcgaagctataatttatcaatgacgtctttacacgtaattgcgtatgattatccatttgattttcttcataaccgacctggttaggtctgatagtttagtaatccatacaagaagatttacaagcagctgatgttttagttcataaacaggtgtaattatgcattttaagcataattaattagggattaattgagtatttatagtgataaaagctaagaaatgaaaaaaaaacaaattacatacttgtgccatagaaaggtctaactccttcatgatagcagtctcagcgcctgaagtataaccagcctatcaaatccaagaaattataatgattattgttcgaataattaagaagaaattaagagattaagactaaagtaagaagttttagaaactgacggcacatccgtagctgaaggcactacaaacagcgacaaaagtgctgaggatgacacaagctgtgatacgacgatcatctctgtcgttttgatgctgaagaagtccttcctccatgcttctattctcctcctccaccaccattcctaaagactaatccttcaatccaccttattttctcccaagaaatcttctttaacagaaaaaaaaaaacacaagaaatcttcttgattaattgatataacaaacagaggagagagagatagagagcgagagaaagagagaaagagagaatcagagagagtttacttgtggggttgaagcacttcatcatttccacaagttggtttgttatagaatacgatttcgtttttttattttattttaaataaacaaatattatcatttaatcatttcgagtttcgtttgtcgctttgcattaagataataatgccaactttgaatgcatcctagtgaatatagctcattatctgtcctcaatacaagttgtacgttcttttctttttgttccaaatagttcttatgttagagaaaaattaatatttagataagattatgtgtttataaaatataaaagacaaaaatcaaacataaaataaacattaccagtgataaaaatcacagaaactttataatttttctacaaaaaactgattaaccagactcagaattaaattgaccaaaatcaaaggaaatattccgttgaagcgtatccaaataactctagtccaacgtgttacatattgccaacataaatatgactaaactacatcaccatgtttttataatgttttaccaaataaattaaaaaatatgggcttcaataattgacctacatattcgttgggcgcatctaccaacgaatttacaattctgttttaaatcttttacagttcgatcgagctgttttaatttattaaatttacagttctgttataaattatttttactcaaatcaagaaagcctaaattaatttttaatgggtgttttatctaaaacctctgtgagaattttgtttacaaaattttatatttatggttgaccaaaatgaccgttggagtacttagctaccgttcgttaaataaatttacagttctctttttactttctttttactcaaatcatttaacaaaatttattcacaaaggccataataaattaataatattttagcgggtattgttcactaaagtttgacaatttgatatagtattttggtcatacgcaagtcttaatcaaagtatagtatttttgccaaaaataaaaaattatcaggaagactcgggaagattgagtaaatttctccatcctatttcaaaagtcgtattattttaaaaacaaaacatgtatataaacattttaattaggtgattctcaaattcaattattttctaaaattaagacggaaatactttaaggaaaaaatgtggatcaagttgtttttaccctaagcaactaatgctagacaaaaacagaaattggccacctaatggtctcaatattgttttttattactgttcaactgattttaaagaaaaaaaactaacgttcaaccataatcatcgtttcatttgtaatacgaggtaaagtattatacatacctaaagtctgtaaaacaaaggatatttgtacctttttgtaaaagaatattgaaaaaactgtacctacatctgtttttaaacaaagaatggtttataaatgaataatatatgttaatgttttgtttatattatcggtgaagactatataaatgggagtttgttgagaatcgaagactataaagttttaaacgggagttgtgttaactaactcacttaataacaagtaaagtcaagcatagcatagtgtaacgtgtttccaacataatgatgatggttatgataatttattttgcgtcatatggttttgtatcgtcacgatcgttgacaattacatggatttgtttgggagatggggtggggttaattagcatgaatgattactgaattattaaagcatggtggacaagtgagtaaataagaccccatccttctcatattttaatctacccaatttggatgcccatcccatgtcttatcacacgttttttttttctcgttggtaatcattctcagtagctaagtttttgtcaatacaatatgataacgaattggcaatcgatatcttcatcagacactatccttattactgcatagtgttgatgggattgtccatttcttctgtaccgcccatacacatttcgttgtaatattggttccttttgcggtttttcatgatcgttaagcgggtccaattcagtagaaaaactaggttttgttgtatccactatgaatcttctcttgcaggaccacttctgaaaaaataaatttacgttccataattaagaagaatatatacaaatttataaatagaaaatattaagcatatggtttaaccctttaggcttggtcatgaacgtaatatttctttgaaattagaaaatggtctgaaaggaatcaagactgagaaggacaagaaacgtagacatttccactatctaaaaacttgaaggttatcaaaatttattgttattatttttcttgttataggttgttgatttctttcaaacgcaactttttttatatataccatatttttatggaacaagacatgtaagatattttggtaagcctaatatatcccttttctagagcacgtacgtagtagtgacatgtctaatgatatttcttacaaacggtactttgactaattaatcaatcgaaaaatatctcacttgtttcttgaaaatctttttgtaaaatcattagagactttatttgtatatatcacacactgaatatatatatatatatatatatatatgtatatttatgtagtttaaattttgagtatggtagtgtctaaaaagaccgagattttttttttctttttttttttcccaaaatgtacatttggtctttcaaaaaaaaaaaataataataccaaaatttcagtatataacaatttaatctgtaattatttaatggagtaattgataagtgatgacttactgattatgagattgtggtggtctgtaaaattagtccatatatattgtaaatttgtaatgtttgaatagcgaactgtagttgaatgtgagtaagatccatagtactcagagcataatcatcattcgaccaaaactaaagattcagtcaaatttgtgttgtatttataataggcactattaatatacaccaaattgttattatgaggttacatttatttgggcctactaaaatccaaataaagcccaacagattttgagaaactataaatgagctgacatttgttttttctttcatttattttacatgggctcatcatcttggactacaaatctgttaccgggctaacttctttggcccatatgagtggaacataagagatacgattctgtgttttttttgtcggctacgtttctgatttaacatttcgtttttttttggtatttaacatttcgtttgttgaccgattaacaaaataatattgtttttccattaacttctttaaatgcaaataataattcgtcaattaagaattatttaaacaaaagagagatggtggtttgccacgttaaaatttaaacctaatccaaattgaccttttaatctctgttttatttaaaaaaacatataattgttctctagtgtaatgtaatggaacagacgtggataatatttataatttataattagtcattaaacattatcatatgtttaaaattggaaacattcgttgtacgtcaaatattagttgttatcttactgcataaacaaaaaaaaagacgagaaattgtagttttaaacattacttaattagttaagctttaatattacgtacaaatttcacttaacttaagataaaataaacaaaattgaaactggtttggtgcttaagcttgagcaagaaggtaatgcaaacgaagcacactacacagagattctggatgaagaacaaatccacatgaaattcgattctcacatttcttctatttaattcgaatttcaaattgccatttctcagattccggggaaagaaaaaaaaacctagaaaagtgttttctccgttttccaatcatccatgagtccggacaataaactgcttccgaagcggatcatccttgtacggcacggtgaatcggaagggaatctcgacacggcggcgtatacaacgacgccggatcataagatccagttaacggattccggtttgcttcaggcgcaggaagccggagctcgtctccacgctttgatctcttctaatccttcttcaccggagtggcgtgtgtacttctacgtttcgccgtacgatcggactcgatctacgctccgggagatcggacggtcgttctcgcgtcgccgtgtgattggtgttcgcgaagaatgtcggattagggaacaggattttgggaattttcaggttaaagagcgaatgagagcaacgaaaaaggtcagagagagatttggccgctttttttaccggttcccggagggagaatccgccgccgatgtcttcgatcgcgtctccagtatgtttcacttccttgcttattcgaaactttctcatatctcgttatctatatgtacattgaatgatctgagatgatagtttagttaatttagttaagctaagcatggatttagatcattctctatgatcctgtcctgtagaaggagcaaaatttgaaggcttttggttaagtagcagaacaatgacattaaatcaaatgcatctgttaagaggaattggttgatatctgaccttagaacccttagatcgattggatttgtgttgccattcatgcttgatttcaggttatgatcacagtttgagtttgatacattcactgtgatgaagtctctgattattctattatgtcttgaatagaaaagaaagaggtttttctaacaatgaggagaaagtcagaattgaaatatttactttccatcaatctcttttgaaatgtcacgaaagcaaagcttttcttccaccaatctttgtgtgaatgaacaacaagagattaagacatgatgtggtctttttgcgtgctgttatacaggttttctcgagtctctatggagagacattgacatgaacagactgcacatcaacccgtctcatgagctaaactttgtgattgtctcacatggcttaacatcgcgtgtgtttctgatgaaatggtttaagtggtcagtggaacagttcgagggactaaacaatccagggaacagtgagatcagagtgatggaattaggacaaggcggtgattacagcttggcgattcatcacacagaggaagagttagccacatggggactgtcaccagagatgattgcagatcaaaagtggcgggctaacgcgcataaaggcgaatggaaagaagattgtaagtggtattttggtgatttcttcgaccatatggcagattccgataaagagtgcgagactgaggccactgaagatagagaagaagaagaagaagaagaggggaaaagggtaaatctgctaacgagttcagaatatagcaatgagccagagttatacaatggacaatgctgctgatactattttacagaacaaaagcatacatgagaagaaacgtttaactaaagaattcagaagatttgattttgataaaaacttgtaccaatttactgattaagctttctggtgtcttagtttgtagcttttggtttgtggaaaagtgttgtacacatcgttataacaccaggaaacattacaggaaatttgaaagattcattttattgtgacaaagcatctatctttgtgaaagaaaattggaaaaatgcctttttttggaaatgaaacagttaagtttatggaaattattcatataatcataaataaaccagttaacatacaactaaatatatatgtaatccataaagaaagtgataatgtaactttctttgttacattgctaaagattcaaagatgacgccgtctcagagtatttaccggtgagaatgtgtagtgcaacaaaccgatttgcagcttcagtgtaatgaatgccgtcccagttaacatatttggaactatcataacaaggtttggcggttatgatcgtaccatttgatcttgctgtcttaccgcaaccaacctgatcatcgtagttcagtggtggtcctccggttccacaacataccattatcgaatgatcaaaacctattaccataccaaaaaaaagtttcaagcactgttaacttgcacataagtaagttttggcattccggttaaaatgccaccactaacacaaaagtaaaaaaatgctttctaatttgagtgaactgaacattattaatacttagttacttaccatatttggaatgattcaggatgaggtcggatttgatagagaagatatctacgtatgtgaaacgggaattgggatattgttgagggagttttttgaaaagaccatgaagctgcaaattgaaaagcttagcagcttggttatggtcactgacacaaccaaactcatcaagctttgatttgtcttccccaaaaattgacacaacttgtgctaaacacccaagtggtcctgtgttgtgtatccaatagtttcttgccccctctgcatataatctctagataaagaattacaaaatgaattaatagtatgatgatatcttatactcaaatcaaattcaaatatttcccccaaaaaatgattatccgtgtaacaattaacaaagtgtcatttatagttttatttaagattgaaaaaaaaacgaggattaagattcatgtaaatactaacctttattccatcttgaaatatatctaagattataggaaccagagcaagaacttgatctactgtcttggtgtaaaatgctccggcaatatcattttgtccgatatcaaacatatacaatccattactaaaaaaatattcggacggtaagtatctttggagctcttcatctgacaaacaaaagagaaaaaaaaaaggtacattggtcagtgactaaatgattcaactaagtctaaaatgttgatgaacttttggtatcatttgctatttagttaccttgttgtatcaattgaaggactttggacttaaaggtgatgaattgagagacttgaacaccaaaaccaaaggggctataggatgcagcatttgccttctgaatcgttgacgcagccgcagcaaaattgcagcctcttcggtaagtttgtcgacttatcgaatctaaataaggcctcaaatatggtcgatcaattgcttccactacaaaaacatatataaagcccactcaaaaacttatcatgtaacgagttttatggttcataagaatctttacacccacaacgaaaattacatgagcgtgaaaatcgcgttatatcaagatcaatcagatcatcttgtaacgttttaaaagtcatgttattaactcgactagtttgttatagttcatgcaatccaacgcttccagtaaaaacaggaaaacatgacaactttgccgttgaacaatttgtaaaataatataaaatcctattattattttgctacaaaaaaagtcatgaaaactgaaaaaatagaggaaagattttaaagaataaaggaattattagaaatgaagaatgattacttagaaaatcgacgataagacgtccattgcagaatcttccggaagttggagatctaaagaaggttatttcataggaaggttgtggaaggaatccaagacccgagctaagttctccggtgtcagagttagagtctccgaagttgaaaaccgccggaaagtcattagaaatccggaaagaaccggcgagaggggacagagtatgagagatggctacgaatagtaataatctaagaagagtgtggaaaagagtttccatggctcaaaacaatataatttcagccttatcatttcttacatactatatatacattatatattatggttttaacaaaaaaataaaataaaagataaaaaaaaatatacatccttatgtggatacaaatgtatgcgtgtatacataatgtaatgaaagtagaatgtgagtttgcttggaaatatagatagaaacaaatgatgaagtcctcctctcgtgacattttttttggttttatattcacggaaaccacatcaattgcactattgtgtcgactttacgatatccgaagataaaaaagctcagtatttgggtattaataattaacggtcgtgagaccccatttatattttgtatactgatggaactaaccttttcttttataattgcatgagatgcgtattttttaggataggcccaataagcctgataggcccaaatagttttttcgaggttctctagtaaaaacatcaatatagctggtaaaatataaaatggaagaaatcagaatctcgccggggctatagcttcaccgtgtcgtgtcctaatctattgtcgggaatttgaagctaaagtaacattacaatgaggaaaccacgaacggcagagatggtgatttccggttatttaaccacgattcgatactagtaaattgatatttctcttacattattttgaaggcttcttattttaatgaaagttattttttttttaaataggtaacacaaagttggcatcttttttttgcttactaaattccaagcaaaatagagaaagaattgatatgcgtgcaagtttctgtccaaattcttgtcttttttggaggtgtggtgttgttttatcgacactccactttacacttcacaagtcacaacacttataacaaaagtgatcacagaggccagagttgagagtttgacaccgtcatcaatggcagaaccggaggtgattcactcatggtctgcaccaagatctctcagcaccagcctcatgtactcctttgctcaggtactatacccaactttttcctatcttcttgacaaattttccaagtgttaactctaaagattatgatcatccaaaaccaaatctcaattctgctttgctcgttttgtctccactgagaaaaaattgagtacgtgttagctccaaagagtaaagactatgatttatctaataaataacttggaaagtttggaagaacaaaaaaaacatgagatcctagaaagaatgaatcactatggagatgatttagtgttctttttctttgtgattgatgttgtatctatatatcagagacttgacactgaagttgtcgacgagccgttgtatgcatcatttcttaaagctacaggttttgataggccatacagagacgaagttctctccaagatggtatgtaactgatttgcacttcagtagttagtctttcttcgagtacacgagtttaattttccctcttgtaatttaaataggagtgcaatggagagaaagttgtgaaagatgtcatatatggatcaggatctaagaagtaccggtattgtaaggtaaaaatcctctctgattgtttgttttggacgcttcaaagttcatattaccaaactttctttgttgtgttgttctgtttttccctctgaacagcatatctcgaagcagcggcttttcggtttgccaagtgaactgatgagtagaggaaagcatttcatattaatacgaaatcctcttaacatattggttagctttctcatcaaagactggttctctgcagatttttagccaatgtttcatctaaagttcttctgtgtttattcgttttgcagccttcctttgagaaggtacaccctccatcatttctcgaattaggcttgggggaattagtgtcgatatacagtgatctctgtcagatgggaacaccaccagcagtcatcgatgcggatgagcttcagcgagatcccgaggttttgtttctgtaatatttaaaacagtaaaagtttcacaaagatgtctttttctcttacatattattccaaccatatccatgcagactacacttcgcggtctttgtgatgatttggagattccatttcaagcctctatgcttaagtatggtcctctcctaggagacacttaaagtttgttttatatcaaagcattaagtttcacttttgtttgttatgttctcttgaagatggaaggctggtcctataccagaagatggagtatgggcaccatggtggtacaagagtgttcacgaatcaacgggtttctcatctccaaagaagtatcctcgggtaaggctcttgtttcttgtgtggttaataattctgaattcagtctaagatgtgtttggtattgttcttttccttcagacattccctttgtcgcattacgatttgctggagcgaagtctaccgctttacaacattctcaggagccacgtgaagcacagttcctccctcttgagtagtcccttgcctcctcctagtctcccagttcctgaaaatgcaaaacttcttgcatgggtcggtgacgagattttgcctcgtgaaatggcaaaggtgtgcttgaaatgtggaagaaaacttaacagctcactgtttgttgatttgcattttgaacactgattatgttctatttcttcttatttttgtaaggtttctgtttttgactcggttgttcaaggcggtgactctgtatgggaaggacttcggatttacaagggaaagatattcaagcttgaggaacatctagatcggtaagaacagttatatccagaaaccaagaagcaaataacagagttttctaagcaatcctgttttatatgttggaatcttgggttaggttgtttgattcagcaaaggctctggctttcgataatgttccagcgcgtgaagaggtaagcatctgatgatcgtagtgctatgttttgttctgttaaaacgacgttaccacgatagctttttattgtggcataacatgcaggtaaaagaagcaatcttcagaactcttataaccaatggtatgtttgacaatacacatatcaggttgtctctaactcgaggcaaaaaggtatttcaactttcttcgacaccgatttaagaaacttctgttttcatttagaccattgattagtctaaagaaaattgtgcaacttgtttctttaaggttacttctggaatgagccctgcatataatcgatatgggtgcactcttattggtaaacctttcagctttatgagaacaaccagttgtgctaatatgattaccttggagtttggtttacatgaaagatttgtgttctttctttcaaataatgcagtgcttgccgaatggaagcctccggtatatgacaatgaaggtggaattgtgctggtgactgcaaccacacgccgcaattcgcctaatgtatgaatttggttccacattctcttcatgttacaacataaaaaatccttgtctgtaaaattgttggtttctaaaattctttttgttttgtcagaatttggattccaagattcatcacaacaaccttctcaataacatactagcaaaggtactgtattcaaaataagagagttcaagaaattgacattgtgtttttactatgagattaattttctctgcaaatggaacaaacagattgaaagtaacaacacgaatgctgctgacgccattatgcttgacaaagatggttatgtgtctgaaaccaatgcaaccaacattgtaagtaaccctttgatgatttatccgcaggattttatttcgatagattattaagagactatatatagaagctaatattgtcaacaaatttactttatgtttgacagttcatggtgaagaaaggctgtgtacttactcctcacgcagattactgtctccctggcataaccagagcaactgtaagagaaattttcactttcttttattgagaatttctataaacaggtttttttattgcttttctccttcaatttttaaaaggtaatggaacttgtggtgaaagagaacttcatcttagaagaaagaagaatcagtctctccgaattccatacagctaatgaggttctttcagcttacaacttatcagtttttaaggggtcaaatcgaattatctgtgcctctctctttctctacaagtatctaacaataatagttttgtttttttaaaggtatggacaacaggaactatgggagaactaagcccggtaagtacagaacagtctctagtagcttgtgaataaaacatcctcaatcgttctccacctgaatgtataacattcactaattaaaactttgaataaatggaacttatatctaaagttcgtgatgaaatcttcaggggatcttacttaaaccatatgaaaacactaaatctttgagcatagtaatatcctgttctttggttacaggttgtgaaaatcgatgggcgtgtgattggtgacggcaaagttggaccggtaacgagaacactgcaaaacgcttacaagaaactgacagaggattcaggtgtgccgatacctacttatcaagaaccctgaaatacaaaaccagaggtaagttactgaaatattaatatatctgagagtagtatatatcaaaatgtttgggtatgatttaaaaatggtagcttagcaaatacaagagtagattaaaaatcatttaactttcacatgattcaagtggtctttataccgtttatttaggatttggacacgagggaacttaataataaaaagcattctactctcacatgattcaattggtttcaaggaaaaaacatgaagcgtttacgtcatctttaatagagccagttcctttcacataagtgtagaagctctctttctttttcaggtgataccaatgttgtaggctttgtagccttcttgtagtcgtttcttcttatcttggcacaaaacggcgaggagttttatgcatggtgatggaaaactgtgtgtagttaagcttgtcgagtagacttaaatcaaagtcagcatttgcttattggaccagacgttagaagtaagaccataaataaagccaccactcgagctttgattcttttccttttctcaaaagttcagtttgttagtattatttttgtttttttaaatagagagatcaattatctaattgcaatttgcaaccttaacatgaatattagaaagacgaaaaagaaaaagtagaggtcgagggaagtgaacaagaaaaagaagaccattaaggaacgttgttgaatttttaatggatttttaactagctttcatcattcacgtgaaagattcaagagattaaaaaatgaaggctatattttcgtatcttaaaagtctcaattaaacaatgttttataaggctgtaatcttttttatattttgaagtttgatacaaaccagtaatcactaatcaattacatatcatgaaagaataataatgaaaacgatggtgtatatcaactttgacttattcaatttttctttgagttaaaagttggaatgaatcaaattaaaatatactcaatattatagatcctttattaaaaaaatcgcattaaacatacttttcaaatttagtgaataatatatgttccattcatctttgacaaaatgccagaaagatgagaactatagaatttccaatgtattttgaagattacttatatttattgatgtgataatatatgcgatagggtttcggttgccaacggtggcagttatcttccttgattatttttaactcgcacgattcagggccagaggggtccaacgttcgcttaaagtgtttgcttaatgggaaccgaatcatatatttataaaaacattccaattacttctttttttggttttaatgttaagattcaaaggcataacttgcttatggtctaaaaaatttcgttttatttctattaatttgggaacctgattctgttggagatttgtcgtctctttgagtttcttttacttgagtggcaagtacatttctgatatttctttatgacttctcacttttctttatcacaagatattttgttgatgaaagagtttttttttttgggtaaggaaacatgtaaatattttagtgagtcctcatgttggccgatagccatatatataagagattctgataaaccgttgaaaactttaacccaaaaacaaaaagtcctttctgtgacatcgaagtgaaaacgataataaagaaatctagcatagttttggacccaagaaaacgttttactctctattttgacaccacacaaataaaaaaatatgtcccaaatgttagctaaacataattaactctcgttaaaacaaaaatgtgatggttacgcgtgaaaatggatgatttatgtatttgtgattatatttccaatattttgctagcctactgaaaagtttaacgaaagcaatggataatggaaagattacaaacttttatattcgacataattttaccaattaggcaacgactttcattacacaaaattgcggaaactatacaaaattagccatggataaaaatggaaaataacaaaccgaaacttggctgtaacaaaatctgttagggatgtttcataaaaatatacaccaaactaataaaattcgaaaccaaccaaatgataaaattttgcctatgaccaaaaaaacataaatgacacaatgtgaaaagaaaaacatatttgttgattggaggaaccttcctgttgccacgtggaacttgaagtttgacacaattgctgacaccactgtactacctatctcttctttatgaatcttcaaatgtctttttttacgctataaactcactttcttctcctccaagagccaaataaacacacaaaaaaaaactcaaaatcatgagaagctccgatcatatggcgtttgccggcgttttgccgattgttttcttgcttatattatcatcagcggatctagcagcgagtcaatcacagcccggtccaacaaatcaaccgtataactacggcagactaagtccagccatggcagtgatcgtcgtgatcctaatcgctgctctcttcttcatgggcttcttctctatctacttccgtcactgctcaggcgtaccagacgccggtgtttctccagctggtggagctagatccagagcaaccgtcaacgcggcggcgcgtggtctcgacgtttcagttgtcgagacttttcctacgttcttgtactcagatgtgaaaacgcagaagcttggtaaaggagagttagagtgtgcgatatgtttgaacgagttcgaagacgacgaaacgctgcgtttgcttcccaagtgtgatcacgtgtttcatccgcactgcatcgatgcttggctcgaggctcacgtgacttgtcccgtttgcagagcgaatcttgctgaacaggtagctgaaggtgagtcagttgaaccgggaggaactgaaccggatcttgaattgcagcaggttgtggtgaatcctgaaccggtggttactgcaccggtaccggaacaattggtgactagtgaagtcgattcgaggagattacctggtgtaccggtggatcttaaaagagttaaattctcgagatcgcatacgacgggacattcggtggttcaaccgggagaatgtaccgaacggtttactcttcggttaccggaagatgtgaggaagaggataatgaaggattggaaattgaaccggacgaatagtcttctggttcttcctagaggagggagttcgaggagaggtaaaccgattgaccggtcaagggctcggtctgatcgatggttgtttcgtaaaacgccttcgtttctgtggaggagtcgtgatgatggttcgattaggttaggtgctaccggtagcgttcgagccagtgctgtaccgaattcaaccggtagtgattcggtacgtgcaggagaccggtgggcttttcttagaaacgcgtcgtttttgtggaggaactcttcggtacatgtgccaagaggaggagtcaataaagacggcgaaggaacttcggttaaatcgaccggtgcaagtggctcaactagcggttcggtgagattaccggtttagttgacttttcttttctcatctttttcatttgtttttgtttgggattgttgataaatacgcaaatacattttcaattttttaattgaattatccttgttttgtttaaaattctctgtaacgtacatatgaagtcagatcgaaaacggattcacttttgaaaactaatgtataaaaaagcttataacaaaacaacggacaatgatgtgaggtgcgctgtggtgcaggtgggtttctcggtttttcaatattaaaaaagtcgtattcgtggacaaagaatatagctatccgatcccctgataaaatatatgctaatagaatatagttttgtgtttgtcgctaaaaatatgctaactgttcaattatgtgtttggtttataaccagagttttacttcctagtttatacacaatattacatgttctaaaaaacaccgactacgcttcacagaaagaaatccattttgcggatgcattttgagaaaaatctttagtcaaagtactactatttagaattattgcattttccaaaagaaataatataatttcatgcaaaattggttatatatgaaaattattgaccgccactaggtctccagtcaggtcacggatctcatcgtgtatgaattatcatgagtcaatttccatccagaaggattatcccttaaaataaatattagttaagggatatatgtaactctatgcatttatttcgctccgttatattacatgctgtgtaatcacatgtatgatgtaatctatgcatatatgtaactctagatactttagacaattggatgaagactgtcatagtgtgcaaaaatactggttttaatttgttttgtcgtctcgtctcgtctataatcttaagacacgtgttacgttgtatcaaatttacataattaatgggctttaggcttgaacaattaaggcccacaaaagcctgttaatcccatgggaagttgaggacgagaaacagagtccgggaaaagaaaaaagagctctcggagattcaatcactcatggcgaacgaagacgacgacggtgagaaatccagaagtctgcaccaacagattgctagaaaacccaaaacccagatcgtgattggtgtgccatcgtaccaggaagttttggaaagctcacagacgaagtccacgcctccatctctcttcaagccttcccagagtttctctcaggctttcgctttcgtcaagtcgtccgacgtctactctcctcctcctccttcctccgcagccgcctcttcttctcagccgtcgggcgcttctcaggtgccccacagttcaaggtgttatatatttgtttgacttacctttggaattacaaagtttagattagtttgatgaaattagtgctgcaattccgaacatttctactgatttttaccattcttctgcagtgatggtacgaaagtcgaattagaattgatatctctatgaaaaatgtgattttggttttgtttatttcctgagaaagaatgaaattttagacttgtaacttatgtagcttgatcatgtttctaaagattgaggttgaaaagtcggaaacttaatgtttcttacttcatcttcttgtgccaacagtcagattcagttttctgattagaatgttacatacatactaaatatccacttatttttgttgggtgtatgtttcttttgttgtagccaaacgcatcaaactgatggagcctcatcttcttctactcctgtagccactggctctgtaccatcaaacacaactcaaaatcgtaacgctattctcgttagccatcgacaggtgaggagacttaaacctccatgattcaatttccatcttctttggaattcgtctgacttatatttgttggataacattgatggtagaaaggaaacccgcttcttaaacatatcaggaatgtgaaatgggttttctcagatatcattccagattacgtgcttggtcaaaactcttgcgctttgtatttaaggtgaaactctgcaacttcaattttccatcaatgtgttaaaattcacaaaattttcacactagatacatctgatttactgcagcttgcggtatcatctcctacatccggattacctctatttccgcattagggaactacaaaagaatttcaagctaagtgttgttctttgccatgtcgacgtggtaagtcttaaaaccatattttgatgctaaatttctctctttttcagttacattgcatccagtgttttcgtttatgtactatgatacttatgcacaggaagatacggtgaaaccgttgcttgaagtcacaaaaaccgctctacttcatgattgcactctattgtgtgcctggaggtctctgtctatacatcaatctagttatttgcatctcatatgaaaacacatttcaagcactctgcttctcgttgataccactttctgtgtgaattctcttgcagcatgacagaatgtgcccgttatttggaaacgataaaagtctatgaaaacaaacctgcagatctcatccaaggccaaatggatacagattacctttcacgggtatggaaactctttaggctggcatattgattttttttgtcacttttgtaaattctcactgagtttatgatgtttgcagctaaaccattctcttacaagcattcgacatgtaaacaagagcgatgtagttacacttggttctacattcggggttgagctaaaaagaccttatgtccagttattgtgaatttatgatttttatgtttcaaactaaaattggaaacctcaaaaatcatggtttatgcagtctcttgctcatataatcgatgcatccatggaagatttagcacgttgtcccgggattggcgaacgtaaggtacattctcctctgtctataattggaaaactcaacaatcttgtgatagaagtctgaaaatcactgtaaaacctcaggtgaagcggttgtatgatacattccacgagcctttcaagcgtgcaacttcgagctacccgtctgttgtagaaccaccaatcccggaagctccagttgagaaggatgtgaactcagaggaacctgttgaagaagacgaggattttgtggaggactcgagaaaacgcaagaagaaggagcccgagcccgagaaaactgtgaagaccgcactctctgctgtttttgctcgttactctgatagacttagcaagaaaaaggagaaacagaaggagaaagatacaacaacggcgtcagatgctgaaacccaccaaaattaacacggttttgttccttgggtaaggccatggtgaccacattcctaggattgtaacttaatgataataaaaaagctttactgtgtctaatttgtgtgatctctaccatagaattggttggttattgaagcctgcgtgtataaatttcaaagggttgttactactttgttatcttttttcttggtctgggccatgtgcaatagtattataaacaaacaaaacaaataggcctgggacggcaaaaataagctagaggcttgatatagttagtccaagcccatgatctaaaattgtgttcgaattcgattttaaactttgatgatttccccgtggactaaggtgagataaaaactttcatatacgatgtggtaatcaaagaagacgagctaaatatattagtttggttttgaatttagtagatttaattttattaattaggtttgatgattaatactctagtttgtgaacaagaattaggtttgtctggtttggtttgcttttgtatagagtgcgtgttaaatgaaattcgaccgtttagcagctttttgcaaattagatatttaagatttgtagtttttgttgacatgtttcaaacgcgttagtcaatgtcttgtccaacatagacaacaaacacttgaactttgtgcaccactctttgcattattaacaactaaaatattactttattttctttttatatataaaagaaaagctttcggtgtaaatggttttaaattgcaatcgacaaaaaaagtaaagttgcaaaggactggtaaaagaaaagtgcagagaatatttcaagtgtaagtgaatcggtcatgagagacatgggtaaacaagtaaataaataacctgataaagtaaaagcttcatttttcgtacaatagttctgatcaaccaaaaagattgctggtccattcgttcagtattgttgatatcggatcgaactaacatttagttactaaattttagtactaacaactttttctttagaaaaaaagtttagaataactaattagttccttatgattatctagaggacttgttactcttttgtaacatatataacaaccctgcatttaaatattgtgaatgtgtgtatatatgtatgtgtgtttaatgaaagaaaatcaagttactgaggatgttggaacatgagggggacaaaagtgaaagtctatgatggaggaaaagagagatcaataattatattttaaaatcaggaacctatatattataaacacagtaatatacatgaatttgtgtgtatgtaaacaatgtaatgtatgtgcagtttttggaatctgacttccctctttttcggacgaaagcagatgtttccttctgcttcatgtctttgcaaacccaataaagtattctccttctctttttcttttcttgatccttgggatttgctctctttacacttttgttttcggttttgccccaatactcttcttgtcttgtggattttaccctgtaaaaaactatcaaacggtcatgattctaaagttaaaccgttagaccaaaacgacgttttggtaccaagaaataaaatcgcagtttgtttttggttaaagcttgatgaaacacgagactttggtttctgtattgtacagagtttgttactttgtttcaacgtccatatagtttttttatttggaaaaaaataatgatttattccaaaaataaaattgtaaaaacactaaaatgaagcaaatatattcataataaaaagaattaaactaaataagtatttctcatcacctaactttcatgctattgctcgatgatagtcgttaccaaccaattttatggctttaactcttttaggtgagagtattgaatacaaattgcaagatatttacttttgccacttataaaaacgtttatgaatcatctagatagtttaagttcatatgaagtttctcagataatagaaactacaaaacactaatcaagataaataaaataaaatgagaagacataaaataacatgaaccacaaaaatcaccatcttatcatcaacattcaacaagaatgagtcatttgaaataaagatattttagtgatttgtcacttaagggtaggtgtccttgcaagtgagggtatatatgtctattgcacacatatgtacacccatatagattcaaaagttgatgcatttgtacctaaccaaacaatacaatgctctctttaattatatatatagatacattgatagataccatagaagtgtcataatttatgtactctaaagtttgtgacccaattttggatatgcagtccaaaagcctccagctgtggacatccttctcactctcttttatcttttaccatagttgttaatcgtaaaatgttctattaacagattctttcaatatatataaacattcggatttaagtgataaaaatgggaaaagtattattttaaaaatttgttgtctttaacacgaatctagttcgtttgcaatgaaaatcaaacatattcttgaacttagattaattgatctacgcctttctcaggttcaattaatgtaaattaccattacatgcgcgtcaacccaaccaaattatattatctaaagttattttgattaatccaaaagactaatcatgcaataagacatataatcaaaaagctagtgaaattcatccaggtttacgtaagtgttaaaaatgtgtagacttagatcatcttctgtatagccccatgatataaatcaaaagttatgttcaactttttgtgttttcacattatcataatttattaaaaattcggattcatcaaaatataaatatcgttagtctttgtcaaatgatcagtaattcatatatatatatatatatatggtgtcaatctctatatatgttggggagtgatcttttaattttagtcctctatttgtataataaagaattgtaatattatgtttattttttttgtttttttaaattagaacttgtaaaaacgtgagacgaaaatgttcaatacatacatgtgtttcatgtctgcaattcgatatatagtttcattgcgaaacttacttctgagagatactttcaaaagatgaagtcaaaggtgttgacaaatttgctttttataatttgttttgagacttcgactactaacaaacttcgtctgtattttcacacgtatcttcccattcgtcatttgaccttcaaaatcaaacctaacacgtgatacatttagctcttgtgtttactctttttttgttggttagtatatacaaatccctatttttcatgagatcatataatcatattatatcaattatccttgtttattaaaaaaaagtatgtaccaggttatggccggttaatcttatttgtaagaaacatatttgttcatcattataacttaactgaatatggatcgtgatttaaaacagttgatacttacttgaaaatattttgctattctactaggcttgctaatcaaaacctgcagtatctggaagcatggttagtacgagagaagataaaagctgagcgcaagaatcaaatttttgtcaaatagtttgaagaacttttggatttttttttgcaataataataaaaacacctactaacttcatatgtttttttttgttacacagtttttaattacgaacaatgtatatgtttctataaaaaaaaatgtttgtattatcggttccgaaatagcttttagaaaatgaattttacgtgtcaaacaaaaataaagtgattttttctccttaagagatatatatttttgcgtaataattccaacagtgttaaaggtgggcgactaaagtatataagcacaaatttcagggacactttttttgggttaattatgtggacgattattgtatctgagcacacagtttaatcgaatgtttgtatagtatttttattgacgtaagcaaaatgccaaaatggtatggtatatatgatcattccaactctacgtgcattaacaataaacatgtaagcaattaccaccataaatggattgatatatagatattcattttcaaaatacagaatttggaaattgagaggataaaatttttaattactgcagtggatttgtgtagagcactagatgagaacataggttaggtccaacgtctataaagcaaacaaagttcataaaacaacagtttgatttggatactcattggcatgtgcttcaaaaataccccacatcttataatggttccaaaacattcacaattttattgattagtcaaaggtgtatagtagtggcgtactaaaagcaaataaaaatatcatttttatgataaattctatggaaaccgaaccacaaaggaaaagttaaagcctagtttcctcttaaaaataaaataaactgtagaaatattttaggaacatagctatgatactttcagtatgaatattatcttttagggactaacgtgtgtcatttttcttttgtcttcaattagatttaattcaaagatacctatagctgagcttttaaaatctttataaactgagttatacgaggtaaataggacccaacgttacaatttttcttaacgaattaattctaacgttctcttataattataacagcaatgaatttgaagttttgaacaataagaataaagtaattaaagaaataaccaaactgatatgtgacaaaagaaattaaactgacagcaatgttcgtcacgaggttggttttcttgatataagacgaaaaaacaacagagaaagttaataattttatctataaaaaagaagtgtctaaaatacctccgaaaatgattgctcaaaaaccctttaaaacaatgctaatatttatcccatctttttctcttatatatttagctttcgtggttttcttttattttctttggtctagcctttgtttttagctttcgtgttttatttgacttttttcggtcggagaaaaatttgacttcttaaggttccatggaccgacaccatgtacgcggttcaattcgatgacatgtgaatctatgcaagcttagtctgtgtaatttgtaattgtaggttcgtagagtatgtgagattcgaactatgaatagttttttttttttttttttttaaacttaaatcagttgattttagttattttccagatttgtcactttttgtataatcttaccacagatcctacacgtgtattcattctatctacctaacgcttactcacttagtgtggggattattttaatcttagtaactaaactcagtcaaagtcgtataaaatttaaagctgcactatgagaattaaaataacaagcacaaaatatcagtagtctatttattttcttatggaagaaattaatcacttactattatctcagtgaagtggtgcacatgcgtcacatgcattagcaagtaaatcgattttattgctaacatataaacccacaaaatatttcaactatacaattaaatagttcattaataattgatataaatcggaactaattggtggttgaaagctggcccaagaaaactctatctatcctccacagcaaagagtggaagcgacctacctgtcttatgacccattaaaaccccattaacattattgtaccctttcctgcttatatatttcgatttaaattcaattatacgtttgttattgtttaattttctaatcgagttttctaatcgagttttcaaaagatttggtttgatactactagtaaatttaatcgaattatacaattttttaactaattgagctaaccacattatgttgacaatctaacagtttatgtgagactttttagtatatcgatggtgtatgttaagtattatacgtaagatctagatcgcataatttagcattataggagtctttaactaatgtttaaactcactaccttacaatgtttgcgtaagtgatgttgttaaacaaagtccattttggtgacaaagacggtttcttgcttgcgattggatcctaaaccctctcgtcaacgatcattaaaatcattgatcacaaatcataattaatatcatgaaaatttcatattactatcagtgtcatacgtaaattattgtagtgatcgaagtttgcaaggaaatgatatatgcaatgaccaatattacttattagagaaaattcaatgtctaaataattgttagccttaatcaaaatatctggagaattacttaacacgtctgtctattaatatatggatatagacatttgacaaaatgcgaataataaataataaatcttcaataaaaaaaaacacacgagatgataagaacatgacaaacataaattattgaccatattaattaaagttgatttacatataaaccacacattagatatacgaaattaggaataatagcaaaataaaacaaggaaaaaaaacaaaacagcaaagtatttgtagttaaggaaccttaaatattcgaattaatcgtattcgggaagatgaatacataacacagctaagtacaaaagacgaagctgaggctgtacgttaagcttcttctttccctcaactctgtatcagaaaaagaaaaaacataaaaaaaggtacgaaaatttaaaaagaagaaaaagaaaagatttgatattaaaagtgtcaattaaaaaaagatattttgcaaaatcaaagttgggagatttccttgcaagctgtgccaccgccctctctctctctctctctcttagttttttttacagacatagaaataagaaaccctgaaacagagataaaacaaaacacaagttttgagtgtgttttttcaagtctctctcttctctctctgtccttgttaaacacagcaaccgcctttattacacaaaactctcttataataatctctctcaccatttcttctcttctcttcagaagaaagaaagaaactcataaaggagaagaaataagagtttctctgtcttaaactcattcattctttctctctctataaccagagttctgtctgtgaaaacacacaaatctaagagaagttatgaataaacaagatgttatgaaacttcaggtatacgtctccttctcttcttcctctgtttcttcaagcttgtgtttgatgtatatatattattcatgagctaattttttggtcggatttgttttttttttttctgcagacttgtgttctgaaagtgaacgtacactgtgaagggtgtaagcataaagtgaagaaacaattgcagaaaatcgaaggtctcttcttgctttctatttggtcatctcaaaattgttcattttgtgaagcttattttaaaacatgaacacaaaagtctgaaatttatgaattgggtttttctcagaagctatggatctatgaataatgatttttaaaaacattatcagctcaaatatatagaacttgtgaaatttatgaactgtgttgtgttttttttttttttttttttataaatgtttttccctgttttgtgagactttcatctaaaaggttacaagttttccaaaactatagagttcaaaattttgagatttactatctgtgtgtcctccatttatgtcaatttcccaaaactatatgaagaattttttaatcagtttggaataatctgacataaaaagttcctaattttaaccatagagtccaaagtcttgaaatttaactcatgagctgtccattcaccaaaaattactcaaaattatgttactttcttgagaagactctgacttctggtttacttgatattccttgatttcaggtgtttactctgtaaaagcagatgtagaacaggggagagttactgttacagggaacattgacccagctcttctggttaagaaacttagcaaatcaggcaaacatgccgagatcttaggcggtggtggaggaggaggcggcggaggtggaaaggggtttcctaatctgaatgggcaatttgcaaatctcaacatgggtggaaacaataagcctaaaggtggaaaagagagtaaccaagtcaagggtaaagctggtggtggcggtggaggaggtcagaatcatggacatggtcagccaatgcaattgaatcctcaacagattcaacagatgatgatgatgaaggctgctcacggtggtggtggtggtggtcagatgaagatgccgcctatggcagctaaggatcagaagaagtcagttaagtttgctgatgatgaagacgatgagtttagtgaagatgattatgatgatgaggatttcagtgaagatgattatgatgatgatgagttcgatgatgatgaagatgatgatgatgagatgggtcatggtcatggacatggaggaggtgggggtaatcacatgcctcctaataagatgatgatgcctaacaagatgatgcctcagatgggtggtcatcatggtaatggtggtggacctaagggtcccaatgagataatgatgatgatgaatgggttcaaaggcggaggcggtggaggaaagaaaggcggtggtggcgggtttgagattccggtgcagatgaagggaatgggtgagggtaaaaatggaaaggatggtaaaaagggtaaaggaggagagaagggtaagaaagaagggaaagagaataaaggtgggggcaaaaccggaaaaacagatgccaaaagtggtggtggtggccttctagggtttttcaaaaagggtaaaagtgggaacggagatgagaagaagagcgctgggaagaaagatggccatgggggtaataaggtcaaatctcatggtgggggaggaggagttcagcattatgatagtgggcctaaaaaaggtggtggtgggaccaaaggaggaggccatgggggccttgacattgatgagctcatgaaacacagcaaaggaggaggaggaggaggtaacaagggcaatcataatcatagcgccaaagggattggtggtggcccaatgggtccaggcggtccgatgggtccaggcggtccgatgggtcaaggtggtccgatgggtatgatgggtccaggtggtccgatgagtatgatgggtccaggcggtcctatgggtccaatgggtggccaaggcggctcttacccagcggttcaaggcttgccaatgagtggaggtggaggatattatccagggccgcctcaggcaagtcagcaaatgaaccaacaacaatatatgcaaatgatgatgaaccaacagcagcaacaacaacaacaacaacaagctgtagctcatggtggctatggcggtggtcacggtggcgacatgtaccatccgatgatgtacgctcggccttatcctgcagttaattatgctcaccctccaccaatgccgcctcctcactcggattcttatactcatatgttcagcgatgagaatccaggtagttgtagtattatgtgatcatcttttgtaatgttatttagaatatggacatgtatgcttgtcttagtcttatgtttttttttttggggatgtccttatcttttttactttggaggattggaaacaaaatgtgctttaattttgttagtggaatgatgtttataatatctcgatttcggaaaaagaatggttattggttattaggttgcagaaaaagtaggatgtatgttatgtagtgtttatcttagtgtgaaaaggatgttgcagccgcctatatagtaggtataacagcattatcatttatgataatcaacttgtatagtgtgccactactgttgtgtgatcacaccatattaaatttgacccataaagtaccaacctggagactcatgtgttgattatgatgtttcgaaagtaaaataatccaaaaaagtgtggagaaaactttgagaactatccattgtgttcgacccagttattttcgaaaggtcaaattagtgtatgattcgagaaatcactacagttgttttcactagtaagttagtaaccgttgtgtctcttatcaaaacttgaattcatattttggccaatatagtacaatattgcagacaatgtttccatttaccactcctttgccaatgggcttttttagagtagcacaagtaatactttggtataatctattgggcctgaaagagtggcatgccttagccttgtaataaactaatcccggtttaatcagtcaatcatattaatatgataccacttactaatacggaaaacttcccttctatgcttaagtcaagtcaaattttatgacaaaaagactccaattcgtaacaagaaaaattatacataaccaatatctcaagagatttattcttaaaccgaaataccggtttacatagtaccgggtgggtgattatacgtgtcttgaccaatcacattacagagactataactaaagagagaaattaatggatacttgaaaagaaaaaaagaaaaaaaaacgctcgtcttcttcttcttcttcttcttatattacttcttcctcccacacagacaaattttgtaacgaagacgggatcgcgataagatcacggtgatcgaaaagccctaagaagtattttcaagggaaagggacttaaagatgcatacttttggttacagagcaaatgctctgctcactttcgcagtcacggctcttgctttcatttgcgcaatcgcgtccttctcagacaaattcagcaaccaaaatccttctgctgagatccaggtgtttgaaattgtttaattttggtttattacatgtatcgatcgcttcttatgtggtggatctgcgtatgaatgccttgatttgtgacggattaagttgtttctgtgtctagcgaattgatcttcgtttgatttgattgtgggaattataatgtaaatgtattaagttgtttctatggatcttggaaccatggaaaagcctgagttttaatttggttgtgttgtgcttgcagatacttaatatcaatcggtttaagaagcaatctcatggtaacgatgaggtaacattttcatggtttccttaagtttatagtatacatacatctggagctttctcttcattaccgagtttctcgagttccctctatcgattgcttatattcaaattgttgaccatttgtttacatgtcatgcaggtcagcttgacactggacatatcagcagacttgcaatcactttttacttggaacaccaaacaggtttcttgcagtccttgtcctttgatattaccttaagccattgcataatagactgctcctggaggaaactattttactaaaatgctgacataaatagaaaatgtttgcaggtttttgttttcgtagcagcagagtatgaaaccccaaagaattccctgaatcaggtatgacagctgaatgcaaaggcttcttcttaggattgacttaagattggaactcttcaccaatggatattgacatttcgtttgcaggtttctctatgggatgccattattcctgccaaggaacatgccaaattccggattcaagtctcaaacaagtaccgtttcatcgatcaggtacagtaaacaagctggacaagtcttctgcgtttttacttcgtcagaaacggaaactgatcatcatttgggatttttcagggacagaatcttcggggcaaagacttcaacttgacattacactggcatgtcatgcccaagaccgggaagatgtttgctgacaagatagtcttgcctggttacagtttaccagatgcatacagatgatgaagattgaataaaacatcaaacctagtccaagactttttgtatttcagttttctgaaaagttttagactttcttttattccaaagaaaactaattcaaaagtactattgttctcttagaatcaaacaaaactattctttttagtgatcttaattagttgttaatgaggtgaaaatcacgacctcttaatttaaaataaggtttataacgaggtcaagtaggaccctgaattagaacattgtttcaacagaactatgacctaaaactttatctacccttttgctcttcatggattctctaattagcttaacatcagcccatcggccagctttggcgtatatattagatagaagaacatagattccgctaccaagttcttctggctcagcaaccatggatcttatccgatcagtgagctcgagattttcatgtatatcacaaccatttaacaatgcaccccatatattaacattgggttttaccggcatagtctttaccaatctctctgcctcttcaaaacgaccagcacggctcaagatatcaaccatacatccatagtgttcaactgttggttctaagccgtgaagatctctcatttctgcaaagtatctctgtccttcctcaactaaacctatgtggctacacgcatataagaccccgagatatgtgattccatcaggtgtagcattacctttctcttgcatcctctggaatatactcaatgcttcattcccgtggccgtgactggctaacccaatgatcacaacggtccaagctattgtatctttcttctccagatcttcaaacgctttttttgcgctctcagcatcaccggttttagcatacatatttacaagtgcacaaactatggcagcatccttcacaaagccggttttcgatacataagcgtgaatcgattgtcccaattgtgaacatccttggatcatggaagctctgataacactcaaaaaggttactttatcaggagctatacccaaatcaagcatatccaaaaacatacacagtgcttcctctgcatcaccgttctgactataccctgtaatgatggagttccaagaaaccaaggttctctcaggcattccatcgaacagatacctcgcagttctcagatctccacatttagcatacatatcaatgagacttgtagccaaaatcacattgaatccaactttggactgaaaatatggatcaaagcctaatccttgaagaaacccatgaaaccatttcccagtcacaatgtctttacatctaccacaagcaaccaaaagatccaccattattgtctcatttgccttcacaccattactctgcatctccctaaacgcctcaatagcgtcactaaaccgattgttattcacaaaaccagaaatcaaacttccccaagcaacaacgttccactgaggaatatcctcaaaaactctcaaaccataattcacttctccacaacacatatacatatgaagcaagcaagtagaaacatacatattcacttcaaacccagttttcacaacaaacccatgaacacaactcccgaattgaatatcccttaacccagaacaagccttaagaacataaggaaaagtgaaataatccggagaataaccttttcgaagcatttcttggtaaaagatcaatgctttatctggatttggactgtttgagtagcctctgatcatagagttccatatataaacacttggacaatcgatactttcgaaaactgatctcgcgtagctgagattcatagtctcaggacaagtagtgcagaaatctatgagtcggcttagaggaatgacgtttctgataactgaggatttgatcattaaaccatggagttgattcagttccaccaatgatctgcaattctctagctgagagagaattggtttgtagtgcttcttcatcatattctttgattatcatgaaattcaaaggcaatgtttttttttaattctggaaccataacaaacaaaaactcatcaaagtgacgggtaaattttggtaatttaaaatagtttgggtttattttgaatgttgaaagagtttaaggattattttgaaagtttcaacaaaagaaaaatataacctgtgtttagtcacaacgacgccgtaacgctgaatcagcgccaagcggagagagacctgagtcagtgagttggtatggcggcgaaggagatcgccggcgggagcggttctattgacgatggatccgattttgatccatgtcctatttgccttggacaattcctccgtgaatcctaccttgatacctgtttccgtacgcttcttctctttttcagttttctgttaaaacttgtggttagatgcttcttgatttcatctagaatttgaagttttgagtgtgtattcaaagattcaatcttttttttctgtgaacaatttaatcagattgattagttaattccaaaaagagattagattgattagctcttgtgtatcttagatagaccatagtaggtttatggttaaggtaatgactgagaccttcgtccatgaactgattagaacatatatgtttgttttgattttatgttttgttgcagacaagttttgtttcaattgtataaaacaatggatcaaagttgtttcaagcaaggcctctaagcaacgttcctcagtgacatgtcctctctgtaaggtctgcttcttggaaacgctcttttctgctcacaacaccttgaagaacttgtttacaggaatgaccataacttatgcagacagagaatttatccatcatccacaactacgatggatgttcttttgagcggcattatatcgacccgaatattccagatgggtaggttagcttgtggtttccttgatttgaatatatatgtgttctgagaatttcgtgatatcttactctactttcatcttcttgttttcagttttgtattaacaaaagaacagagatacaggttgcagtgttactacaccgaatcaggtttttcccttctctgcacttactttgagatcaaaacacacttgcgcataatattcaataccattacaatagttgggaatccgttactcgatttagtttggaataataaactgatagaaagtagattcaaatgtgtttatcaatcaagaatgaaagttttacaagaattcccttctctttctcggtctctttgtggtcttaaccaggtttcctcgccgatgtattcgatgttgcacggttttggaagctgcaaaagtttctccagccgaaccggtgccttgaagcctggttgaggagggagcttcaagctctgatgcaggtttgcttctgtacaaaatccctttcatggatatttctgcctttttgctgttatcttcttgttcagttgttcgcaaagatgattttgttctttgtttgcttcaattttttcccttgtctataggaggaagatgttgatattgttctgcatcatttggtcggtgtgatggaatccttctgcaaaaggtaattgttttaaggagaatgtaaaaacttagaactcgtgggtatatattttgattggctagagttttaactggtcaaagtagaagtttgatgttttgctcatgaatagtctctatttctctcatattcagaatcaaacagagacgcaaacaagaaacaagaagcgcagagacaacaaatcaagaacaattcaaagcagttgtctcagaagcagcacgtccatttgtaatggcgagaacagaccgatttgtggatgaacttgaactctttctggccgcgggactaaacttggaggcttatgatgcaatctataagcagggtttagaggggaacaaccgaagagagatcggtgcagctagtgaagaaagagaagaagtggaagaacataatgtaagaacacgagtgactccttatttgtttatcttcgaggaagactcagactgagacaaaacacttatcacttctgtaccatataaagaaactcataacttcgattaatgatataccagtttcgatttgtttgttttactttgtgtaatgctaacgaaaccaaccataccattttattctgttctcttttgttttcttcatattattcttcttttaaaaaaacgacaaaacaacatatcaccttattacatcacacgactatactactggatatactctctttgtaagaacttcctaaacagagtcatgtacataagcacttattgcaagctcaagcgttcacgataagaccacctgcacaaaaacacgtttgtgttataatagacgaaaacagagatcaatttgttaaaccaaagaaacagaggactctgatggaatgcccaatccggtctaaccacgtcaaattagaacttaccgtttggatggaggatttggccggtgtagtaagatgagcaatggttacaagccaagaaaacgtaggaaggagccacttccacaggctgagccgctcttttcatcggtgtctctgacccaaactgtttgatcgcttcttcagagaacgatgcgggtatcagtggagtccagaccggaccaggagcgacaccgttcacacgaatgccctttggtgcaagctgaagagctaacccacgtgtgaaagaaacgatggctcctttcgtagctgtgtactctagtaagcttgagtttcctgcgtatgcaacaaccgacgtcgtattgatgatgctgctcccttccttcatgtgctttaacgcatatctacaataaattacgaccaattaactctaaccggatcaattagtttcagaacctaagttcgagtttcagttttttttttttactcacttaaccaagaaaaactgcgagaagatgttggtacggaacactctctcaagcctagcctcatcgatatcctcaatggaaacctcatgctgctcagctgcacaattcacaagcacatcgatgcgtccaaaggagttcacaacttcctcaacgaccctcttgcaattctcttcaaaccctaaatcagtagcgatcatgatcggctctttagcttcccttgtcttaacctcgtgaagcaaacgcagcgtttcttctgcgtctttgtcctctctacctttaacgtacgtgaaagccacgctcgctccttcaagtgcatagcagtgacacactgctttacctatccctgagtctcctcctgtcacgagtgccacttttccctgcggataattttaaagataccttgtattacaagtagaagtaggtgtgtataaagggcaagttttctttaatatccttcacatattagttagtaattcatattggtttgctgatatctgatttattcttaaaccatagacaaaacgggatagaaaaaacaatcgaagcctatatacatgaagtttgttggaaggtttatagttagaactagagaactcgggagttggttccatgacatgttgtatccctggttgtgtctcttgcttctgcggcggaaacccacttgccattttcctattttcctttcagagtattcgaaaatttccgggaaaggttttggttattggcgaccgagaaaattaccgtagagatcgacagaaacaaataagataaagaaggtgtcaaaaagtgagagcttctttgagtgacgtgccacgttgcatctcaatttagatgacgtgtacaagccattgcaacggtgcagccagggaggagtccacgtggggaaaatcagcttatttgggataaccactagtcccattcagatatatacaacattggcatgcttcatgacaattgacacatagatgcctggctatttgaggcctctctttgtgtacatcaataaaattgattttatctttgatttaggtttttttgtttgtttgtggaacaaggcgcataaaagttcttctttctagattttttgtgttcatcacgtttgtaaccagatatcatagttactactttttaaaaataaatagtctcaaaatcttatttttaagtcttaacaaaggtacacaattatatacagacggtaacttagaatcgtgatcggtttgaaaacgtttataatttatagagaaggaaaattttaaaaataaaagttaaaatttaattacgtttaaataaactgaacttaacacctctaatcgatttcaataaattctatggttttcagcgtaatttaaaatatattattatactataaaaattacaaaaagaattcttaaaacttagttagaaaaccggaaattaaatttaaaacgtttttagttaaaaagaaaatctaaaaaataaatgttaaaatttaattacatctaaacaaattgaacttaacacctctaaccgatcttaagagattctaaccggatgctaagttcgattggtttccaacgtaatttgaaaattaacagttaaattttaaattttcttttaaaaatatatatttttatacttcaaaattaagatatttcattaaaaaaataaaagtgagaaagcaacaaacctagatttggtgactcgtccagccatggaaactccaaagctgctgctacttgctcttcgctttcactgtccctccctcgcatcattagccgccgtctacataacccaccaatgaaagtgttgcggtggtgatccgtatggaattagggtttgactgtagaaggtagtcacgtaatatcgaatgcacaacagacgatatagagatcaatctacgaaacgagacgatcaatctctgagatgaatccgttgagatcttcttctcaggtttctcagatgaatttgttgcagagacatggaatcatcggctttacaagattggcgatcaaacattggcaaaatttgttcgacacgtatcaaaaagaaaaagaatagaggttataaggagataatgaatggttttactttcgaacaaggagaatgaatatgattttgatttcgatttctgagagagacgacgagtatttataaggaaaagaatcgtttgtttccttttatcgacaattttggttgtttccttttaatttgtttggactacaaaaaaaaggaaattgatcacaacggtcataaataattacaacggtccttaatcccttgtatatttgatttgaccttgacaatagtcaatagaatctgaatggatataattttataaaatttgaaagaaaaactataatcttctctttccattgtttctattgacaaataatctcaatcctgtttactttctcatgtatacagagactcctttttgttcatgtgttctctactacacttttatgttcatcaatgggatctccaagtctcttttgcagataaactgctcatcaacatcatccacatttcagagtctattcattcttctcaccattcacgaagctcctgctcctcaagattcaatcaagaaatcttcaaatgtagctagtgactgtaatcgctgccccagcgacgcaatggttctctggcactctgcaaactttgaagcagccactgctagttccttctcctgtcattgtcacattgtcatcaaggagttttattacaaaaagaaattaacttgcgagttcctaagagaggatataaacttacctgcttcagctcaaaacctttgatatggttaggcgcaggctctgtttcttgatgatgctcgagttcttgttttagttttgagatctcatcttgcagttcgttgcactttgaattgtgttttgctgataaagcacgttccttctctgtgacgtcttccagtgatttgattttcaagatcaaagattccgcttctgcttcgacatctttaagtcttgattcaatcgcttcagttttcccgtttgcagcctttaaaccatcctcagctgcttcttttgcatcctttgttagatgcagcagagtttgaagctctgttaactttctctctgtctcctttagccgattttgcgatgtctcaagctgctttttcgttccatttaaacacatggtcagttccagcttctctgctcttctagtctctagttctgacagattcacttgtgctttgtttaactgtctttgaagatcctccatttgctttcctgattcacccaacaacaactctagttcctggttctctgcttctagtttcttcatctccgataacttcccctctatctcctttagtcgactctgcaatgcctcgatctgctctttggatccgttcaaagccatctccaattgtagtttctctacctctaccatctctactttttcttccagttcagaaattctgcgaagcgaggttttgagttcatgctttagttggttaacgtgagcattagatttctctaactccttgttactctctgaatgttttcttccaggttcagaatgcggcaaagcagcgagcttttccatctcgagaaaatcatccatcaaaccaatatctactgaagtagccattgaacttttcccaataatcttctctgatggactctgcatttcattatcactaaaagaaactctcccggaatagtctgattggttatctatagaagatttgaggtcactggaattgtctgatctccgaaccatgactctcagtttcctgcattccgcttcaagtttagtcaactttttgatcccttccaactgttgtttacttgcagactcagcagcctgagtgcttaagtccctctctatagttctaatcttgacctcctcagattttgaaagtagttgaagcttcaaagcagagttctctttctctaaagcctcaagtttcgggtaaaggtcttcgtggaccgaagaagtagtaacgtcttgtctagcttggagctcctcgattcgggcttcaagttgagattttgtagtttcccattctttgcatttattgttaatagcttcttcgatcttctgattttgctcttctcttccttgccagagttgcctcacgcattccttaagcgcactatcaagatgactatttcgatcctcgagagccgaaaccttacttgtagaagcatcaagctgttgcttcagagccgcagcttcgttctctgccttttcccaacctagatgtacattcgtttattaaccaagaactaaattcggtttctgctacaaaaagaaaatgtgacaagacacaagaactaacctgagacagcttcctctgcaactttagcatgctgtttagcaagatcttcttttaaactgacatttaaaagagctgcagagagcctctccgtaagaatcttgatatccgccgttgcctcttcttctcgtgttaccggtttagagtttaattccggtgattgagatctctgaagtttcacacacaaattacaaaaccaaataacacaatcaaaatgattaattccaagatttcaccacaatcacataatgtcacaaaggcattgcaaaaaagtgtaacctgatcgtcagagaatctttcagagtgagaagagacagagccagtactctcagtttcgccgggacttttctcagatgactttctccgccataaccagctcctccggtccatatccaaaaccaccaaacattcagaccaaactcatctgcaacaatctcaacagcagactttaactccaatttagttgcgacctaaaatatttaaaaggaggaagctttaaaaatggggcaaaatttattgatctcacttataattcactctctgacaaaaaaaaaacaatatttttcccaacaagaaaatctcttgccaaataccccaatcaattttcagaaaaagaaagaaagtgtttggtgattttgattgcttgagatgtaataaaaagatgaacaaacgtaacagagtacctaacttaacaccacatccacatacatacctcaaatctcacgccaagagaagttgaaataattgaaggaagaagatttgtgtgaatctggcttcgatattcaacggccatgttcactaaagaacagattgattagttttttttttttttataaagagagtaggaaaaaaagaaattaaaaaagtggaagtctcgatgattgagacccacatgatagataatgtgttgctattatacttgttattttttttcttataaattattttgtgaagaaaattcgacatctatcttacagccaaacactgaaaaacaacaaatatttaacaagaagagaaaaatagaagatgtttcggaattggttattgacgtaatgtggaagaatatttacagaattgtcagatatgtaccagtgtaaggaaatatattagcgaagacagccgtatccgtacaaatctttgttagaccctatagaattcaagtttctggggtccttttatttcataaaaaatattaaaataaatccttctactgttttttttctcttgaaattgttttgagagacagaaagtttgaacatcacagcagctacaaatcgattttgttataacactattttctacaaagtaaatcatggagtgtaaataaatggaacagtatccaaacggtacaaaattgggtaactcagaggagaagaaacattatagcatctacagatatcagaattcattaccttttttgttctataaagatcaagtttcaaatttctttttgaatcatactttgacattgaagatatagagctttagcacaactgcaagagcgagctgcaaaagaaagatgctggcgataatcaggatcgatctctctccagcggaattgatatgcgctttgaggttcaaagccacaaatgttgcggacatgaacccagctacacctgcgatgacccatctgaaaatctccactggcacgaccgagagacactgcagtgtcagaaacagattaataagtcaaagtctcattatattcagatgtttccatatgtatcagaatttataggagagatttggtaccaatgctgggataaagacgaaaagggaatagccataaagacagaagagttggactaggcctgatggtgcagagaagtatttgagaacgacatataatgcgagaggaacaattgtgacatagccatagaatactcctgcagaccaagtcactagattaatatcgtagttccattcttgtttcttccatttgtgtgctatgtatgtgacaaatgtgccgatagatgctgcaacgaatatcaaggtggtgcagatccagaatggaccatacctgaaaaatataatcaattttttgagcatttgagaattcacctctaagttgaaaagagataagaaagacgaaactcttacaagtcaggtttatcagctgtcttctctgtaaatgttccacggaatgggaaaagggattctttgagtctctcaactacatcggaagtgtcgacatcaaagaagggcttgtaagcaccaacagtgaatttatgaagccagccaccagactgaggttcatctgtactaccattaccatgcccagaaaatgaatctgcaacaattcaaaattatactataagccttaagatatacagaatggcaaagattgggaccacgcaatcaacatgaaccagtcgatgaacacgtttccacatctaaattcttcaatctacttgctcaaacattcggaaattctgaagtcgagagaatcttaccgtcagcatcacgagggggattactaccaccagagatcttgccctgagtagcagatggaggaaaagtttgtagatttgactctgcaaaacaatgcatccctcaatcacaacttaacatgaacataaccatgtcaaatcaaaccacacttctactattggctaaaccctcatctgttcaaactacagtttaattcaaaatccatagccattacctaacaaattgcagtaatcttagctaagattcaacatagtcttacgtcccagagaaaaaaaaaggcctataattccaaataaaatcgttctttccctaaacgctctaatatcaatttcacctcagcaaccaaaaatcataaaaacgagaatgttacctgcgaatttgacggtggtatggcctggatctggaacagactacgattgacacaaacaaatctagatcagatcggaagaatcagtgtagggacgagcactcatgtaaacattcgagatcgagacataaaaaacttacaggtacagatccagagactttctggctgtctatagtcgtgtagttcccgccggacatcatcttgttccgatcttccgttcgattctctctgaagaaacgatattggccttgaagaaatctatactactccggtccaatgagatttgacgggaaccaatatggcaaaaccttcttttttctttttcatttagaagcatcggcccactatgtgtttttatttttttatttttctcttattttatttttaaaatagggtaatatgttaaaattcaacgtttgcaaaaaagatacacaacaacaaattgatatgcaaaatttatccagctaattattgttacgcttaaagttgaagattccaaagatttgggagatatctcacaatgatcaaaaactaatgaagctcaacaatccatacaataatgttataaatttgagtttcttaagaaacgttcatattacatcattttctttgattcttctacacaaagattcttacttttattacaccccaactacacacaataacccacctagaacacaatccggctacaaccaattttacataactgatgtagatcattcatcatctaatacaacttacaaggacgtgaaataagcttggtggtgggagtctctaaggacttcttaacttaccctttgtgtttgtgagaaacagggttctacggatagctagaatgagaatccatgtcgttgctgtgattttctccttgatcatcaatagcaatgctgagctcaagacagtcttcaagatttgagcctgcaagcccttaaagaaccctaacattccttcttttctccatatggcatacacaacccctggaattgttttccttgttcttcttctcggcttctttgtttcgttttccttcgactcatccgcagcttgaatcatcaccttgcacctgcaaaattgagcccaatatgatgtctgactcagccaaagtcttaaaattatgtgacttgagaagttcatctgagccagaaagttcactagggtgaaatcaagaatactagtaatctttgtccaacaggtaaaatacctgattgctggatatgtgagcacggtggcaacacttttggagaccgcacctaagacaaacgccataaaggcagagagcactaccggagaagaaccattctcggcttttgcatttttctgcttaagaaggtgctgtttcagctgatcaaacactgtatactgcaaagagtaaccaactatttcagccagtcatgttgtcaagtgacattgaagtgagctactcgagtcgatagctcatggctttacatgagaaatgtacctgaattgcaggatttgaagtcaataaaagagagatccctaggccatcaaatgcgtctgcccatgaaccctctgttaaggtcttccacaacccttttgattctccaaactcactagtttgcatccttgatgaagctgtatctagaggctacacaaagataagactcagtgctttaattcatcgatactgcaacaagacgatcatagcacattatgtagcaaactagacctcaacttttcattccaacaccaagacttcaattgtttaacaagaactccaaaacataacatagctaatctcagagatcatcaaggtaaacgtacctgaattaagacagaagtacaagccccagcagcagcagcaatgagcaaattagccttagttccaattgatttagaaccagtcctttcactatgaactctcttgaaatagctatagctataaaagtagatgaactgagaaatgaaagactgaaaattcttagttccaaggccttgatacagtgaaaagacttgtcctttagaaattgcctcccacataacatcggaaagatatctgcaaatatcacccaaaaaaaaaaaccattacaaaaaaaacacgagaggagaccgacactatctatagaaaccgatgcacccaaatcaaaggataaagaaacctgtatttttgctgaccacgagctcgaacctcggcttggaactttgatttacatgtatcaagaggatacaagatcgttgtactcagaagcgacccaatagctcccgaggttgcttccgacaccgattccaaatcgacacccatctctccgatctgcgacagcgacgaacagattgaggttgtgtgtcctcgcctctgggaagacaatttgggtaggtgaaatccgtaaagcgatcatatgattttgcctcgggagtttaaaaagacgtcaatattgacggcgttaacatcgccgttatgctgagatttgatgcttctctctctatttggtacacagacattggtttaaagtttaaaccgtataaaatgataaaattacaagaagaaagttgatatatatggcattgcaagaagaaagtatattacatacatacatacaatttctaaatggacgaaagtaaacacaagccaacattaacagtaactgataaagagggtttaagcaaatacatttctgatgaagaaaagaaagaagataaaaagagcttacgagttacgataaactgaacttcccctttgtattctgaaacacttgctcggcgatactcagatcgagttttgtaatctctaggttagagttatggtagcacccaacgcctctcacaccatctgctaagatcctattgaacccaatggctaaagctgcttcgactttcgcctcgtacaccaatctctgtttacaaagtaatcaagacgaggtttcagaaagaagaaacaaaaagttcttattaccttgagccttgagagatggatggctccaaaacacatgggacaaggctcgcatgatgcgtaaatctcgcattccgatagcttaatttcattcagtttcttgcatgcctgtgtgttcgccataattagaaacatgtcatttttgttttgttacttgaagaagattactacctctctaatggctatgacttctgcatgtgccgttggatctttgtatttgaaaaccatgttgtggcagctcactacaatatcgttcttatgaacaataacagcccaaacggataaccatcaccacactcaactccaatatatgcctcttcaacagcttggcttaaaaatttatcgcccctagctgatcaaatcgacaaacaatgaaacaagtaacgtaaagactgcagaaatataaagtggtcagtcagttaaagaaattcaaacaaattcttgtcgtcttagctaaatcaacaacatactcaattctaaatgaaatcgtttctttcctgcatgtttaactatcaatccatctaagaaaccgaaaatattagaaaatattaatatttttaccggcgaattcgacggtggcatggtcttgatctggaacaacagactacgaccgtcacaaataaaacaacagagaacagatcagaagaatcaaacgcacactgttgcatgcaaagaaatataaaattttgatgagcttacagttacagaagcagagactttctgtgtttcggtgatagtgttattctcgccggacatcgtccgattctttaatgtttatcagtttatgcgcttttccgattctcccgtccgtcacacagctctctgactctgaggaacaaagtgggctctcaaactgaactactctggcccaatgggctttgatctaatacttttttttgtattgcgatatgtctgtgtgtcttattcataattttaatgtcccgccattttcaaataatacattcctatgtacatctccgttgttagcatgccattcatatttatttttttgacaatgcaagtcattcgtatttcaaactaaaaaattacattttttgatttttcatatacaatcaagtctactagtaactgcaagattttgccgaggtgtattttgataaatgtgcgataaaaattagacccttaaaaataaatgaatgtgttacttaattatatatatttaataacaattcaaatctaacaacatatctactaatgcactgtgttattatgttcttcagatttgatgcccattgttatgtgtttatttgtaacttaaattttgtctgtataaattaaaagggatattaacaaagaaactatattattattataatgcaagataaggatattcaaattaatgcatgcaattaaaagctttgaacccaaaaaaggtaaaaacagaagaatactaagaaaaccagttgtatccacgtcaagatcctcaatctccttcgtccgatgctcttccacaaacgccaatttcaccgttaaaaaacaaaacctattcactaagtagacacatggctaatttactggaaatggctaatgataaattaatcaatatataacattagacgaaataacaaagaagaaaaacatgacatagttgtagaagaataagaagaataagctttgttaacgccttttgatatcttaggtttctgagacactgtaagattctctgatcatttgctctctttctctgtttcagtaattacatattgtgggttgtagaaaagctgtatccttttcaacttacaatacctgaatcttgattcttgagtctcaaagttctcagggttatgtttagtaatttgagattggccattgtgttcagtctcatgatcagtatctgtttattctgaaagtatttgatgttgtttgcaaagatcagatgatgtggatgggtgtgggagattctagtggctcgccaaaaccgataagaatcgttgtggttggtgaaaagggcagtggaaaatcaagcttgattatggctgcagcaagaaatactttccatccaaacatcccttctctgttaccttacaccaatttaccttctgaattcttccctgaccgtattcccgctactgttatcgacacttcttcaaggtaaatgtttctcctgattctatacactatacattgacatcaaaaaggttatgcatagaattttctgataaggttttgtggataaggcaaagataattgaatttattgttattaatagtttaatattttgtcgataaccggggttaatcctaggccgaaaccggtctaatccccgaggttttatagaaaagccggatattttttccatttaaggtgtatacattattagccaagagggaagtacgacaatttgtctagaaggtggaactcgatccttggcttttgacacacatgcctagtcctcaacccgtgcgaaacaaaccactgagccacgcgctcttggttagaaatcgaatctttatactattgatgtctctgttgattaaatctgcagaccggaagacaagggaaaggtagttaaggaagttaggcaagcagatgcaattgttttgacatttgcatttgatagaccggagactcttgaccgtttgagtaaatactggcttcctctgtttcgacaattagaggttaataatttgcttcttttctttttctttcttctccttgcaagcagtaaactatttgcaatcccctgaagtattgtaatatttcttattaaaaagtttgtcttgtcactcttttattgaacaggtgagagttcctatcatagtggcaggttatgaagttgataacaaagaggcttataatcacttcagcattgaacaaataacatcagctctgatgaaacaatatcgagaggtcgagacatctatccagtggtctgctcagaggctagatcaggtccctttgctttgcttgagatcttaactttacgcattctaagaactgaaagttggatctttgtgatgaatctggctagttttgattttcaattttcaggctaaagatgttctctactatgcacaaaaagcggttattgacccagtaggacctgtgtttgatcaagaaaacaatgtactgaagcctcgctgtatcgctgccttgaaacgtatcttcttactctctgaccataacatggatggtattcttagtgacgaggagttaaacgagcttcaggtttcttcttattccctctctttcatattgttcttcttgagtgcttttatcagacagttttaaaaggttttttttttaaacagaaaaaatgcttcgatacaccattggtgccttgtgaaattaaacaaatgaaaaacgttatgcaagtcacgtttccacaaggagttaatgaaagaggactcacattggatggtttcttgtttctaaacacacgtttaatcgaagaagcaagaatccaaacactatggactatgctcaggaaattcgggtatagtaacgatctaagacttggagatgatctagttccttattcatcattcaaacgccaagctgatcaggtaaaaaatctacagaaatagaactctgttttttgccttcattgtgactatttgttgctgtttctgatcagtcaaatcttttgtcattgtgtagagtgttgagctaacaaatgtagctattgaattcttaagggaagtctatgagtttttcgacagtaacggtgtaagttcttctttttttctattttatgtcttaggtaatattagatacttgtaggattctaaaaaatcatatttgaatttctcaggacaataacttggaacctcatgaaatgggatatctctttgaaactgcacctgaaaggtaacattttcgacgtttcaaatgaccgcaatttctgattacagtgttctaattccatactgattgaatcattaattacagtccttggactaaacctctgtataaggatgttacagaggaaaatatggatggaggattatctcttgaagctttcctctcactggtaatcaaaacaagttttgtaaatatctttaagaggaacctattaaagatttgacatttttcctgtctttgcagtggtcattgatgacactaattgatccacctaggagtctggaatatctgatgtacattagattcccatctgatgatccatcttcagcggttcgcgtaactaggaagcgagttcttgatcgcaaggagaagaaatccgaaagaaaagttgttcagtgttttgtgtttggtcccaagaatgctggaaagtctgcattgctcaatcagtttatcggaaggtcatacgatgatgacagcaacaacaacaatggatcaactgatgaacattatgctgtaaatatggttaaagaacctggagtgatttcagatacagataaaactctggtgctaaaggaagttcgaattaaagatgatggattcatgttatcaaaagaagcattggctgcttgtgatgtagcaatcttcatctatgattcttctgatgagtactcgtggaacagagccgttgacatgcttgctgaggttgcaaccattgccaaagattccggttacgtgtttccctgcttaatggtcgcagcaaaaactgatctcgatccattcccagtggcaattcaagaatcaactagagtaatactaatctatatatcttcttgattttcaggaatattgtaaacataagttgattaatgagtcatatactgaattttgcaggttacacaagatatagggattgatgctccaataccaatcagctctaaattgggagatgtcagtaacttgtttcggaagatcttaaccgcggcagagaatccccatttgaatattccagagattgagtcaaagaagaaaaggagttgcaagctaaacaacagatctctaatggcggtttcaagtatgttcagttcttggattccaaaatgtttgatcaaatgcttctgtatctcatcatgattccaaatgttttaacagtcgggacagcggttttgatcgccgggctggcttctttccgtctctacaccgcaagaaagcagagttaattcttagctgaagaaagttcccagacctgcaattttcattgttgttgtttgtgcaaagatgccttgttccataagcaatgaattgttttctatagatttacttctaatcatgaacagaaggacagattatttaaaaaactaaaaagaagatctaagcattgttctttttcctgtaaaatttacacaacttttttttaccccacaaataaacgaattgtatagaaaagccaaaaaaaactagacctaaaatgccagttcatccactagaacaagaaacagaatttgagccatagctaatagcttgcaagctcgaatgagtcatatttgtcatccatctccttggaactccgtttgattcaccagccagattatatgcataagatctccacttgtttccaccatctttacaagaactcataaaccctaaccttctcgctttctgtgtcctctcaagaacaatgagactagagaaagtcgaaaagctattaccaacaaaaacatccgctcttaaacacacctcgtaatctatagccgattgtatcaaatatgaatacttcccatatatctcctctttaaccccaagcttcttcttctcaaatggtattaaaccgtctctccaaccacttaaaaccgatgaatcttcttctttttcttctaagagagtatctgctactgcaaggtaaagaactgttggagtctttaaacctgaaatgttccctactctgtccaaaatctctcttttactactacaaatctctgagatctttttccgttgctctagtttcttacaatgtatcatccaatctatctctattctcatgtgaaccgcaacaaaaggtaccggaccgaggatttcggttttcgatgcgagttttgccctttctgcctcacctgcttctcggattttcatcacaaccttatctgcttctcttgagatttcatcaaccaccaccatacactcaaagaccttagcatagtcttcaacaggccaatgatcgtgccacaagaacgggtttttccctatgagacggatcacttcaaactcatcgatggactcgttacgagcggattgtttcaagtgttccaagtctctttcaaccgtccatcttcttccactacctttctctagatcaaacacttgtgctctgtttttaacatccgagaaccgagaaagccgcacaaaccctgaacagagagagttgaatctttcaaactgaaacactttatcaaacggaatgggacgaagcttatcaacttccttgtagaacaaggaagcacttagactaggcatgagaagcgttctgttcatcattcttgccgtcaagcaagctctagcaaaagctatcttctgattgtttagtccccagacgatctgaggaacctcgagaaacttatcagttcggattccaccggttgaggaggaatctgacatgtgacgatctcgaaacaataagctattgctcagagcgtttctgggagagtaagagagtaacagagctctgtagaacagagcaataccaacaagaacaagacatttgcaagcaacagactttgaaaagattctcagattcttagaacttaacggagaattcatccgagagagagagagagagagagagagagagagagagagagagaaaattgtcgctatatcgcttcagatttcacttcttttccaactcaaaaatccaaactttcagatgaaatcaaaatctgagtcgagtggaaatgtcagaaacctgcatgaatcgaagtaattagagtaatcagacaccaaaagtaacatgcatgcaattgcagacagaggtaagaaccctaaaatcccagaagataaaaagtttcaaactttttgcaaaccttcagggagattagttaaatcctcgaacttgacatgcaaatcgatttcagaagaaacccagatgggcagaagacattcactttatcgatcaggattaaatcaaaaatcgcatctttttaggtgtaagtttgcaggtgaaaaatcacaaggaataaagcccaaaagagggaatttttagaacaaaccaaactctagaaaacctagagaaagaaagagattgacaaattacaaggacaatttctgccttacctttttattaatttctggttttgttttccttaatctggcaatattttgaagaagagacaaataagtcccataaacccagaatagaaaaaaaaatatggaaattgacgatcaaaatcacgctccaatcacggattatcattttttttttttttttttttttggagaacgctttaaagcaaagcaaagcaaagcgaagagagaatcaaaaagaataatttagtcagaaaaaaaagaatccatcgtaatcactgacaactaagagaacccacaagaatatgcaaattgaggtttcgatatgtggaaaattaattttaaaagaagcttcttgaacagaatcacggagaaaagtgccaaagaagggaagatttgaagtgatatcttgtgaataaattaaagattgataggtaagattggtggatatattaatatttaataatgtggttagggtttggtgaaatctatattttttttaagttcacgcgttatgtctaattatgcgtttgcaacgttataataccgaggcatcattaaggagaatttctttttgcctcaattaaaggaaatcatatactagtgataaatggcctcgaacaagtcgctatattcgttttctttatcaacttcgcaatctcaccaactgttcaatcaaataaacaagtattcttttatacgtttaattgattatgtatacaagatgctaattttgtgatcttcttacgaaaaagatgtcattgctagactgataatttgtgaattgttagactccttttataatttttatttttttcagcaaattgatattttgattagtccaaaagcacatggtcgtccacattacacagtagctaattatcgcttatcacgatgcgacatcgttttagccactttgccatgttgcctcccccttgttttttgagaaataaagtttttgtattttcttcttctaaaaatttatgtaattaaaaagacatttttgcgtgcttgtctcattcataagtcaacgagttaaggcattaccattagattgtcgaaagtcaaaacagacggtttcccaatttttctgtttgttgcattaatgtcaatcagtttcagattcatattggccaccaaagaagctaaatagtttaatagtgttataccatgtgcagctaaaagaaaagaataaccatgcatgtattttaatctttaaatggttgtcagaaagagtatcacacttttcattaatgcctttgcaacatgcaacatggaaccgacgaggaaactcaaacgcaatttctacaacccaatagtatcacatacattaatactcctacaagcttgtgtgaaagggattggggacccaatttgatggtggttaaataaaatactatttatacttagaagtcaaaaaagtgttcaaaatttaagaaaataacggaaagtgtgaaaactttgtctgggttaagaaaacatgtatggttaacaatgtttattctttcttctaataatcatatatttatgtcagtatcataataccatcatcatacccaccgctctaatacgcgtatccgacctctcgatcgtatctgtcaatcacattcacaaagagcaataccgcggaaaatactttagaccaaagactctcggaaaagtttggtccgcgtaaatttgtttgggttgtcatacttatttgtttctttatttttttcccaaaatttattaaaggatcactttttcaaaattaaatttattatatgatcactcatgatttttggatcaggtttgggccgaacatatagtggaccaaattggtctagggcccaacattgaaaagccgaaaaaatggaatattttcatgtacctggaccctttcagtgggctcaacgaacgacgaagtaatttatcatagtcatgtttgatgtttctgtcagttttgcgagtggattaacatttattgtacaatcttgaggtctgaagaagagattgtaaagtttgtttattaacaaaaagggagttgtaaaagaagctttgccagaaattacttgagcaataagaaaagaattgtttagattccaaacttaaatatattttagttcttgtgctcatgacaaaacacataattagtttgacaataaactgaagaaaataagatctaaccaatgtttttttccccgtcttttgagttttgctatatcaaatcgcttggcagctacaagctatctctccaagaactgttctaagttttcttgaatcacaaggcaccgtttctttctgcaacatgagacagtgtttctcgaaagtctccgttgtaatatatagcctgaaatcaacatcaaccaagaacgttctctccagcctattcatctcttcagtgctcactcctccgatttttgcataatatgcgttgttataacacctaaactccagaaaagacaacatactcataactctagttataataatgtagagtatatgtgagatattttatgtctaagaagatattaactggcgttccaagaattttgctgcgaccaagagactggtgatgagaaggcgatgaacgttgagtgatgtgagacgacgagccgtactggtagcctctggtctctgtagatatctaaggatgtaggcaaaagctgcaacgaaacacacagggctacactgagcatacctatggattctttctgtgtaacgataaatgcttaacgatggtgcttttgagccatggaacatagtgatctcatcagccctgtttacatgagattcaaatataagaacggaggatgtagaaactatagatacaaagagaaatctcaattcagacattaagaaactaaacttgttgtgtcttgtgtggaatttttttttgttcttctgaatcatcttctcgagggtagaagcgagaagggttatgactcgaggaggggtagaatcaggaggctgatcagaatcttctagaagacctaaccattggaagagtgatgagttggtggagtttctagaagtttccatttttgtgttggaattgtttgagagagctttagatcttctctctgattgttttttttgcttgaggtaggagcttgtgtaaatggaaggtccgaagcaaatttgaagctcttttgttaaagttttgctactttagattcttttctttgagagagagtaacgtgtagtatcttgctcaacaagtatatattattgtgtgtggagatgttgtgaggcccaatcgattgttttgttttggatggctaaccacagtttcatctttaatgcttttatgtcatgaaaaggcaagagagaaactgagaagtgatgacttaaagcaaaaggaagcaaattacctaattggtagcccaacttttattagacttttatgaaattggtgttccatattgcctattggcttttgataacactacaaagttccatggaaagtagacaagctctaaaggtccactacagagatccacataacaagttaactattatttgtcatcacaaatatctttaagaaaatgtagcatagtggtaccctcaaattacacccacatttgaacaaaagtaattccaataaataatgttttcctccatatattttcttgacgataaaacaataacttatcaacgatacacaaacacatcaaaaactaagataatatcttctttcattaaaaactctctcatattagattctccttatcgagaatctcttaggaaccaaaaccggacgctgtttcaatccactcaccatctcatgatcatcgcacttggctacactttcctgctcttcattggagatacaaacctcatagctagtctcgatggcgaaaatgacctcctgaactttgcagccgttgacagcttctgcgacttgttgcacaccctagttggagaaatcgaagctttgggtgacttcttacaaaagttaccatttcttgttggagaaagaaatgcttgaagtgtgactcttttcggagaaatagacgacttacgagccaagttactgccatttctcgtaggagtaaatgatcttctgagcttagcagcagttgatagctttggagacctctttcccgtatttctaataggagaaatcgacgctgacttctttcctaagttaacagttcttgtcggagacctggagcctctaggtgacttccgaaccgagttactgccatttcttgtaggagaaaccaagaccttaggtgggctcctgatcttgacctgaaacttagatgctgatgtgggaggagatttgattaagaacttgtaaggcgtttctttattgttcttgatgctggatatctcatttctggctatgaccggagacattgttctactgaactttgcttgttgtgtagcggtaccggaaataaatagagggttcggaaaaagaaccgcctttttaacccaaggtttgtgctttggtgaaaccctgttggccaaatgccgaaaactattctcaccattatttccctttacttgtggagagatggttctgaacgcaattcttgagcgtgccctttgtagagatggaggagaatctgattctgatcgtctgttctgcttctctttcttccttcttgctttgatattgctactgacagtttcaggattctgttcccgggatttttgttgtgtctcgggtgttttagggccatcgtcttcttgtgacattgttaatctcctggactttctactcttctttggtgctatggcgtccacaatgtctcttgtgacctgtgaggcttgtaagatttcatttacagtctctcctagtagcattgctgggagtgacattttcctccaatctcctacattacacaaaacaaagattacacattacacaatctgcaggacctaaaactaccttggtgacacaaagaacttttgatccgataatgtaatgaaaattcgacaagattacaaaacttaattaattatcctttacagcttctgttgtgacctattatacttattgcttgtgaatatatgtgtgagaatcagagagagaatttacctggtgaggaagcaggaaacttccctactggagatttcttattagtagcattcttgatcctacaacaatatgtaacaagggagaaatcaaaacccgaataaaaagctactgagtttgagatagcactagtgtttctattagtgaagttttggattttgtctcttttctgagtttaccttaaagtttcttgcttgcatctaagactagtcttcaagtaaattctagtgcttcgagggctaaggttcacaccagagacaactttggttcctcctgcaattgtgtactgtagctcttgcagtctttccatacatttatcaaccttcacaatcataccaaaattgacaataatcagctaaacagatccctctaatgttagatcctaaattctcattcatacccaaattaagaaactagcataagaatcctcttgaaacccaacaagaacacatcaattgaatataaaaccaattacttattataatccaataaaacaaagatctttaaattggggtcagaaaatcgacaattttattaatttgttactaagtaaagcttcaaacatagtgggaaggagccttagaactggagcgtttgcaaattctgataaaattaaagcagtaaactttatgctaatctttgtattaaattggataaaataccttgttgatcgtttccttgagaagatctgagttgagaggaggcaccaccatcgccactttcctctgcttctgtggggttcttgcaaccatcttctatatatattttctttaaattctcactagattaacccaaaaacttctctctgtttgaaaactgggttttgaagataaaaagctcaagcctttgtaagaaaaccacccataacaagatcctcacaacagcttcaagaaacccagatttctctctcactctctctttccttctctcgatctcaatcactctagaatgtctttttaggttacggacaccaacataaacgcgaatcctatcttcgatttgggtcttgtgtgctgtgtctatttgggtcttgtcggaacgtaaagtcaattaggcacgggaactgagagagagagcggataaaggtgttcactttcgtaacggatctttcgttactatttaattttatttatttttttgtcccaacggtctaatacgcttactcataacggctatctttttttagtgtgtgtgagccaattttactttataatcttcaaactaaattggtgtgaatttagtggcctgtgggactacatgagccgttagcccgttatgtagtatttttatttttttgaactccaaaattgtaaatgccaaattatctctagggtctagaagattaatcttgggagaatttttctaagctttgaacataagatttcaaattttttttttttttaattcaacattactataacttcgtatatattttattttttcaaagtaaacctctaaacaatgacgtaaaagagagcttccttcttttccctttaaaaccaatcgagtcatgtgactttttatttgaatgcctttttaacttagttccctcattgtggttcaactcttactaaacatcgacatatctaaagtcgacttataatcaactaggaatcaacaaataacacagtcatggaaacttcatcaatttcttctgtggattcaaatatttaaccatgaacgttcccaattctggttcattgaaaatgtaaccaatgtaatatacgacattacacattatgaaaatcatcataccgaatagagcatatatatatacacaaattttgttctaagtaataataaaaaaaagtgttttgttctaagtggcgcccaacatatagttttggcaagtttcttctttcctctacttgctccaaaaatctgaataatagaatggcctctactgttccatggtgatagattttcacattttgatttatgttccacctctgattcttctggttattttcgaactcactaccagaaattctggagcatctggttcaactctaccgtattgcagggaaaacagctgtcaacttcagaaccagtctacatgttttcctgaagattcaggttgtttcttctttggcttctgataccgattgttctcaaatttagctttcacaataagagcatatagaaattctgcttctgcggaacaatcgtaaggtttgtccacgacgctggagttaggacgataagtgagtattcacaatcacagataatttctcaaggagggtaaagagaagcatatacctgtcaagtaactcttctagaataattctctgtgatggtgtgacataatgtatacaatttctcggacactgattaactgcagactgtacacggtaatcttcgccatgtcctggccatatacacaccggatatattaatagaagaaacagagctatgtaggaggcaaatatgggggaatcaaaccatccagaccttgggacattgctcgagctgtcccagatgaatcacacgagaagacatgagaagctgtttcaaagcatgggtatgaacatcctgcagttggagagagacaagtatacatctcaacataattgttctaaaacttctctccaaacgatgttcaagaagaaatggagcagctaaaagagcaaacttcaaagaaaaggaagcaagtttggtactttttccaacacataggacttcattcacaaacacgtcaagtgcctcgcactctggatggtcaaaaggatccaagcattctctggtatgcaattcacaggaaaaaaaaacattacttggttgttttggcgcacatgccaaaaccattttctttattgtgttaatagatagattttgctgaaaaaagtattatgagtatacccttcaattatctctgaccggctatagtttgttaacatctgcaaagaataatagtattgagctactgtaactgctcacatagtatagaacaaggtttagtaacctcatatgcctggattatgcgacggatcataatatcagagttgcttccgtctttgtttacatctggatggtattgtttcacctttacaaagcacaaagtagtcaacaagactaatacatattaaaaatccaaaacttaagcaacgaggaggcgaagaaaaaaagacaagtcaaagtgtgtaaagaacaactcactctcagaacccatttataaatcgtatcaaaagaaattacttagcggaaagaaaagtacagattagtgattcttggatgcatactttggcacgaaaagctgcctttagctcggaagatgagcagcttggctctacgccaagtatagagtacggtgaagagctggagagaggatcctctctgttttttcctctgcaactgggaatgaatcgctgagaagttgagtatcttgaattggagaagaaagagattttaggtaccgaagcaaatacacgaagacattccattgtatctcttaccttctctttccctaagtttgtccctttgaggcgttaactggtgaccagacagatgtccatatattaagaattaagataaagagacaaaacagtagagcctctgtttcagctagagggggtcttcaactaccaaaatcaaactttacaaaacgccatggatattctctactcttgtatgtacacattcatgtagagagaaggcgttaaggaactatgataccgtgccgttcctgtcatctcctgtataacacagaataaacctcttatcaggtctgtaaccttcatctaccataaccggaaacaatccagacagaacatcatatatagcctctgcttgtggatgcaatttgtcctcaaccacaaagctgtgtgttttatgctcaatttcaatcgaacttatgcctgtttctttagtcactcccattgctttcattctcttgatcgtcttcgccctctccttccattttcctctggatgaatatatgttagcgatcaagatatgagcagatgagctatcaggtgcagtttgaaacaactgttcagctgcatattcccctacttctgtatcaccatggaaactacaagctccaagcaacgcttgccaaattttacagtcaggtttcaaaggcaatgagtctataaagctctttgcttctttcaaaagaccagctcgacccaacatgtcaataatacaggtataatgctctgtcctgggctcgattccatggacctctttcatctcgtttaagagttctcggcctttatcaatcaaccctacatggctacaagcatgaagtagtgatagaaaggtaacatctgtaggcttcacttctagcgtagtcatttcttcgtatagtttcaaggcagctaatccatgaccatggcgagcaaatgctgcaatcatcgagttccatgaaacatagttcctcttcggcattcgtctaaagacagtttgtgagtcggtcagatctccacattttgagtacatgttaatgagtccattgttgacaaaggtgttaccggagaattttcgtttgataaccaaagaatgcagttgcttgcctagacccaaagaattatcgataaacgaaactccaagaacagctgagactacatttgcatcaatctctactccagcttgaagcattctaatgaagaactgtatagcttcttcctctgacccattttgtgctaaaccaactaatatcacagtcatggaaacttcatcaacttccgtcgtggactcgaaaatcgtccacgcatcttcaatgcttccacatttagagtacatatccattagcgcactctcaatgcacaattctgattcaatcccatatttccacaaaagggcatgaatctgttgcccctccactatccgctgtgaaccagaacaagcagctagagcactcaaataagttactgagttaggatggaccaatcctctacgcatcaaactaaacaatcttagaccatcttcgtgtaactcattctctatcagacccgaaatcacagctgtcaaagtgatgacatttcgatgtgacatcccatcaaaaacccctctcccagaaactgaacatccacatttgaaataagatgtgatcagtttgttccccacggaaatttccttgtcataaccgcttaaaattgctaaagcgtgaatcatctttgtcaccaaacagaactctggcgtatcacacactgataaaacaatcgtcaaagtcgcatgatcaaacccacctgacccaagcattcgtttaagcaatacaaaaccagactcagtctctctgtttctcagaaacccataaaacactatattctgcgaaataacgtctctcatgggcatttcgtcgaacaacttaatggcatcaactaacttcccacatttcgcatacagagaaagcaaagagttccaaacaaccagagcgtttcgatggatatcagcatctacaggctcgaaaaattcaggatttttgataatggaggcgtggagacaaggacccagatgaggaaaccagccttctctgccgcagatggataagagaaggctcatatcgacatggttgaggagaaaggtcgagacttggtaatttgggctctgccggattaggattttcgaaggggacaaaacggtagataagcaagaaggaaggtgagaggtcagtttctgaatcacccatctcgaattcattcaccacaattccgaagctaaacacttaatttgtattttgtaatagaaatttgctttccactctagtagaatcgagtacttgaccgttaagttctcttccaagttgtacctctgtgtcgtctccatttttgttgttacagtggccgagctttttgttttcacagcgatgggtttgatgggtttacattggttttgaaattcaaattgatctcggttcggtttaatttggtttagagaagaaaaccaaaaaaaataagacacgcgatggatttttgagagtgagttgcgtggatcaaaaaaggcatgatttctgtggacaaacccctttagaaatcgtagacacgcgctcaacgcgacatgggtgagactggttgtgaaatcgctcgattggtaaaagtggggtatgaagtggagctctctcattggctaaaaaaataaaaatagtagacatatagctcctatcctcctcctcttcttttgtcatttttatattagcctctgctgagaatgaaattcagattttattcaatctgaaagttgtgtgtgttttagatacaattgaaaaaaacttgaatctggacttatgtgatactaaaaaacttcctcatcattttgttctgcaaccatttttacaagttggaactaataactgaaaacttgattcaaagaatcaaactaagtgagttgaatattttctaaacatgttaaatatattggtacaagtttgtccaatcattttgctagtttcctattttaatgttttctccactttaggagatgaactttcaagtgcaaggaaaggatttaagaccaagaaactttaactcattaaatatgtgcagctgaagcatacaaaatttaagcttgtgcaatttaaagcttctggagagatgcttacgttaattcgagaagattagtaaaagttgaggatctttttttaaaataaacgaaaaatatcacatttctgtttgtaatttacacacgcgaacattttggtactaatcatgaaggatcaagtctaagcttttattggaaataaaacttggtgggtttgatcatggtttggctaagggtcttgtgttgttccagagccactgctgagtagtagaaccttccaataatggtgaaacctgccaaggaaataatacctggttcaaacaactgcagctgtatgtaaaagactttgatctattacactaagaggataatcgaagccatgtttcctttatgtgttgatttgttgatatgctttgctttgcttagactcaatctacttggctttttgagaaggtaagtcaaactagttttgtggactaaccttttcccagacttccgcgtggtaactattaagccagtcaacctcagtatcagacagcaaagaaacatcaaccatttttgtctgcatggtttggtgagtgagaagtgtgtgagatcaaatgtaaggcaaatcaattagctagaagaaaaccagaagggctcccttgaccagaaaaatgagagttagattcagagacgcgaattatttataagtggatacgtcactctgtacctgaatggggaagaatgtaagcttctcaaatccaaggtatgtagcaccaccaaagcggtttggtgtttcagcatctctcacatgaaggagattctgcaaaagcagaccatacaattgttacttaaatcttatatatcctataaaaactgtcatggactggtgacaaagtcgcacctcaattcggatcccaaatgcatggtcttcataatatccaggttcattgcttactatcatgccattttgaagaggggtcatgtttccataccgaaagctaatactttgaggaccttcatgcacattgagtgcagcacctacgccgtgtcctgtccctgtttggcaggcaaaatatcagagtaatatgagttccttacaaaaaagttgttctgggaagaagagtcaaaagatagaatagagtaccatggcggtaatcaagtccaattttccatagagaagagcgtgcaaacccatccaatacaaaaccaggagtaccttctgggaacacggcttgatcaagagctatatgaccctacaaccaaaataccaatcagacaaggcaacccatacaggttcgtctgttcaatataggtagtcaatggtcatcaaaaatgatgaggaaaagaagagccaaatattccacctgcaagactcgagtgaaacattccttttcacgggcagaaggttcactaaaatgtactgttctggtgatgtctgttgttccatcaacatattgagcgccactatccagcaaaaaaagtttttgagggtctacacgactgcagctctcaggctcgggcttataatgtataatagcaccatttgcaccggaacctgcatgggtaattagaggaaaggaatacatatcactcactggctgtatattgactatgtgttaagaagcaagttccaccaacaagggtgacaataaccataccacttattgtatcaaagcttgtatccataaaaccatcttgcattgaacggaattcaagaagcctgtcagccacatcgacctctgttagattcgcattcttatgcacttcttcttccagccaagcccagaaatgagctagggcagcagcatctctgcataaaataagtggtcagccaaagacatttcccatacataggaaaaaaagaaaccaaaattttccagaaatgagctagagcagcagcatttctccatatatatttggtcagcctaagatacttagcatttgaaagtacaaaagaaaccaaaatcttccagagaaaagttgaatcctataaaggcagttggattaggaaaatatcgtaaaagcaatggctttctttacctcaagtgagaattcttcattccctttagctcagcatcatttttaatggcctttgcccacgaaataggagattgcatgtaaataccagaaggattggcagtatatccgctggagctatcagtaaactttgtcttaactttggcttcgctttcaaaattcctcgaatatctttcacaggcagatttgtaggtactaatgatagctacgttgagggttgatggatccatcaagagctgagctcctcgtgctgccaaactgagaaaactcaaagtgagggaaattcctttttctgaagttcataaatggacatggacaatcaagtacttacctatctattccttgaagaatggaatcgtaaggtctaagttcgatccctgcgtttttcaaatgatctttcacctccaccgttactttagaattatctacaaaaagttgggcttggtcaacctctacaatcagatatgcgtacattacaggtgaatgtggaacatcgctccctctctgcagtcagaagaggcagaatacaacatcaatacattgggacctatgtgaaggataagctgatatcagtggcacaaaactaacagattcaaatgtaagatgctatgctagagtattaccagattaagcacccatgcaatctcatcaagcatggatattacaatggcagatgtgccagcatccataatttggttcctcaaagacaacaatttcgaggccacatctaaaccagcatacttcaagtcatgtatccttatttgtctgcttggaggctttggccttgagtccttccatatctcatccacaagatttacattgtacaagtaaaccaactcatgattcttctttgctataacctccttcaattcctcagcagcatcggcggaaaaaaggaactgctcccttcatgaattccaaagtcttgtaaataacaaaccacaaactacaatatttaaggacaaaaggagacacaatttagaaggtttaataatagcttacagggtcaataccaactcttccaccaggcgccaaaacatcagctatccattcactcgccgtggggactcccggattaccagcccgcatgagaatccaactagagtttaattgcttctccgcctttgatagaataattgcagagaatgtagataagaaactccacatttcctttcaatatgagatggcaatcaaataattttaaaggacgataatgatcaaaacctgaagaaaatagcggccatctgtccatagagctgccttatccttggtgacaacagcggtaccagcacttccagtaaatcctgatatataagccctcctggcatagcactctgcgatgaactcgctctagtacaaaatatggagaaaaatcacactcaagccatgaaaaactcaggcagtttatggatacatttagaagtaaaacataaatttgtgactttcctaatggcacagaaatatattacaggcaacatcagttatgaaagtagatcttaagctcctagtatgtaaaattcaccgaaacaacacattacccatatcaaaatggcaaaaacaattgcatagatgcataacaacccccgcactggtccaaatcatatttattttttatcttgaatctccaaatcgaatttggtatactcagggacagcaagattgacgtgtgagcggagcaagaaactttggggagaatgaaataaaacacgagttggagaatttcatactgtgatttagaagaagaagaacttccatttggctctacaattgaaacatcctcttatgacaagttgagatttgactaggaagaaaaatctgaatgcattttcaacccaacatatagaagatcagataccaccaaagccgtttcttacaataccataaagtagaaaattacaaagacaaagagtttatgcataacacaactgacagatatcataacaaacatatacgtttcacaatcactcagagaaattgtgagaggtgatggtgttcaacgagcacttgtggtgactactctgcgcttgtttcgatggaatttttccatgaaccactcgtgtttgtgtgcagtaaagaagatatgtccaataactaatccacaaaacacaccaggtccgtaggctattgccgctgctatccagttaatcacttgttcttctggttccgaaaattcctcggattctagtggtgtagaactcggggcatgagcttttccacagattttctcaagaccgtagagtctgaggttgtccatgaatgtagaacaatgttggctttgaaactgagtgcctagtggaactggaccttcgagaaggttatgggagaaattcatggtcgacagaaaagagaggctaccaagatctcgagggatgtgacctgatagctgattccgggataggtccaatgtctcaagatttgtcaaatttgccaatgactgagggatattgcttgtgaatgagttacctgacaaattgagaagacgcaattccttcaacaaaccaacggattcaggtatattcccaaaaaatctgtttccagaaaagtcaatggctctgaagaaatatgggatccgcaagaagtccgtttctactcctttatatatcatagtcatcgaattactatggctgaactcgggccctttctcgcccatgtaccaatcctctgtacctatattagagccgttttcttctaagacagatgtcaccatctcacgccaattggagaaatataaaggtgacaaagttccactgaagccattctgtgatatatcaatgagtctcaaatgttgaaacccaaaagatatgtggtcataatataacgacccatagaatgcattagatctgaggatgaggacacgtaatgatggcaaagaaaccaaccaggatggaaaagtgtccttgattatgttgcttcccacattcagaagttccataccagtgcaattgatcagggattttggaagttttccctccaaccggttgtagctaacgtcaagtgataataacatgctagcattgacaaatacgtctgggagaaatccgctgaagctgttgttacgcagaactagccctttaagccaataagtggaatttttcaaacaaggaggaattgagccgttgaagagattgttggacaagtctaagtactttaagaacctttgcttgcagatccaatggggaaaaggtcctccaagtgaattcgaaccaagatccaactcctgcattgattctccatccaaagctccggatgatgactttccaaaactgttgaaagaattgtgggaaagtgtcactgtcatcaatccccataagcaacctggcacttcgccttccaaggtattgtttgaaagactaagatgctgaaggttgaccaactttgatatagaagtggggattggcccaactaagttgttgtggctaagatctagtactatgagactgtgaatttcagatatatattcagggattggcccatcgaatttgttatcagcaaggtttagatcccaaagcctagaagatgaagatatattcccaaactttataggtcccatgaactggtttccttccaaataaacaatttgtaacgaaggaatcgtgaataaggatgtaggaaaagtcccgacaaatgaattctcacgcacatcaaaatatttcaagttgtggagtccactcatatcagatggaagcgtggatttaaagtgattagaggcaacgtttaaggaggacaagctggttaaatttggtagtatgaaagagaaattttccaatgtgaactgattgctagagatgtctaaactagaaagcttcgttaaattggtaaatgaagtaggaatgttaccactaaaactgttttcggaaagtaaaaggtctctaagttggtttagcttactgaccgaagccagaacttcacctgtcagctgattactcgaaaggtcaagatgcgtgagacgagaaaggtttcctagtgaagaagtaacctctccatagagatggcaatcactgagagtcaggttctggagttgttggagtttgaaaagaccactagttggtttcaaagagttgttgagaaggacataactaaggtcaagtgaaaccacctcgccagattcatcatcgcacgtgacaccctcccaaaaacagcaatcactagtcttgttccatgaactcaacgatggacttggcttcgattcacttaccggaaactcgtgtttgaactcgagaagagcatccctttggtcatggcggcaatagtgaagcctagaagaagcaagagtgcgtagaacaagggaacccaggaggaagaaatacaaggtaataacactaccagaaaaggaattagattggcttggaatcattttgtttgttttgtaagtaacaggttatgatagctatggcttctacgtctctatttagagagagagaaaaatagaaaacaaaacacaaatttgcagctctctagtagacttctacctactcctttctatagtcaaacttgcccacttggaccaataattgacttaaaaacacacacaattgaacagttttgaatctactagaacttcctattcaattcgtaatcacgagttaagaagaggtttaaaaaaagagaacctgatgtgcatcttgtgaaggtatgatataagcgtcgattccaacacccggctccgaaaacagtcgccggatcgagctaagcttctcgtcgacaactactttggtttgagctttacgaatctctttggaagactttgccgtgaaggaggaagagctgctgctgctgctactagcatgacaccttgcgccaaaaagaggtttatacggtaatttccggtggatcagagagagcgaattgaaattgctgagaaatagagagtgtgagtaacgtgatgtggataaaacgagccgattcagagacggcgacgaaagagttagaggaatcatcaccagcgattgcaggagaatcacacaagaggagaagcttcttgagcagagtgattacggataaatgtgtataactactgaaaattgcaaaacaacccccgtattcttttaaatgttgtataatgtgcatgactattgataattacattaaaatcccagacttgtcaaaaagaaacattttattttgaaacaatctcatcaaattcgttatggtaaaggacagccaagagagacgtgtgcaagaagcaagagtctttgggtgcgtaagaaatgtaaacgtgttcgagactttcatgctgagaatttcgattggaattttggtttgacttagaaagttttatgagaaagacttaataccgcctgaattaagggtttccacgaaagagacaaacgataaattgcaaccacaccagaaaagagaaaaatagatactaatattctttatattgataaccatggggtttagaattcaaaacatattttgagatatgagtagaagaagtttctgaatgcattatcgagccaagatttattacaaaaccttgcaacaatgtggtttgggacaagaagctgaccatgattttaacctgatagtaaaacgggccttgtctcttgacagctgaaagtctgaaacaagatcataatatttctcaagcgctgaactaacacaagtaagggaatggaagtgaatacttgttctgaagcaactggcatgaaaatgtacctctcaagtatctggttttttctaatctccttccgtgaaaagaaagattcttagggtaccaaggcaaaggcttgattgcctccaattcaccactctctatggccttaagtatgcttcttatgtctatcatcaatgagacactagaaaaatgaaagagtcatgaatcaacctcagcccgaagagatttcatgaaatcattctccaatttcaatcaaatcccatcacaaaattgaccactgaagaatcaaaaacagaggccacttagtcaaaaaaaactctgaaactccataaacgaatcccactcttcagctttcactatcctttgttccttacacaacttcacaacaagacattacaatggtgtttattagaagtaaagtttcaaaatccatggaagccattgattctattgaggtaccttgtaatactcctcgagtcctcatcctcgaaatgaagatttgagcagatgggcttttggaggttggaatcaaaggaagcatcggatttgagggggttttcgaacattctcttggctatttagagttgatttctcttccaagttgtgtcgtctccatttttgttgttacagtggccgagctttttgttttcacagcgatgggtttgatgggtttacattggttttgaaattcaaattgatctcggttcggtttaatttggtttagagaagaaaaccaaaaaaaataagacacgcgatggatttttgagagtgagttgcgtggatcaaaaaaggcatgatttctgtggacaaacccctttagaaatcgtagacacgcgctcaacgcgacatgggtgagactggttgtgaaatcgctcgattggtaaaagtggggtatgaagtggagctctctcattggctaaaaaaataaaaatagtagacatatagctcctatcctcctcctcttcttttgtcatttttatattagcctctgctgagaatgaaattcagattttattcaatctgaaagttgtgtgtgttttagatacaattgaaaaaaacttgaatctggacttatgtgatactaaaaaacttcctcatcattttgttctgcaaccatttttacaagttggaactaataactgaaaacttgattcaaagaatcaaactaagtgagttgaatattttctaaacatgttaaataagaccaagaaactttaactcattgatcagactggaaccagtaaggcttgcgtgaggttcacaagaaggcttatgtgaggttgacgctggattatgatacgtttaatggtgcaatcaagactggaatcatctttaaaagttcatgtttcagccttttgtcatataaattaactagcaagagacatccttgttggttctagtctcatagacatcccaacttgtaagaacatattcttctctcagcttctgtagtcagtaatatataacaatatatgaattcttttgttgaataaagaaaaaaaattgaacaattgattacacaagctggctgttgtaatataagttaaaaatatacaagctgttgtaataaacaatatacgctagtcaacaaacatatacgtcacaaattaatgcttagagggacgagcaattctggtgactactttgggcttttttcgacgaaacttttccatgaaccaacactcgtgtttgtgtgaaaggaatatatgtccaattaccaatccacagacgacaccaggaccataagctattcccgcggctatccagttaatcacatgttcttccggctcagacaaatcttttgattcttgtggttttggattcgggacacgatcagtttctctacatatttcctcgagaccattgagcttggggttttccatgaatgcagaacagttttgaccttggaactgtgtgcttttaggcactggaccttcaagaaagttgtaagagaagttcattgttgacataaacgagagactaccaagtccttgaggaatttgaccagacaactgattcagagataagtctaacgcctcaagcttcatcaaatttgccaatgattgtgggatatttcctgtgaatgcattacttgacaagttgagatgacgtaactctttcaacaatccaatggattcaggtatatttccagaaaatctgtttccagaaaagtttatgactttgttttcttcgttgatccgcttaaactccgtctctactcctttgttcacgatttccattgaatcaacaaagaatgcagtagcattcaaaacttttcccatgtatggagcctcagaaagtctaaagtcgccatcttctcctgttaatctgctcatttcacgccaactagaaaaatagaatgacggtaacgtcccaatcaagtcattgtgtgagacatcaatgactcttaaactttgaaacccaatggatgcatggggttgatacaacgtcccataaaactcatttgatcgtaggatgaggacatgtaatgacggtagagatcctaaccaagaaggaaacttgtccttgattttgttgcttctcacattcaaaagttgcatagctttgcaatggatcaaagattttggtagtactccatccaacttgttgcgactaacgtcaagtgatagtagctttgtcgcattgacaaatatatcaggaagaggtccactcaaactgttgttacgtagaattaaatctgtaagagaaaccatgaagctgcttaaacatggaggaattgagccgttgaagcgattatcggacataattaagatctccaacgatctaagcttgcatatccaatgaggaaatggtccttgaaatgaatttgaactaagatccaaccactgaacttgtgtttcatcaagaccttctgatgattctccaaaactgttgaaagaattgttagaaagtgccaccattgtcaatctccatagccaacttggtacttcacctaccatattattgtcttcaagacaaaaatattcaagtttggctaactttgatatagatcttgggattgtaccaatgaaattgttgaaactaagatgtagctcttcaagattgagatactgagatacagattcggggatcgagccattgaattcgttttgagcaaagtttagaaacttgagactagacgatgaagacatgtttccaaactctacaggtcccttgagatggtttccctctaagttaaccctttctaacgtgggaattgtgaacaagaacgtagggaaagatccagttagattgttgaaactaagatctaactctatgagattgagatattgggatagagtatcagggattgggccatcaaatttgttttgagaaagaaatagatattgaagcctagtagatggtgaatacatattcctaaactctataggtcccttgaacatgtttccctctaaattagcccaacgtaatgaaggaattgtgaacaaagatttaggcaaagtcccggaaaatgagttttcaccaacattaaaatagtccaagttttggaatccactcatgtcaagtgggagcatggattcgaaggaattattatagaggttgacaacgagcagttttgttaaattggagaatgtaacaggaatattgccactgaatttgttgtgtgaaaagatcaagtattctagttgggttaggtttcctattgaagctggaagttgacctactaacttattatcccaaaggtcaagaattgtgagtcgagaaaggtttcctatagaaggtggaacttgaccaactaaataattatacgaaaggtcaagaagtgtgagacgaaaaaggtttcctaatgaagaaggaatatctccatagagactacaattactaagggttaagttatgaagatgttgaagtttgaaaagaccactatttggtttcaatgagttattaagaggaacatgactaaggttaagtgaaatcacctcgctagatatagcatcgcacgtgacaccctcccaagaacaacaatcaatgctcttgttccatgaacttaacgatacatcataaggaatttggttggattcatttacccgcggaaactcgtgtttgaactccagaagagcattcctttggtcatggcggcaatggcgaagcgtaggagaagcaagagtgtgtagaaagaatgaaaccatgaagaaaaaacagaagcaagattggcttggaatcatcattacttctttttttttttgttaggagtttgtgtggtagtttataggttatcctgatatggcttctttggctctgttcaaaaagcaaaaaaacgaaactcagttgcttaatttgacttgcgcaagtctttccaatgctctctttgactaatgatttggcctcttgccataatatccatcacaaaattgaaaactctcttcttcgttattaatgtcaagttactttgggtttctataggtcatgagtttgtatttgggctttttatttgggccagatagaatcagatgtaaccaagtctatttaatccgctgtcgtttttaaatagtttatctattttttttttataagaaaaaacaaaaatgattaaccctatctaaagttgttaaaaccaaatgttttagcaaatctaaccaaatatttttttctttgggaagctctaaccaaaaatgattatccttggataattactcaattagtaagatcttcaagaaactgatttcccccattattattttatttatatttttcggtttataaaactccagtaatttcaaatataatcctctgctaccgataccagaatccacacaagtgaaactaaaacaatccaacgatgtaaacaacctcacaatccacgtggacgttcaagatcacacatgcactagcttcagatattaagagtgaaacaaaataaaaggaagaaataaatcgaaaaaatggaaaaaagtgacaaatctggaaagctgattggctgaagtcgtccatgtattcaagtttcgcggcaacacctctcttctcatttttctcattccctaattcttctatatctctctctctttctctcacttcctttttttttttgtttttaaacaaataataatctttctttcttcttccttaatttgccttctctctctctaaaacccttgtttcaaatattttctcatcgatctctttttgaaactaaaggctcgagctttctctatctctctttcgaacccaccggtggttcgggtatctctctattcactcttcaagtcacctaattggttagtggatctgcttcgattagggtttttaaaaggcttttcctttttccgtttcaaattttttcttctttcgactctcaaaattttcccggattttttttttggattctttaacactttctgtgttagctctttttcttttgactcgagttccgttttttctcagctgaggtttagtgggtatttttggaagctcactcgattgaagttttttttttttttttgaggaatcagtttcagatttgtagaatctgcgttttatttatatttataggttagcgattgaagtttcgaattcgattttgttttactatctgaaatttaaacaattttctcaacacattttctcaaattttgtcaaagctcctgacttttgtggatgattttcgtgtttcttcactgtgtgtaattgattccttaatttggtgtgttttttaaaatacccaaattctgattttcgttaatatttcctctcatctcgattactgcagctatttatcttccccaacactgctttttactgatccaagaattggttctactcttttgttaaaaaacgtagagttttgatttttcttagctctaatccctaaaccctaaaccctaaaaacgtcttgatttttcccctggtgaaatgttgaaattcgtagtttgtacatgtcttagaggaagccaaatttgcttatcgacttagtgtcgtatcttgtccgtatcagtttaaagtgtgtcttttgtcacaattgcattttttggtttctaactatatatttgaatatacttgtgcagagaaacgtgcaaatggcaccagttaggaagtcgaggagtgtgaacaagcgtttcaccaatgaaacttccccaagaaaagatgctgggaaatcgaaaaaaaataagctacgtgtgagtaaattggtcttcatttcttgaatgttgaatgagatgttactctgatgtatttattctgtgctttatttttcctatcatagaagaagaaattgtctgacaagctgggacctcagtggaccagattagaacttgagcgtttctatgatgcttaccgcaagcacggacaagagtggagaagggtaaataactgtttcactcacatatgtttatgtgagtttcagtggcaatcagagttcttaaagactgttttttgtataggtggctgctgcaattcggaatagcaggtctgttgacatggtggaagctctatttaatatgaatcgggtatgagtaaggacatgctatgtttcagttttagttagtatcgatgtggcaagtttcttttccaagctttagtttaaatgttgtaaaacctacataactttgcattcacaagatatgcttcttcttccaggcgtatttatctctccccgagggaactgcctctgtagctggccttattgcgatgatgacagatcattacagtgtcatggtgagaaatctattttattaaggctgccacacaaaggatattatgtgaagtgacctgccagtagatgagaaaatgaaatttcttggttgaaaatgtgggtggttggtgaaaaacctttcattgttaacgtgagtagacagtaacaccaatgacattgaaaactttgagttttgtgtaccctatctggcctatctgttgggccagtttgtatgtttgataaagttatgtggaccgatttgtaactcattcatatgatatttcttctaggaagggagtggcagtgaaggagaaggccatgatgcttcagaagtaccaaggaaacaacaaaagcgcaaacgtgctaaacctcaacgtagcgattctccagaggaagtggatatacaacagtcaattggttcaccagatggatgcctcacgtttttgaagcaagcacgagctaatggtaaagtgctacattgtgttaactcagttttctaatttttattttcgtctgaagaagctaaatcaaatgattactctatgatttaagcaggttaggaagttgattacttgttctgcatttgttattgactttgtatagtccaggaatagatatccatctgtctagtacctgtaaaccaattcgttcaagatcgtgtaactttatttcttagttcatgtaggaactcagcgacatgccactggaaaacgtacaccacgggttcctgtacaaacttcatttatgagggatgatagagaaggctctactccaccaaataaaagagccaggaagcaattcgatgccaatgatgatgtagcacattttttagcgttagcattaacagatgcatcgagaaggggagggtctccaaaagtttctgaatcaccaaatagaagaacagaacttagcgatagctcaccgataaagagctgggggaaaatggtatctctcagcttgacaaaattttaagcggttatctttttgatttcttttctgtgtgagtttgcttcactgaaaaacactatttaactttgtgcttctgactagtcgcgaaccagaaaatctcagtctaagcactgtggcagctccattttcgaggagtggatggaaagtagccgagaaaggaaacttgactctgataaagatactaccttgttgatggatatggaaagggctggcgaaatggaggctccgcggaaggggaaaagagtctacaagaaaagagtgaaagtcgaagaagcagaatgtaatgattctgatgacaatggagaagcatgcagtgccacacaagggctcagaagtaaatcacaaagacgaaaggctgctattgaagcctcaagagagaaatactcaccgcgcagcccaaagaaaagagatgacaaacatacttccggaggtaaaaactaatgtaatttgaagcctgattttaatttcaatgttacccctttctgtaaggaaagttagagatatttaacatattttcgtttgcaagctctactgttgttatatttgattatttatcttttctgcattgtccattcaaactaactatcttcatattctgctgaaaacttatgcggatctgaaacttattgccagtcttttcctgtgtagcttttgatgccctgcaagcattggccgaattgtcagcttcaatgcttccagcaaatttgatggagtcaggtgagttttgtgtggttttgcttgtaacttcaatatacctgaaacttatgttttttttttctagatattctcattatatagattgggttaattctgcagtgttcactgttcgcattagggcctttacctgtctgtatttgttaaatttaactaaattgcattgggtccagaattatctgctcagttgaaggaagaaagaacagaatacgacatggacgagaaatctagcacaccagaagctacttccacaagcagtcatggggaaaaagcaaatgtagagccagatgatagtctccttcatgcaatttcttctgttgagaatgctaacaagagaaagtcaaaaccttcaaggctggtatccactgattgtgatgatgttcccacagggaagctacaaccacaaactagtggcagtttaagaaaacgtaaaccaaaggttagcaagatagttctcttaatctgtgctctttcttctaggcatcttttagctgtaaatgttaattgtgctctattttcaggtactaggggatgaagctccagcagagtttagtcagaacaaatccataaacaagaaggtagtctgtgtgtatgttgaattagttgaaacccgttgcaagtcctatattgcttccttgtacataaattttttgaccttagttgaactccgtgatctctgttttctatcctttgaaacaagttcgagatctttattaaaaatgcatattgagtattcaaatttgtgattctgaagaaaacattacctcatatgatttggttttttatgttgcaggaattgcctcaagatgagaataatatgaagtctttggttaaaacaaaacgcgctggtcaagttccggctcagtcaaaacagatgaaaactgttaaggcgttggaggaatctgctataacaagtgataagaaaagacctgggatggatatagtagcgtcacctaaacaagtttctgactcgggtccaaccagtttatcgcagaaacctccaaacaggcgaaagaagagtctgcagaaaagcttacaagaaaaggctaaatcttctgaaaccactcataaagctgcacgtagttccagatctctttcagaacaagagttgttgttaaaggtggagcctctaacttcacttctcctacgcacatcagtatcttgtacatctatatatttgtttattccaatttcaggataagctt

SEQ ID NO: 48 - DNA, 91924 bp, Arabidopsis thaliana
gaattctaagtattaccctcacacgtatacaaatataaccataaaacgaacttttcaaaagacgcggtttctcgcccgacaacaattacttgaataatttatttaactacaaaggaaattagtgtatgtaaggagctttgaccagttccaatgagaatcatccacgtctcattctttttaggctggatcttcttcttccatcaccgtccgtccactaccccataattcttgccttagaaggtttcactaattacttcgtcttcgtttttctattttgagatttgacaacttccccttttaatcatgtttttagttctgttggacaataccaaatcaattgcactggttttgctttctttatccaatcattttttcttttgtagttcattggatccatttttacatcatgtagagtagccattgttacaataccaaacaaagttagaaattgctaaatataattgttaattgatataataatcgtatatagttaaaactcaacttgttccatttctaatcttaattatgtttttttggaccgacatcattctcttaatgtaatgaatagccatttaaaacagagttgaaatataaattccaaaaatttctggcagcaaaagagagagaagagaaggagctattatctgcgccatctgtttctccaattaataatctccttaaatccggatttgttattaattctaatcttttccaattgatccactttcctcctctgagtttttaagactaatagagagatatatagagagagattgcttctggttttgccttccccctttgtttgacctctcttttctttcttcccccctttgtgtttcccgcattttctcgggaaaatctaaaggaacaaaaacattaaaagtttgtgattttctgattatttctttatttaatcgagacccattgtttctcgcctgatttggcgcaaacccttttggattctggtgaaaaaggttgggatcagaggaagaatgatgacgagtatggaagggatgatggagatgggtgtattggatgatattataaggagattgttggaaggtaaaggaggtaaacaggttcagctttcggaggtcgagatccgtcaactttgcgttaacgccagacaaatcttcctttctcagcctaatcttctcgagcttcatgcccccattcgcatctgcggtctctttctctttctctccctctctttgtggtgatgatgaaaaaatattgtggctttttggttttgatgatttgggtttgagtcgtattgcacgattggggttaaaaagatgagatttgtaattgggggcaaatttgtgttgattagggttcctctttttttcttaatgtcgaaacgtgtgtttgaagattttagcatctgggtgatctaaaaagttttgattttgatggatttatgttaaagtttctgcaaattgtttctaaatctgctgatgctttgttttatgaggtactaatggtttccgttttgatctctaattcaggtgatatccatggacagtaccaagatcttctgaggctattcgaatacggaggctatcctccttcagcgaactatctcttcctcggcgattacgttgatagaggcaagcaaagtcttgaaacaatatgtttactcttggcttacaaaatccggtacccatccaagatatttctcttgagaggaaaccatgaagatgctaagatcaacaggatttacgggttctatgacgaatgcaaacggaggtttaatgtacggctttggaagatattcaccgattgcttcaactgtttgccggtagctgctctcattgacgagaagatcctatgtatgcatggtggattgtcaccggaattggaaaacttggggcagattcgggagattcaaaggcctacagagattccagacaatggtcttctttgtgatttactttggtctgatcctgatcagaagaatgaagggtggactgatagcgatcgaggtatctcctgcacgtttggagccgatgtagtcgctgactttttggataagaatgatctcgatctcatttgcagaggccatcaggtaaatagacttccatagtgatcaaaactagaaccaaatggtccaactctgtagaaatgtttgacatttgttgtatcttgtgaatatgggcataaaggaaaagacttttatgagaaccttccaagatattgacttgtgagggacgtgtttgcaggtagtggaagatgggtatgagtttttcgcaaaacggaggttagtcacaatattctcagctccaaactatggaggagagtttgacaatgccggtgcattattgagcgtggatcaatctctcgtttgctcctttgagattctgaaaccggctccagcttctagcactaatcctctcaagaaggtttgtttccaccaagaactttcaaaagaccaagtagtccttcttttgataataatattggttagctcggatataccaaaatctgaatccaacaagaccaagccttttggacttgatgagtcatgacaagttttgttcttttggaaacttcacgtcataatgtaacacatgtttctctctatattttctctttttgatcaggtaccgaaaatggggaagtcttgaaacttaatacagcttattcccttgagagatttggtttcacaagctcaagctagcgctctgtgcatttcttcagatgtaggcaaactgcaatggagaagagaacctcaaaaggctactttacttagtcatcaaagaagaagcatcagtagaaaaaacaaaagagagagagagagagagaaaacaaaaggtgttgtccaaatattctgtgtatagttgcagaaacatctcttttctgcttctctagattttcatctccttttggtctgttttcttttatttggttattcttttaacaccttagtttaacttagagtgcctctcctcttttgcttttttctttctttcctgtatcatcaaattaccacatttcttaatcttttccatatttgaattgacttccatggtttggctcttacttttgtgaatcatctgcacagtaaaaacaatttccttttgatttagcagtacatgtctctctgtgttttttctcttccagcagtaatacatatactttttacagagcttacttttacacaatggcacgacttgttctctctgtttcggaattggttcttcttgaaactgattctccctctctcgtcgagttttcatagtagcacattttattctcaggcttttggtttaatttcataggaagatggttcaatccggtttactattaaaccgaaaaatctaaaaactagatttttcggtttatgaaatccacaaaccaaataatatagctgcataccaacccaaaatctcggcaaatcaatgttttccgtaaataaccttttctttatcgatgttgtcaggaacattaagggtaacttagtaatataacaattgcagacgttttagcgagcagaggatccccaaagccagacaaatcctcttccgtcgccgccgccgccgccgcaagtctcgtcggttagtttctgaatctctcgtttctaaatctctgatctttcgttggattcctgtgtttgaatctcagcttctctacctgggtttatgtctcagctcttgaacttgcttgatttctgcatttcttgttattttcgtttgtctttgtctctcgatccgtgtgttaccattactgtatatgatcgcataattcatctgtgttttgctttgggtttattgatctaacttaatctctatttccttggattgatatgtaatggtggaatttctaaagatatataggaaggaagttggagagtttctagcaatgtttatgtttgattccaatgttgtggttctcaatggagaaaaacattatagaatctctgagaaattttatattgaatagccaattgctacaggattcttggttcggatctttcagtttcagaatctatatgtgttttagagttgttttttctttgagctgaataggtttagagagccaatctttcacttgattttcgaagcctatatctagttcattggttcgtagctaaagagtgtttctgaatccttgctgtaccatctgtgttaatagggtttgaagtctatgtttgattctatctttattctagagagcttagatgttactttttaggataagccttaaatggagacgcagaaaactcaagctgaaaacccgccaaaaccggccacgtcttcatgtcgaaagaagacaaaggatgatgccaatttcctagaagacgtcaaggatcacatcgatgatttcattaatgcttccatggatgatcacaagaactgtttcaacaaaaccatcaagaaggtttgtctttcttcatgatttactaaacacgtaatagatcttgatcactgagccactacttgtgattttgctaatagtaagttattttgcctttttcagatgtttgggttgtcaaaggctgttgcggataagcagcaaagtgaggctaaaggaggagtcgagagttatttgcctcttcagacaacagtctcagattagagaaactgatgatagaatcaagctaacaagatcttgtttcggtttactttttgttggtttgtttcggttaccattgtttagggagatatgcccatttataacagtaataaagatgacaatttgttattggtggatagctaaaacataacatgtctttactttgttttgttagtgcccatcttcaattaccaaagaatgttctgaatctaataattttgcagtttttcatatatgcttttcagcatccaaaaaaacttttaagtgccaatagaatcgactttgaaaatcctttaaaaaccctcatgaaaacaaaaagaagttggagaaacttcagaacaacctctggagagagttagtgctgttgatacattatttgcattctttatgcccctatttccccttgacatgtttctcaagtgtgctagggtgggtgttcctcaagtgtcgagactaacttctctttcgtttcttggggcagatggcaccacacgggccaaatctccactctgacaagaaaagagatcgaaaaaacatggaattggaggagtatcttcagcgttcattaccattccttcgttttttatatgccagagaaaaaggtctcatagggaatgttattctcgagaatttgtttatataggcagagataagaactacacaatcatatttggctaaggtattcacaatcctaatgtgcgtcgaaagaatattattttcaacaaagtttcccaaattgtgaaggaaaacagattctaatcgaagtaatcctgcaaaaatattttaaattgaaagattatcttcgattcacgttcgagttctttaatcctcataaaccaatcattccatcattatccaacttttttaacgacaatctgaaagaacgagatccatatgagctcttaaagtaagataaccaacaagagttaactggaacaaaactaaataacatctgacaaaaatgacagaagggaaaagacaaattgtattgaataccgagtagaaaccaaaaaacagaaacatggaatagagtatacttctaaaccaaactggattctgaggtttagtcttcctcctctccttcgttctcagcaatgttgaagtacctcaactcatagaggttacggtccttgtttgctgcaatcactctgagccaatcccttacattgtgcttcttcaggtacttctttgtcaagtacttcaaatacctgaaaacacacatcaaagacaatggtaaataaacaattgcacttggaattgcttcaactaagaaaccaaaacaagactcattgctacttgtcttagacactgttagataagtttggctatcacaatcactatgtatcatatcttaagactaaacgagcaaagatcaatactaagttcatgtgttatacctcttggagaattggccatctgcagtgacagtgatcttgctcttctcacgtgtgattgtgacagaatcaccaagtgcaccagctttgccaccgaccttgatcctctcctgaagaaacttctcaagggaagcaatctccatgatcttgtcatcgacaggctttgaacaatcaatggtgaaggaaactcccttcttctttcccttggcaacagctgcacctccacgactcattttcccaagacttctctgtaaaatccaaaaaacaatccataagactgtgtctatagatcattgacaaatcatactgatacaaataaagaagcctatattctctatatactttataagccattttctagctactatgactaactcaaaacctggaaaatgggaagtgagatctgtatcgcagattcgactttcaatctaacatagtcaattacactctaagtagatgaaaaatgaagctaatccaagaggaaatgaagctaaaaactcgtttcttctcattccatcttcacatctcgagagacaagtctatcgaatctactatatcagaaactgaagcccgttccattaaagggagatagtagcagcgtgtaccttgaacaaaccctagaaggtgaaattctctgaagagacgagcggcgtcttttttgctttggggagaatgaaacagatggctagggtttttgcccatttaaagtggtcttgttgccctaatttatatttctataaataaccacaagatccccaaacttttgttaaatccaaaaataatcccaattgtttttaaattgtaataactcccacaactcgttagacaagtgaggatatttattcttttgtgttccaccaacaaatgctagttgttcaatttaatcatggatttgttttcagtacattatctcttagaagtctgtatattgtgtgcaatctacaacacatgacaatccatctgaatgtatcaaaagaatgatatactgtaataagcaaaaatttgtttttgtcaattacatgaaaatttccctgaaaggtctacaaaaattctctctagctacgagaccttgtaccaaacagaaaacgctgcaaccaaccattgcagcttaggagtttagagtttttagtctttgtgagataaattttccggtggcagaaacttcggatagcggttggtagcttcagttttgtggtcatagtactccaccacggctgctccagccaaagcagctaaagtcagcgcctgagcgtgcaacctgagaagaagctcggtgagaaaagtgcttcgtacagtaccatgtgactggatgtctcgaacaaatgatttggctaagaacataaaatttatgtcgataacaactatagcttacaggcaagaacagagaaatgtacatgcttttgggacatggagatgatgatgttgctcaactataaatgttcatggctacagaaaatgtttcaaaatgcaaatgagactcaaaaactttacaaaaaaatcattcaaccatttataatcaatcaatccttttgattagaagattcacctggcgtggatgatcttgacactggttttcatggcaggttgggaccagttataggcgatagaaccggtaataccacttagccataaacaacctgattcaacaacggtcaaattaaaacaatacaggttcagaattagcagaaagaaatatcaaaacaccaaaaataaagtagatgggaatgcattctctaatatctttgcatgtcaaagaacattaagaattgaggaccaaaaatgtctcagtggaatcaagaggaaatccaagacggtaacagaaaccgtaacaagttaataatcaattctactatatgacattaaggcgatgaaatctaagatcacaataaacgacccaagagaaaaggaatgttgagaagaagaagaagaaacaaggataattaccgacggtacgaagtttgtgatcggagacccattttctgatttcttcaaatttggtctttgattccaccattgtttggaaaaatcaaaacttggaagaaaaataaagcctttcgccggtaatttatataggctgagataaaatcggaggaggaaagttctaccttttgtttttgtatccctcaattttactattaaactattttattattttgcaattacgacgctgaattagaagaaaaaaggcggccttgttgtaacattatagactatagacaggtcttggtcatttgactttggtttggactgttcgattttgatgtcacgtatagactatagtcttggtcatttgacgtcaatttttatgttgtagggaaaaaacaaaacaaaagaaagaccatcaaaatttgggatagtaatatgaagaaaaactcgacagttaaaatttaacataaccagatagaagaaagaaagtttcattagggtaataacttggatacccaatgtcgccacattaaaaaacaaatacccaaagacctctttcgctcccccgattcatacccagacctcgaaccgcacgggggtcacaccaccgactgggggaggcagtctctctccaaaccattacataccattttgtgtttttagattatcaattcatcacataacttgagcatgcagtttttcaggttttctcaaatatcaaattcccaatgttttttttttctttttttggttttttgtccatcatgagaattgcccgaccggtgagaatctcgaacgggtactgactcagttcttaagatgatcctcctccgccaccgtgcctctgatggaagcttcctgatccttcattaaatgaagatgtccaaatgtttggttctctgtccatctgattaaccgagtaggcttgttgtgattgcatataaggatctctctcccatatgttaaaccggataaaaccactcccacctgcctgatctgaagaagatgacgttgatcccatccctgaagctattcctctagcgggcctccggccagatgggaatacaggccctcgagagactataggcgaatccggctggtgtgactgtgcagaagactgttggtaataggcttgaagagcctgcattctgtctcgggtccgagcgttgcttcctggaaatggtggtgtcctcggaacagatgccaccgagctacccgctctaccactggaactgcacaaacaagccataagatgtgttttaacaaacaaaaaaatatgatagttgataaaaggtctaattggtaaacctgtggtatcacgaaataacgggcttttgttagtcacgtttatttgcagatttgttcattaatttattccgcaagatgtctaaaatgcaaactaaatatgccattacacaagttttcacgaaaattgactttttcctacttatttcaattccaccattccattccgcaaaactaatttatttccacaaatcaagagtgtagttaccaatataacaattcagtgcttcaattttgagaaatctttgcacaaaaccaaatttgaattctgtgagcactttagtttctttatgtgaagaaattctcaacacatttgtaattaaggtcatattttatgttcattagtgatatacctctaccaagacagaaaatgtttacctgtgaccatgaaatggacgcgtgaaatgtggcggtctgggtctgatcatatctgagccgttggctcgagaagtcctcgcagcggctggtggaggcgtgggctgagttggactgcccacatgagcgccagaagcagagaaatgctgtggcggtgggggtggaggcggatgataatcccagccgtgatagtgcggatccacagggaaaccataaggagttgggacttcaccagaaaccgaagagccagtgttccagtgactactgaaacttgaactgtctgaaacgcctgcagcaccaccactgcttgaggaaggcgagtgaaccgggccaaaataggttacatatggacatggatgacctgcggttggcgctgctggttcagtatagtaaccttgctgtcccaaaagatcgtgatctgtaccacaacattagaattaatagatcgataaacccgaattccagaacataagaagaagataatgaggacaaaaatggaataaccgatctgacaaatagtcttacatgaactcggtgaaaattctccatccctacaaagtttgaaagagattcatcagcaaagaagggaagagaatgccagttttgattgccaaaagtagcagaaaagagagttaaatggatgttatgcagttgcttactcgaaagaaggaagacgggctgagcttccaaatgggcaccagtgaactccaaaagactacaaatatacataaacacaaggtattttcgagatggaacataattgaagcaatcaaataaaatgaacagcaatctttcaaaaattaaaaactcagcacatgagacaaagaagtgaaaagtaatgcagaagcgcaatggaatataagaaggattgtgttatcagtttcttaccatttcagagtatgctccaatatcataaatatcttcttcgtgaacccaatcctcgacattgaattcgggatatgaacgacaaccgtttgcataaagccactggcctttttctactttccgacagttggggcattgcatcactccctttgcattgaaagccgaaccaatacaatcttaaaaacaaagaaaacagatgtgaagttagatggctttgtcaaaaacataagaaaccaaccatgaagcataatgaataatccctaatctgaggaaaatttggtcggcttatagatacaaacacacagatactgctatctagagattctgagctaataaatgtactaatgaaacacatatggcacgaacattctgagattatgagccaatacatgcatcaaacaaggtggagagatcaatctaagaaacttggcagttgcaatgaaatagtgatgctatacataattgatgctatgtccgtaacctcacataataataataattcgaccagatcaaaactatatcaagcatgaagccattagtttcagagcttaataccaaatcatgagagccacatcacacaaacaatggtagtcgaaaaaaacagaatgtaacaggttctttattcataaatcgaatcaaataaggatagatctgggtgattcaaatcaaaatctgaagcaaattctttactttttttcaaacaatcgaatgaaaaagaacaaaaaaaagagtatcgtatcagaatccacaaactcacctagatggaactgatggtcacattgaagattagcccatgctcgatcgccgtttttaacaaccgtctcgagacaaatcgaacacgcaaccgaaccaaaaccatcaccttcgtcgccatcggcaccactagcttcgtcggcgagatcattatcgccgaaattgaatttgttacccttattgcctaaacccataaccaaaattcgaaatcaaaataacccaaatctcaaaacccttttttttttttgaatcaaccaccaaattcgaacccagaaaaatcactctccccaattccttacgcttcgattaatttaccagaataattaatttaatccttgtacgaatccgtgaactctcttcgatcgtcaccaccagagagagacccaggaagaagaaaaaaaatcgctctttgattttttagagtttttttttttttctgtagcgttatgttttgtgtgagaaagattgggttacggggtagaagcaatgaccgctgtccaaagactagaatggacggctcagatttattctgacggatttgtctactttacccatcagctgcttccccctaagctttttccatttttatttatttttttccttttccaattttttggatattaaatttaaattaatacccatcttggtattttagctttctatttttggttctcataaatgactttgggtttcaatcgattattctgtaaaaaaaaaagaaatatcggatttgagtaatttgaccgtcgatgatgacaatgccagtaatacaaatttgttcctaattgtttgaaaaactaaagaatttattggatctcatcttctagtacatgtgaactaaaacatattggaaaacttacaagtaaataatagtatagtaaaaataagttttgaaggtcaatagtagtcaaagtttttagttagtccaatgtgacgatgttcccaagcgaattattgcgtccacatgcctaaagtgtttattcgcgccgacttttgcagctctgctccccctcctagttaccaatttccaatttcgctcttttacttttactttttacggtgttaatacttttagagtttaaccccaaaccgttattatatttaggtgaatggaacatggttttcaaaaagttggttcttggcgatttcattaacccgaaaaacaaaaattacatagttttgacaaaaatgaacctcaagaagaccggttagagttacaaacttcaaacgtgttgttgaaaaataaattgtgacatgtaaaacagtaagtttaatgtatttccctggttttataccaatatacttttactatttagtctttttccaaaaatcttttttgtttaagtagataaggaacggctctaatttaacaaaggaagatttcctttttcttatatgaaaaaatacctaagccgagaaaaacaaggaatcaagacgactcctaatgtcaattcatcatctcaccattatgaactctataaatagacttcttctatcttctcttcttttcaccaaattatcttctgctctctacgtttactctgatcaaatcagcgaaagaaaaacaacacaaaaagtctcttttaactctcttcaaacatgttggtctaccaggatattcttacaggtatattctgattctggttcatgtagtgaattacgatattggttttcatgatttgcgttaacgtttcgttttctaggagtttactcgtgtcttgtaattattcaacctcaatcatcgtcgtcacttaacatactgattttgtatctatctatgatctatcccaaaaagaaaaacatacattgatatgtatgtattgcttgtgtaagaagctaaagtttgtctctcttttttgatcaaacaggcgatgagcttctctctgattcctttccttacaaggaaatcgagaatggcatgttatgggaagttgaaggaaaggtattattcttaaataaagctttgagtttttttttcttacgatcaaagctggttgaatttaaattgatgtatcattgttattcttttttgtgttcattagtgggttgtgaaaggagctatggattttgacataggtgcgaatctgttgattttgtaatcaaacaatgaatttgtactaagggatttagacaaattcactcctctcttagctcacaaataatcaaagggaaagaacaaagttgtttgaacagaaagctagggtttgctctataatcgtagtctcttgtattaggttaaagatgatcctttggggagtttgacccccccctatttatacaatgggtcgaacataccaaaatatgataaacttctaattatcttaggtctaaatctccattacttccattcttcatgagattcccctcttttaaatggaagttttcccttcacacgacctcagaagccgcctatggcgatctcgattgtcgacctaaatcttctggcgagctcatgacttaggcccattaacaggctaaccgggattccccggttcaatcgaattctcgattttattcatgttattccttggtttaaattggtattgtcggaggtgctaattcctgcaccaacagaatccatcgggtgaggaagggggtgaagacgaaggagtcgatgatcaagctgtgaaggttgtcgatatcatcgatacgtttaggcttcaggtaaactttaaaaacctttttaatcttcttttctttgagcgcaagaaacaaactaatttgggacaagtttgagattaacttttgggtatttatatgcgatgttctggcaggagcaaccatcgtttgacaagaaacaatttgtgatgtttatgaaaagatacatcaagcaactaagccctaagttggactcagaaaaccaagagctgttcaagaaacacattgagagtgccaccaaattcttgatgtcaaagctcaaagacttccaattgtaagctcttctcttttatcttctttcttctattttttttttgaagttaattttgtctaattggtgaattattttcaacgaatgtgacagcttcgtgggagagagcatggaaggagaagaagggagcttagtgtttgcttactacagagaaggagccactgatcctacttttctctacttggcctacggcttgaaagagatcaagtgctgaatacttcaaagctacagattttatttttttattttggagttttactttttgttagtacttttggttaatcttgagagatttttctatttcaagtgaagttaacttttatgcaatttccttaaattgagagcttgaaaggattagtgcaacgaaaaaggcctgattagttttaaaaattcacttgatatacgttcaaaatactatgatatatacaaaatattagagattgataagtgaattctcttaaaaatttctgaaagaaaacataattttagaataggtctatataccatgaaccaatactatagagatactaagatttctaaatttccaaacttgttttcagaagaagatgaacacaattaaatgtattttgatataatagatgatcctgattcgaaaacttaaaaagatccaaatcggaatgagggtacaagtaaaactagttgaaagataaacggcattgataaaaataaatgatgagagagagagatcaggcgtagtagttcaagcttgctttcttcttggcctggacttggatgataccttcattgaagtcttcatggttcacctgaacacacaaacacaacaacagagaaccccaccttaaaaaacagaccaaactacacaatcataaagctcaaatcattaagagttctgtcttttttacctctgtggcatcacggcgaagagctaacatgcctgcctctacacacactgctttcagctgagctccattgaaatcatctgttgatcgtgcaagctcctcaaagttgacgtctgggtggacattcatcttccttgagtgaatctggattcattcagttgggttagttgtgttatgagagccttttacttatcaccaagggtcatgtttgaaaaatgggagagacaaacctgcaagattcttgctctcgcttcttcggttgggtgtgggaactcaatctttctgtctaatcgaccagaacgcatgagtgctgggtccagaatatctgcacggttagtagctgcaatcacctgaaaaaatagaaaggtatggttgttactgtttctttgagaacgatttttaagaccagtatgattagtccttagaatggataaagacactcaccttaatacgttcatcgctactgaatccgtcaagttgattgagcaactccaacatagtcctctgcacttccctgtctccgctgacttcactgtactctcaaccaaagaatgtgatttgagcaaatagctgagaaagtgcagaaatacatgaattggaatcagaaaaagatttgtacctgtcgaaacgctttgtaccaatggcatcgatttcatctatgaagataatgcacggagctttctctttggcaagttgaaaggcatcacggacaagctttgctccgtctccaatgaacatctgtatataaattggatatgtcatcatgtcattacaatcaagtatcattatagctcgtcacatgtaattattgttgccagaacactaaaatcttatatccagacagggtaaagagttctaagagatgagaattgaatctgatactcatatatatatatatatatatatatatatatacctggaccaattgagggcctgccaatttaaggaaggtggcattggtctgtgctgcgcaggcacgagccattaaagttttaccagtccctgggggaccatacaagagcactccctttggtggacgaacacccagcttctcaaaacgttccttgtgcgtcatgggaagcacaattgcctctacaagctcttggatctgttccagaaataaactcaattagtttcactacgaagcaaagtcaatacagcagattaacacaatggtataaacatacctgcttctctagtcctccaatgtcattgtaatcttcagttggtttttcatcgacctccatggctttaaccctagagtcatactcggatggcaaggtatccaaaatcaagtagctatctttgttaactccaaccaagtcaccaggtttcaaactatcaggatccacgagtccaacaactggtagaaagatggtctgcagtccacataacgaaaacaaaagtatttgctcagacatgaaacgggaaacggaagagaagatgtagaaaacatatctaaagaatgggtttggaagtctcacctgccgtgtagacgttttcaacacaacacattttcctttccgttgcgagtcaagatcaatatttgcaccatcttcctcagcatcatcttctggattcatctccaaaatctaatagcatgatatggtaacacaacagttagaattcaaatcaaataggtaagactctgtaggaaaataccaaaaataagataagaaaactagttgaatacctcgacaatgttgccaaccaagtaaggcagctgcttgttgagtttaatcttctcctgattctccttaatcttctccttgtaagaatcacattctagatttgttctttgcgcgtcttcctaaatccccatcaaagaaaaacacaagatgagcaatttcaacatatccaatttgcaacaagaaagacgtagcttttcaattcaatcaatctcagttgagttgaaaaatccaaactttgaaaacacacgaagaaatcacaagaagggtcataaaattaaaggtctagttcatctcctgcttccacggattacacgaaactcaaaccctaaacccgtaatcgcgaaaaatcgaaaccagattcgagcctgaccttactggaattaaagcgattgatgaaaccaatttaagaagatacaatcatggagaacgatataaaggcaaaggagatcgagagagatatagggcaaaccttgagaattcgaatctcgttgtcgagaagacgagtagctctagtgatatcttcggtggacatggaagcaagctgatcctcttcgaagcttgacgtatcttcaaccataggagttgccatttcaatacccaaatcggagagatagatcgccgggaagagaagagcaaagagttagggatttctcaaagggagaggagagggagagcgactatgagagaaaaaaaaccaataaggagagaagacgagagaaaataaataaccaaaaagaaaaaagtaaattatattagctattaaaaataaaaaagagttttcttaggaaaacttgtcttcaaagaaatgcataggggaaaacctctgaacgagttagagtcttccacattctctcgaactaactcaatataagacaatttaaacccccctgactatagctttcagatttacattccaattatgaatgtctaaatctactcttgaaattgcaagaaccttaatcacaagaactgcaacagaaagatttcttccaaaaaaacaaactttattagaaatgctgttttatttatgtctctcatccgaaatttaaaagaaaaccaaaattcattaaaacatcataaacctttacaaattcttgtcatatattcgagcgttaagtaaacatatatatgctcaaaactcaatcataaatgacaagtaatgcctcggaatctaaaaaaaacaataatcaacaacagaaaagtagtagcattaaacaagctttttttgtagctaagtcagcattggttgtgatagtggagccatcttcatatagcaaaacgatgacgttcacgggagttggcgggatgtatgcaatttcaagagtagtgattcccatagggatcacatttattgtgcagtatcattcggctagatctgaggcgaaaaagcaggaggatgaaagtgatcactgaagacgtccaaagtcagcaatatgcgattatgaaatcaggtaaaattatatttgtattagatgactacccacgctacgcgtgggtttgttttaaaaattgttaaaaaaaaattacattgattgttctttatgctaatttatatttattatttgtttatttttgtattattaataaaattagatccataatatgtagtgataatttttatggttagattcatttgtgatttgaaatatcaatttatatattttgtctataaagctaattatttataagattttaatattttttcactaaatgaatacatataacaacaataatgatattttgatacaattctgtgtaactatgttatgtttgtagtttaaaattttcctaactcgattataaataaatcaattccttgttttatgtacttcaacaatattgtgatagactcatgattaaagtttggattgacatcaactgaaaaagatctgaagactattcgtacaaaaaaataaaaaaatagcaaaaattgaatgtcattgaagtcaatacttttggatattttgtcattgcatatatcaatatttaataaatgattgtgtcttggatgatttgaaaattgttcaacttgattataaataagaaggtggaggaaatgggtaattacgtatgcttttgtttatttttagacgatggaagatacttagttgtttgtgtgtgtatcaggaggaaggagaccatctctggacgtggaaaactcgaagatgatttgcaagaaatttgtgagcctcaactatgactagtgctcatgcttggaactgaaactatttcttttagtatatatctagtaattgctagcttatcactctttagacattttgcaccatcgttttgggcatgggaccaatatctgatcaatattcaaaagtggtttttgtaatgactttaacttaaggattttaatttaatcatgattcaggatatatcagcatcgtcttaacaaattaaaacaaagctttctaaccgaggtgaacacaaaattaatggaggtgattgacaattgaattaagaacaaggatggggacaacgcattatcattaaaaacaaacgtgattagattatcactacaaacgtgattagattaccacccggggcctaagactttcaccatgggcctctattattgggctttcctttcaaattgtgctctctttttttttttttgctttttttttattaacagattatttaaggaaatctttatcattcatattaaagtttaatacatatttagttctttaacagttccaataacatatccgttgtcgtccagcggttaggatatctggctttcacccaggagacccgggttcgattcccggcaacggagctctttttgggaccaaacttcaattctttcatgcggcttgcggaacaatatctatcatacttactaatgcgatttgtatacattactccaaaggaaagacaagacacaacagaaataatacttatccttcacttacataatggaaatcacagaaactttgacaacgaaatatagcactcaaaaggttgcgagttgatgattagtcacttgccaagtccaagttctttctcgacctctcttgttaggctgaactgtaaagtgttctgccatgggaacagagttcgtgtcaccggaagtttcctcctcaaatcctgcaaaattccatatatctgctcagaaatttctaaatacacctcgaggttaccattgtgcagccactgaaatcgttatttggaaagagacaattaccttgaaagtgttatccggtaattttgaataagctacctaatgattgggtcagatacaacgagattaacaacacatgaaatggaaaagtacgagataaatgagttgctaattgggaacctctagagatgcaaggtactctgtttcatggtgcctgataatattggctatggcaatcgcgcagtcatctgcagactgtcaatggaacaaaaaatgaacgacaaggttatatcagagcctacacatatttgttcccttggtgtatattatatgctagcctggcctggcttgtggtctacattattgtacacagtttcgcagataaaatgaggtacctgaaatattgttgaatcttggaaatctttttttgcatctaattccacatttccctcttcaaaataatgagctcctacctgaagagaaagtgatatacttaaaacaagctcactgaacatcaattggcatagaataacgtcacagtcaacttacagagaaagcaagtcgcgaatgttacctgcaatttcccttttatgtcaagcacctgggattcatcctggaaatctatgttccatacagatctccaacttccattactgccaaacaccccggtttggtcactcaaaatcattttttctctctaaacaatggaaatggagaaataagtaaaaggtcattttgtactcaccagaagttctggggactaagtctcatagcagtaattataacaacaagctcaaagtcggaccctggaccctcattatctttccctttcacacaattaactgcagacatacctttcggataagattcactaacatatctctggatttcagcatcaagagcatatctgtaatgagcaaaacaaccttttcaacatatgtattcagcagtaagacaaaaataatgtagatcactccaggttcattgccctttattcctaaacttctgaaagtgcttttctaatgtttgcctttgttgccataagaacttaggctacgaatatatgataattctgaactgaatggtgatgcatgaacctgatcttaaatcctacagctgggtgtaaaaatccatacctgtactcctcaatatacaaagaaggaagttcttcatcatttgcaggccgtacctttgtacaaatctggtcaaagagaggagaggtaagcttaaattagattcacagatcatggcacaccataatgaagaacaacaacaataaaataatgtacctgtttaacatgatcaactatggcaacctgggcagttcttggatcaaggtactcattttcattaatttcactgtaagatgagacaatcacctgagattcaacaaaacagtattacgatatctcgcagcgaataaacactaaacagttttcccataacatcttcaaaaaatatgaaaaggtgatgcaggacttatgttgattgccaatttgatcaacaatagtcagcataagagtgttgcatgtagatatcagtcgcaagtttttaaaaactctctaggaaagaaaaagacacacgaccaagacactcaaagctcaaaaattctcaatccaaacagcgaaattgaagaactcctactagaatttaaaatccctaatttctaagatcgactaatctctagcctctttgcagctagcgaagcaaaaaccctaggaaagcaatatacatctaagagagacaaataccacaaagtatacttgagttctctccttctgagtgatccactaagtattgttcaaagctcttccccttttcattagccacatttctctaagaatcttaatagatcatgagaatagctaattccacataacagagattacaagtcaataatgttcgacaattcaactcctatgacacaacaaatgaaaatttcaactaagtagaatagaaccagaataagatgctaactcacatcaccagctccactgggcatttcaaggcaaatcatgtgagttttgttgtacactggaaatgcttccatggctgcttcattgtacacttcctcatcgctcaaaaccgcctttaaatctgtcagaagtccaaaagatttacagaaatcgaaacaaagatgtcaaatcacgcatgatgctcaaaacaaaacaaaatgcacacggagaatctatgatctcgccttctcattgagggacacatcggaggaatcgtcggaaatatgtatgtacgatgcatctaagtacctttagcgacgtaattgatttctccagcgggagcgttgaggaaaaaccacttggcgatttcctttttctggtcgtaacttagttctgtctccagtaactcatcttcttcgtccgccatagctttctctagaaaaaagttagccggagagagaaattgtcgccgtcgatattctgaactctgtagggatacattcgtcattgcacactcataaactttcctgtgttggatcgcgattaaatcatgaccgttcgtttaccatgatgaattctgacggtgtcgttttgatgtgatagattgtgccacgtggccattcttactcgaaccgcatcgtttttgcagcaaatatcccaatttcaatcgaaacccattcaaattaatttaagcgcatgaaaggcattatctttagcaaaacacaccaaatctaatctttaatgtagtatttgctgtgattaaaaaggttcgagaaactgggattttattaaaagctaatttacaacaacaacaacgagatagataagagttcatgtgtgatcgaaaaaaaaaatctagctaaatctatattagacaagtaaaaacatgtccatttgttgtggcctgtgggacttaaacctcattactaaactaatattcctaacgggagtttaacttgcaagttataatccacggttcataaaatactctctccaagcctttaaaggcctaccaacattggcagattcaacccgactcttgtactcgttcattagtaaccctctagccgcaaaccccatcatctcggttgagtccatgagcttcttaatcttcaagctgacccctccttcgggtgagactctccttttgggagatctgacaatgcgatcatcgctttggccaatcggtttactactgggtgatgattcttctgaaaattgtgctcccatcccaaatgagtcccaatcgactctatgaaagatctcagcagcacggtccgagggtgttttggcattgtgtgacatcatagattgttgttctatatatactctatcaacttgtgcttttaaatcgtacagtctttgtccaattctggacgaaacggcgtcatacaggtgtttccttgagacgtgttgggctccttcagtgctgagaatgtcattaaaatgaatagggtctccaatgatcactgtcacctgcgaaatgtttgacgtaaatcaaacagattaaagattgcaaatacataattaagcaatgtaataacctaatgacaattagtaacactacaaaatgtctggcatttgaactctatatccttccatggacaatacatatccacttactcaaaatatgaatcacccaattatcgatagatcctttctttcttaaatcattaattcgagatccgattcactcctcggatcactaaaaagtcaagtccaacaaaaattgcgagaggtcttagatctgtatccaagggcttgcaaatcaaacaaagcaatacactcttaaactattttaactcgaggcaactaactacttctctgaaagttatggttttttatttgttttctgattttgggcggagcagagatcatgatgcatcaaactattaagagatcaaaaatgaaagctacaaacgaggaagaaaaaattggagattcagatatacttactgtcttgccaatccgtggaacactagctccaactggcattatatcctgcataccagtatgcacaaaaggaacaaccatagggagagtatctgcgtccaaaatcaacctaaaacaaataaaacttgttatagaataaaatgataagacacattaaagtggagtgctttatataagggaagtgaacccaaatcacacatgactcaccttccgatacccctcttcgctgagcccatagtctttccaccatcccgggagcgactgccttctggaaagatgtgaacccaccctccgttgttcaatttcgaaatcgcaatgtccattccctgcagaagatgtgacacttgttttcatcagtaaatttgaatatagataaaatagcaggtaacaatcaagaaaagctagctacaaaaacagcctgtgttacctgctgataaattccttcaccacgagaaattggcaaaactttgacagatcgagagaaagctgaagttacagggtttttaaagcatctatctgtagcacagagcgtccacctcaaattacgggcatcaagtagaaatttaggtggaagtaatgaagcaatgacaaatggatcatccacagatgcaacatgattgctcacctgaagattattaagaagttcatgggtaagaaaacaagcaggttcatctaaaaccccaaccacaaacacacaacatttcagaacataagtcaactcataccgttacaagaggcttgttctttggtctgttgagtaaagcatcatgcaatttctctaaaccatatacctaaaaagataaacaaaataagaactgataacaggactaaagataagaatgaaatttgtgaagcagaaatctaagatgtctcaaacctgaacacggttaaaaccattcatgaaaacatgacaagcatttccaataaggggaacagccacagtttgtagcatccggaaaagagcagactcttcttctgccgttaagtccttagaaactacaagaacaaggagttttgtcaattcaaattcccacaaatcaagatagtagacataataacaaacagaatcattggagcagcttggaatgacagctaaaactattgccaaaaagtgctaaaaacaaatccttcaggtgatacaaaacaaataacaccatcgagctaatctacgccaatattacgactcaaaccatctctcagagaaacagctgaagttcaaatcacaaagctcaattacacagatccactattagagttaataaaaggtaatgattcattcaaacctcgtctgcgataaaaagccggtggagaagggagagactcccggcgaaagttccggaatcgagtcacccagcggtggatagtggaagagaagcaaccatccggtgagaaaaccgtagctcgaccacggtgatcatcgacggcgattcgaaatcgatcacgaagtttaagattgaacaacagtgcactcttccatagatctgccttgtcaacaaaatgaattcccattctgaatcgtgtttctataaaacgagccgcgcgaaagattacttgtgaaaatttgattcagttagaaagaccgacggacgaaacttctatagtcgaaattttgaccgggaaagaaaaagctcaccaagagagtgagaagatcgtggagatgagagaaagagagcaagtgtcgggaggtttacgtgccaagggtttggagtgctaacgtgaacggcggtgacttgtgtgcataatagctattgggattaaagtttcggatcagcgcgacatgggcccatagtttcttgaaaaagcaaatctcaagtctgcttctctcaccgctgttaataacgctaacgattatcaaacatgatgacatacctcgtcaataaaaaaggttcacaaacttgttatagatatcagtaatatctgcatatcacaatacatacgagttgcatatgtctgcatatatacaaactgataattaaatcctaccgacaacaatattcatctcttgataaaaattctcggtccattttctgaggatataaatatgtaatactatgatgtatcactcaatagggcgataattcacgcaactttttttttatcactcaatactcaatagggtggtaatcccaaacttagattatacaacttttgattattaaacgaaacaacaaaagttcatgacaaagaaaaaaaagaacgagaaccagagatcaatcgctaaccaagatccggttcaccttaatcccaacaaaacaaaaaatcacactaacaaaacacccatatcaatcaagtggatggaactccaaaggctcggtctcagctttctcctcagcgaagatttttgagatcctctctgttggaaccaatggcatgtacgatgtgactctgtaccctttctctgcagccttaaccacagtatcattgtacttctcagagcagaaagcagctgttggtacagcaacttgagccagccttgggaatagaggaagctggttaagcttcttccaagctgaaacggcacactgctctgcttttggctcatagtttgcatacaactccttagcagcaggctcgtacttggagtagacggatttagccattccagaagcggtttcaacaacaccagcacgtcgaacctcagaggccaacgcacgtgccacaatgggtgctatctgagcagcggagatggcttgggcagacacttgcttgacgactggtgggacacgacggtcaagctcagtcacagacatatcaacctgcaacaacgcaaaacaaacttgtcagcttcaaaaagagggactctacagaacataatgacattgacccgtttacctgaaccttctaccaaagagatgatatgaaatcatcacaactttaactgtacttttttaatcacatatgttcgatgaagtagatatacaatcaacaacacagattcattcattgttcatcaacaaaggcactttcagcaagatccaaagatagggaaagagtcaaaattgtaccttctggtccatgtatttaaggacctcaacagggacgtcgtggtatttctcgtagacaggaccaacgacagtcttgacagctccttcaacagattcaacaccaggtttcaaaggaccagacttgtcctttgccttagcgtaaataagagcaaagcgaagcagagcttccacagcagcagcttgcacgaattgcaaatacttcaacctctctttctcctccttggtctgacaattcaataattataacatgcaaattaattagcccacaaaatatcatttgttttcaattcattaatctaatcttctacataaacaaaacattaacatgcactacgaatacgatctgaaagaattgaactacagatccatgaatgcgataggtagagacatgtgaacaaaattgaaccaaaaatcctccaaaattacaatcacagaaacgtaaaatcaagatttgagacgaaaaacgataagaaattgagagagatttacgtaatttaccatatcaagcttgggctgagcgagatccgtttgagtagccatgatgaaatcgatgcaaagagattatcgaaaaaggcgattcgtttgaagagaagagaagaaatttaaaattgattatatttgacgaacaaaacaaagcaatggtgatgagaaattgacgtgacctaggtttctttatataacaagggtttttggcacgtgtaagaaccttattacgcgtgtaagcaagcgtgtgttttctctaattgggtcggttaggagcgcgtctttgtatgcgctctctcgtaaccatccatattctttgggccgttgacgacttgtgggttaagtaaatgtgtgtcgctaagaaaaggaaattttttattttgattttgttttttctcaccagaaaaggaaattgtttataataagtattataataaatacaagaatattcttgttctaatgatgaagacttgggagtcaatggaggaatttattttagattctaatttacatagtttaatgattttaaaagtagaccaatgttcacacaaaaaaaaaaaaaaaaaaaaagtagaccaataaacaataaagggaaatcatgtgctatgggctcaaaacaagttgaagcccactacttaaaattacatgaacacaaacaaaaacaaaacaaaactaagtcacgtgatcattatggcccaatattacgagtaaaggcccaatagaaacatcgaacgaactatacccatgttagtgcgtggttcatcacatcggcaaagtatgaaatggagaagagcccaaaacatgacccaaacaaagctacactccaacattaatctcgatcaaatgactaaaacttcttatacctgattgtgctattgattccattgttagtccaatttcaaacttggtggagggaaaatattacagattcgagtaatattaattacaaacccattggttatataaaaataaatcatttgcggctatgattctgtttatattcggcatttcagattattatccacatttatctagttctgaatctttacacatgctaaaagagaactatctaaactctagagtatattttacatgaattcatgaaaacttttgttttatgggtaataaactctacagaatattttatactccgacttgttcttcttgttttccacattttcattatggtactacattcgttattacttgtaaggttacagattcgtctattgagagccataataatgtctaaaaacatatccaacgacgcatcattaattatataaaaaaaacaattacagccaaaacgaagtttcgaggctgataaattagtataagaagaaaaatgttacgaattaggttgtgatggtcccatcattaccttataagccaacatgccaccaacagctaataaaggaaggatcaattcaattctgcttttatttatctttctgtctactataattaattaatacgctccaaatatttattactcaaacacctcagattcatataattaaattaacggtaatcacttttcattaacaattgttagtaaacacaaaactacgcacagatctcaaaatcacttctcggactaataactatttttaatctacgcaactttgaattttttatttatgtatatagacaacaaccagaaaaaaaaacaaagaagcaatttcgttttttttcctttcaaatcaaagactatagtagaagtttttttttcaatgtgtaaaatcaaacccatatatcccggaaaataaaaataattaaaaaaatgaaaatcgagaagagagacagagacacaaaaagaaaggggcaaaataggaaattcaagtgactcatcttcttcaacgcctgcacctagtgatggtgctgcatccacggctgtaaggattcgcctgagctccacgctggcagttgtagtacgacgcaccacgccgtgaacaaggcacactgttcctcctcatagcaccgtagctaatgtacttcttctgtgctaatatacgccggcttatgtctgaatcgaactccatctcttcttcttccgctatacactctgcgatcgatcctgtgcatccagagaagagcgatgaagatccggctctcacgaaatctagcgaatctccgaagtctccggttgattccacggctgagattactatcgccaggatcgcgatgacggcgtagatcgcgcgagtgttcgtcatctttaagccaaaaccttctcggtgaatcagagtcttcctttgttaatttgcttttactctctttctctcttggaaacttgattctgtacacagctgaagacaacaggttaagcgttggtgtgtagcttcttataacctgaggtttttgttataatgggcttgtgtatggatatattaacgaaactgccattgtattttctccaacaaaagaataggtacgcgtttatttttttgttaattgattatgaaattgacttattatacgcatattcgttgctctttattttaatcatgcaaattacaatgtctaagctttgaaatattcgttgggtttattttgaagttttggatatgttttcgtgcatccacgactttgttagttattaggacggattcaaataaaattttaaattacaattaggttttagttttacatagcaaaatttttttattaatccaaattgcaatatttaagaagagcataatcttgagtcttgaatactatttctttacgaccgagaaaattaattatgttgattgatttcctaacatgttaatgttccacgagtttcgtttaattgtgtgtttttcattcttctaaagagccgaaaaaaaaaactatgtaatggcattttacgtaattaatgggtgaaaccaggggcatagctatgcagaaactggttgaccggtgtgtcattttccatctcgctctatcggccaaatggtatgaactctagttagacggcatccaacattccgttaacgtcaacgcacgtttctcctttttccgtttatgtttattgccggagcttttttttcactgccatcattcttactttttttttcttttttttttggtcatgtatatatttgaaagaaaatgtgatttacaatttcatgtataatcaaatgttcatctaaagatatattattttgttaattagtcaactactatccaattttgtgcacattcatatatttggcaaatatgcaaacttgctctagtaggtgaaaagcaaacttaaagacatgtaaaccactatccaaacatggttactaatctatacactccattcatgggtagcactatttctgcgttgacaatttatttagatagaatgatgtccgtgaaataagattaatttgactatccacatatataatttagaaacgataatccatgtgtgtttgagtgtttcaacgtttatgtatgcataaagttaatttagagaccattagatgatcgattcttattgcgaaatagtatttcttatcacaaatgttttatttaaaataagagagcaacggctagtttgtcttttttattagttttattgtcctccgggataaagtcgacggcgtcagagaaagagagaggcggcgcgtaacgtgagaagaagaaaccgttaagaacaaaagtggggcccaaatcacagatcactaaggacggcgtttgcgcgttaccaagtttatcccccaaaagccagctggctccttttaaccaattctaattgtttttgtttcaatataatcttaatcaacattagctttattcgattgtattttcaagtatttgatagattactaacaatcatatgatagttagtttttatattaaagtagcaatcatgattagaagacgacgacaaatgttttatattttgttttgaagaaacatatcacgagattgaaacttatcattcggaataattgatgtaaccgaacaaaattaagaatgcgaagaagatgaaattacataacacgaaagtgttatgcaaaggcaaatctctttacttttcttatgaggcaatcacgaataagataccaatgatgaggatatcaaaaagaaaaaaacaaagattccaagttatggagaacctcttcctacaacttttatcaagtagaccaatcttttttaaaagattgcacaaaaaaaaaaaaaaaaaaaagagacagagagatgtctttaaattaaaaacgaagattatagccaattcataaagttgatatttctataatattatattacgtaattttaaaatggtccctttctttggactagttcgccatcttttactgatttaatcgtataaagagagacaaagtggttggtaactttgaagaacattttaaaattatgactcattttattctgtctcatttgcttttatagagggttcatgaaaaactccttctcatagttgtgttttgatttaaacaaaggtaggcgtttgaaacaatcagtctaagtgaaaagataagagaatgcgtttgaaatttgacactttttggctgtgttgggagggaaagcaaagaggtgggtataataagaatatagtatagatgcagagattcaagcgcaaggtgtgggttggcattctatttttatgtcaagttagaaagaaaaagcaaaggcataataaacaaacatgactgaacaacacagcacgcgattcagaagtttcgccaagaaaggatcaaagtttgattgtagtggatgaagcacctaacactacacatatatgcatgtactctcacctttttcttctattctattctattctattctagacagggagagagagagagaaagacattttaccgtaacacgtagagaatttatatgtaagtgtggaggaataaatcacgatcttagtgccttactttacttgtatattctgtcccagtttccacaatcttctctggatcactttcactgtaaaaaaaagagaatgtacaatgagtttgaataagagaacagatccggtgcttatataacaataattaagaacttaaagagtgacccttgtttcttgttcttgacgcatttagtctgtttagtaaaagtctacttccaatgagaatagaggatgatgaaagaaaaacaaaacttaaatcatatttgaatagcattctgtggtggcattactggtatcatacacgagaaacatttctttcttgcaagatatactagtaagagtgtctatagctctttctattaccacacaagaagacacaagtctgttttgatcaatctctcttgtaattaattagcttaaaaaatcttgaatgattgcgagagaagggtcgagaacttacagctggatgagatgacaaaaaattcaagagaaagggacttgtgttaataatcttcattgtgaggtggtgtcgcctcgacaccttcgtcgtcatcttcttcttcctcatttgcatccacccaattactaggatggtgctgggagaaactttggttctgtacccgtactgaggacaagtgacaaagaaatgactactttttaggataagtaacgagacaagagaagacaaggctgtagaaatgattttgcaggtacctcgggatccttcagcatgatctatctgtgtgggacgttggctgaaatagagtcaaagataacaaagcatatatagaaagaagtacagtcactggagatatgtgatttcgggttatggggcatgctgaaatggttagtcgttaaataggctaagaaatgcattttagaagcaaattgcaactacacaagcaggaatttctaatcaattatggactatgatttaatgctgaacagctaaacatgccaagaagtgtttagtgatagtgattgtgagagtgaaggatacgacttaggaggagctgcaggagcagtatctccaactggcccgccttttgatatttccatattcctaattctatggatatccaagtctggttgtccctgagcctgtggcctatcctcagtaccgttcacgctcttagtggcagttcctgctaccgagcattgatttcttaaggttttagttaacaggaaatattgtgaatacaaatcataaccattagattagtaactacctgaaagttcagaccatactcgtgtgtgatcagatgggtgctcagaggcattttgcctagaccgttcttgaggccgtgatcctacttgctcggcagcatggccacctgtggagtttgctgcttcaggaggttctgccggaatcccttcctgaagttgagacacaagcattgtcgcaagaacgagtgttgcatcaaaactggagcttgacccatcacccaaaccgaattttggagccatcagtattggtctagcaacgaagtacatattatgacattcagtaacagataagatagtgactacaaaactagttgtcccggccaaaaaagaatttggtgtttaaatgagtggtttagctagctaatttgataagcatgcacctttatagacaagaaccatagtttagaagtattggccagaatgaaattgcaatcgaatttaaaagatgtcaagagtacacaagaagatgcattttaataagcgaaattcaaagcatgaaaaacataggattcttactcgccagctttttcgaaaaaaagatgaatatcggcttcacagccctcgcagaatgcaagaaatgcctgaaattattgaagatatttagttgacacaaacagaggtggatgaaattcaaaccagacttccaaaggaggaatgttaaacctttagttccttcaaggaaaatgtgatgtcaactggatcacctgcgtgagtatactgcaaaaattcttctgatggatcaatccatagctgtgtatgtaacaaagagtcaccatctgcggattgaaaagagaattcttagcagccttcctcagggaacctggatattccagttttatcatgatttccgtgtcctaacctttggtaggatccacatagctccgaaactcaacagcttttccacctatttcacttgcagcatcagaggggaaagaagtttggtctgtagcaataattgtaatctcttggagggatgactggaagtttccaagcaacttgctcagatttcgaggatgcatgactaaggtactaggaaatctacccctatcaagggacagatgctgtatatctggttccacattgcaagtaatccaatatgttttcttcatacctgtacatatgataaaacaaattcaagccacgcttcaacggtaaaccataaactgctcaaagttatctaagaagtagaggtcacagttaacagtttcagataatattaaactattatgaacaggtctgaaacatgccacatccaggtttttacacaggacggctacacaaagttactagagaatgtgataattgcagacaagagcaaacaatgtgtaagaacaaggaaatatagattttaccactgtaacactgcaaagtccatttgaccttagatgcatcatgatctggcaactgcacactcatatgatcaatgctcgcgagaggggttctaagaacagaacaaacagcctggtaaaaaagtaatatcagcaacaactacttacaccaatgaatttcattgctaaaaatttcagaataacagtaaaaataccttcaaaagtacactgaaatgagcttgaggaccagaaacagtatatacatcaaagaaacttgactgaaatgtgatacactgataggcagaacgtgaagcattcaaagtgtgcaatgccagctgcaaagttatgcacaaaacaaaagaaattagatctaacaaggcgaataaagtagacagtaaaatcagagtaatgtgacgaattgttcagctaaaagaggtgataaactacaaattcaatcaacacagcgttcctaagcctcttaaagcatttgcccagaaaacgatgaaccaaactcttggacacaagattttgggtaaactaacggcgataaagtaatcatcgacttaaaaaccctaatcgtcagtacaaggtgacgaaaataacttataaacaatttatttgcaagagtcgcaccaaatacttgccaatccttaaaattagggttacggaggaaccgataaagcatataaaggagagtacctgtgtcggcgaagcttggacaacgagctcgttaccgacgcgtgcgaggcagattatagacctagacaaggtcttgagcgcattgccactgatactcaactccatctctctctgtctctggagaaaaataaattcaaattttaatttaaaccttaaaaataaaataaaaattggtgaatgattttagtgggcgattggcgggattgccatgaaattcctgaaatcagcttaaagcgcgaaatatactaaaaagtcatagtatagtttcttaataatgggcctatattgatattagttaatgggcttttaaccgcacgatttaattgggcttatgtctcagatagagtgacgtcattgactagttcggtgccggtggtatactttaattggcatttattattgcgaaatatatttgttgcggtgacaaggacaaatctcgcaattgtactgttttcctttaccgaaccacaaatctaaaaatcgccaattatttgatttcatttttcagtttaaaataaaaagaaatgaaatatttgtctttcttttcttcttatttcttgcaaatggaatctacaattttctccaaactagcatgtgatatatctgacaatttatgggctagtatatttgttttaaattttttgtttgtttctccaaactgattatttactttattctcaagacaaagtgggtacaaacaactctctgtaaatgtggattccccttttttatgctaaatgtagacagaacacatcaactcataaaactcttctcaatatctctgagaaatgcagacaaaagttgtaactttctgcattcgacttttgaatatgaaaaaagttagatactttagcatatatatcatccctaaattatggtttcttactttttcattggtcttctcgatacgctgacttataatctttgactcctaaactccttttaatttatttgattgacaagtaacacctagactttgaaaatttgtaactaatcactcatgttagcattacgtgatctacggtaccgtgtatatgttatataatagagataacaaagtatgtagactattccaatataatacgtttaagtctctaagacaagttcatacaacattggccccacgtatatcaaatttgctgacacttgagaagttaaatgaaccaagtagaaagagtgaaaacaatagagaacaaatattgtgtacaagtctagtgatattcgcgaaaaaaaaaatgtctagtgatattcgttttactcaatctcaatggtaaaataaatcattcaatctagtaatctactactaagggaattttttaacatctttttctatcgacgtgagagataggattgaaacacacaattctcaacctctgctttgataccataaaaaatgatgaaagtaaatacaacttttccaatcatatgtctctccctcatttcaatattatgtccttgtaaacacattatatatgatcttattttgatgaactttgatataactattattaaaaacgcattcaaaggccaaacactagctttctaaaaagtcattcatcatatcaaactaagaaaatcatagtataaacttctcaacgaaatcaacatcatattctacaagataatattctttgcgacctattttgtgaaattatgaacaactaaccatctcactttgggaagctttagaatgtgacaagaaagatagagaagtttgcctaaattattaatttcaatttcgtcactacccacctattggtctgatttaccagaatccaatctaaagtccatatattttttaaaatacttttaattgaatattcatcagaattttggaaacttctaaccgtaagaataaatgttagattactaattatgggtgaattgagaattctttatccaacttatcatttatatagcaaaaacatcccccaactgacaacaattttgagtaaaactttataatctttcttatagccatatacgacagagaagggacatgtaaaggaaaatattttgtctatacagaaatttatgttttcctttgcatttgtaacatatttataccactaatattctatcaaatagtttcagtcaaaattaatttatctataatggcagttgcgtattgtgtgtgttacgaaactattacgacaatagagtttttttttctccgaacattcatatatccttaaataacccatgaataaaaaaacatatgaatgggaatcattcatacgtatgttgttaggtacgtgtatacgcacattcatatcaaaacacaagaataaattctatacaataaatgcaaaaattcgtttgtattgtaatttgcctcataaaacaatggtgggttgagaggaacaaagaaagcttgtacagtaaataaccaaatggctgaagaagccaaatgtgccaacaataagaggacccacttcacaccaacaccttcacgcttctttctatcttctctttgcttactagattttctcctttttaatctcttccttaaacaaaaaagctgttttcaaacttaaactaaaaagcttcatattgtcaccacattaattccaagaaaattcgcattaatgctctgcaaaatttaatgattttaaaattaacatttgttcctttattcaagaaaaattcgcattaatttatttatttaagagatgattacctaaaatggtgtgtataaattgcaaaattagctctgttgttctgctaggagagttaatggagaaagagggtgttaccattaccagtacaactatagttgcagagttcaggggttccttggagtagcattaaagtctcaaaggagagaaaaataaaaaaaaaatacattaaagacaaattgagtcttttctcataaatggtttctttgtagtgtttatgatttgtttttacagagaaaagatctaaaaagagaacaaagatatggtttattttcgtcagatttttctcatgatcattgtagtttcattacactgctgcaaagttagattcttttgcattgttgctaatgctaaagagcttgatgactggaaggtgttaacggtggaaaacggtgaaagataccgaacccatgtcggaagatacgccggagaagagggcggcgagaagataaagcttcgagttttggaaaagtttcgagctttactcgatttgattaaaccctctacttcacggagaagaaatctcgccgagtctgcttctttctctccttggccggcgccgtcgccgtctccgtttcccaacggtggtccaatcgaatctccggcgtatcctccagctcctccacgaccgattcctccacatctccgtcgtccgttacctcaacggacccatccattggaacaacccgagattcaacggcgaaaacatgagaaaggaggaacatttaagaagattcttgtacctgtcgttgcttccacagcttctgcaatcggtttcgtagtatgtgtcgttggagtgttctgtctctgcgcgagaagaaaaaggaaaatgaacggtaaaacgctgtcgtttaaaaggaaaaagggaaaatctcaaagctcgacgaggaaggttagtgtaaaccctactctcgatttcttgtacctaaactcactaggagttgacttggagagacaaaactctgtttctgttaaagaaatacgagaaacagagaaggatttgaacggtatcaatggtggattgcttgaagaagaggtaaagagaagtatagaaacagagatctcacatgattgggacaatgctagtagttattcgaccaaagagattgtgtcggtgcacgaaaatgatgaagaacaaacagtaaactctgtttctgttcctgttgttgtaatcaatgattcttcagacgatgatgagtcttttcattccgttggtggtggctctcagtattcaaatccaagattgtcaaatgcttcctctgcttctggtagtgttaacgttggttcctctcaacgcttctcagaacacaaattggatattcctgaatgttctagaagcgacttcggaatctctgtatctgctccaccaccaccacctccaccgcctccaccgcttccgcagttctctaacaaacgtattcacaccctgtcttcgccagaaaccgctaatcttcagacgctttcgtcgcaattatgtgaaaaactttgtgcttcttcctcgaagacaagctttccgatcaatgtaccaaattctcaaccgcgtccaccgccaccaccgcccccgccacaacagcttcaagtagctggaattaataaaacgcctccaccgccattgtctcttgatttttctgagcgtagaccattaggcaaagacggagctccattgcctaaactgaagccacttcactgggataaagtcagggctacaccagaccggactatggtttgggataagctcagaacaagctcttttgagtaagtttttaactagccacaatcaacaaaatgtttttcatgaatgtgtgattatgtggtcttgtggttattcagattagacgaagagatgattgagtcactgtttggatatacgatgcaaagctcaacgaagaatgaggaagggaagagcaaaactccatcaccagggaaacaccttcttgaacctaaaagacttcagaattttaccattctcttgaaagctctcaacgcaaccgcggaccaaatctgctctgccttggggaaaggtaaactaatatcaaccaaaatcaatccattgaggagctgatctgatgttaaaatgtttatctgtaggggaaggcttgtgtttacagcaactagaagcgttggtgaagatggtgccgactaaagaagaagagttgaagctgcgtagctacaaaggagccgtggatgagcttggctcagctgagaagtttctcagagctcttgttggagttccatttgcgtttcagagagctgaagcaatgctttatagagaaacgtttgaagatgaagtggttcatctcagaaactccttctccatgcttgaggtattacagtgtttactttatattcgtttattgatttcttgcacttcaagttacggtgattaacacttaaaagtactttactaggaagcttgcaaggagcttaaatcaagcaggttattcttgaagcttctagaagctgtcctaaagactggaaacaggatgaatgtaggaaccatacgcggtggtgcaaaagcattcaagctcgatgctctgcttaaactctctgatgttaaaggcacagatggaaagactactctgcttcattttgttgtacaagagatctctaggtctgaaggaatcagggtttcagacagcatcatgggacggatcatgaaccagagatcaaacaagaaccgaacacctgaggagaaagaggaggattacagaaggatggggctcgatctcgtctcgggtctaaacacagagctacgaaacgtgaagaagacggcaacgattgatctggaaggtcttgttacctcggtgtccaatctgagagatgggttggggcagttgagctgtcttgcgagtgagaagctgaaaggggacgaagaaaacagagcatttgttagttcgatgagctcgtttttgagatacggcgagaagagcttggaggaattgagggaagacgagaagaggataatggagagggttggagagattgcagagtattttcatggagatgtgagaggagatgagaagaacccattgaggatctttgtgattgtaagggattttctagggatgttggatcatgtttgtagagaattgaggtgtgttagggttcccaatagccctagccctttggctccgtttcgatgagcaatgttgactatgaacagaggtgtgactgtttggtttctgtaggaattttttttatgaaatttctgagttgtttatgataaccgagcggttttggggtttattgtggactagaggtgggcagagattcagactttgagtctatggatgaagatggacaaatatgtatatggatttgtatatgtatcatacgctaaaatcattgattcatgagagacgtcaacatttctatggataatccagagtttggtacttattccgtttcttgtttcaaagaactacatacatcatcatatacacatcaatgaggttgataacaaggttctagttataatatcatgatactgaacacaacaacttcattacacaaaacgacaatgcttacgggagtgtgatggatgagctcgagtgcttcgatgtttgttttgcccaatagtcatcatgaacccctcgtgcttgtatatatgaagcctttctatggattctttttattcttacaactaattttgttgatttttaccttgatgaggttgaagggtgaaatgttgtgaatggaacgtcgagatatatttcattgttgagatattcttgattagctcatttcatatagacatctttctaatgtttcttaagttgcgagttcgattttcacaaatagtttaataatttatatacaaagagattttaagagcacaaataattaaattatgtatttttattccaaccaaaaaattttgagtattaaatgtccaaataaaaatttaagaatatttttgttagttaagatagttaaaattaaaatatgggatactataatgattacatgccgattatatatgttaggtgattgtcttggtacgctttgtttaagtttggtacgggcattataccagaattatctggctatatatattgatcatataaatcaaatatttagacaaacacgttttattcaataaaatgcgttttataaggcattcacatatcttataacttacattcccattgctaccaatactgcttctttactatcaacgccttgtttcttttagcaatttggattctctggattacaaggttttactatgcattttggatctcttggattgcaaggaggatcatcgtgaagatatccactgcctctgtttggcttaatggcaccttgttccattctgcaatttggattctctggattacaaggttttactatgcactttggatctcttgggttgcaaggaggatcatcgtgaagatatccactgcctctgtttggcttaatggcaccttgttccattctgcaatttggattctctggattacaaggtttatctatgcactttggatctcttggattgcaaggaggattatcgtgaaaaaatccactgcctctatttgtatgcacgccgccaccatttgtatccattgtcctacctttcacaagatcatgtccttcaaatgtgattatatttaaatatatgttagtccaacataatttgtcaaaaaagtactgcataagattaatttctattcggtaggtttcacatataaggttaatggcaatatatgttcagaaagtaatgattttgaaacttcataatttctatgatgaaatatttttccccattctcggtcatgcctcttattcataaattttcattttcttatttttaaattgcatagagttatgattttccattattcaggtattaaactacaaattgaaaagtgtattaaaaaaactacagacgggaaaataaatatacttaccaaagacaagaacaagaagagaaaccaaaaacaaaagctgaaaggaaacgttcttcatcttccaacgaaaactgttacggtgtattttgcttttagtgatgaagcttaagtaaccttcgtcgtttttttataatgcaatgtacgttgtggggttttaaccaaaagaaggaatgtacgttttgggtttgaccagaaaatcttaagagttaatactaattgatttgagtttgactacactaactatatatggtacgcggtactatactactatatatttcaaaactgttgatggaataaaatcaaatgttaaggtaagttaacatgtattatctactacaaaatgataagattatatctcaaatttgatacacgattctttcttattaaatgagttctctgaaggcctcagaaatataattggctaatgaaagccacgtgtacatagagactgattggagggaaaaaacgttgaattgaggaaactcccaccagtcctaatcttctgatcttaggtgaaacgatttttattctcctttttttttgaaaattgattttctattgaataggcacgagaaagaaaaataaatacacaaagttccaaacacacatgagtgaaccaaatcattataggaaaaaggagtaaatcacgacgaaaaaaagagaggattaaatcaaaccatttccaaaaggccaaaagttgcttgacatagggtctttgttttgatcaattgcaactgcaatttcaattatactacaagcaaccatgtatactttaatctttcttaattatgcggacataaaagttgtgtcgtcttcttagaaaataccaaactggcttgaagagaaagttagggtttgttcgataaacgacatggctccaaaatcaagcaacagtgagatgaaggatggatcttcgagcgacccagaactgacatagtccattgaaacttctacccgcgttgcctcatcgttcatggtgaagcgcagggccgaaattcccaacatatatcttgctcatgctgaagaaaccaatttttacttgaatttattatacatactttgccacgttttgggttttgacttctttccatatttatcagcaactaatttttctgtttattttgtctattaatgtttgattgaaaggcaatggaagagagaccatttccaagttgatggaagagaataatatcatatcttatttactatttagcattgtactgtgaatagtcattaattaaagagggttaagtctctgttggaattttcagttagattataaaacaaagttgttttgtataagaaaaatcaaacaaatgtgttcctcaaattcctttaaaaaaaaaaaaaaaaaaagaatcacacaaatatgagactacaagctaaaatattttaatgataaactgttggctaggcttcttctctacaaaagaaaaccaaattggcttgaaaaggaatttagggttttgaaaaaaatcgacatggctccaaaatcatgcgacggcgaggtaaatgatggatcttcgagcgacgtaaatgtgatggaaccaatggaaacatccaccggcgttggcctatcttttctggggaagcgcagggccgaaacccccaaccctggtgaaagcgagcaaatagctgacgaggacggagaagaatacgaatcagtcgaggacgttgttgtggaagacgatcgaatcagaggaggaaggtgacgaagagagtcacagggatgaggaggatagtgagccggaatggggttatgatagcttcgatggccgagagtatcattcctctgatcagatggggtattcggacaaggagtttgatgagaaatgtcgttattatagacgccaagtcatcctaacaaggtattctcgagtagaaaatgattcattcggattttcgtgtatgttgttgttaatcacgtatctttggtttgtttagggtttctttgagccgtcagaccgttttcctcccctctggggtggaattagttcgctctacgatcttgaagcgaacgctgggaaaggccttaccgtccgtgaattctgcgctaacttgacatcttcatgtctcaacaagtataaccaagaagtggcaagttgttcacttttaatttggttctaatcatggctattagattcctaattatgtgtgtatatctaaatcaattatgtcttgttgtttttagggattgaatgtgaagttggaacatatcttgagggcgaattacaaccctggctccatgtccaagttttacattacatttgctgcaagagagtctgattctccagatgcaccttcagaggagtatcaagctaaggccgcatggtctgcagccgagaagacttatcccatcttttgtagaccaagtcctctacaaaagtgaccactcatatagactatacacgttacggtttaggctcttaattttgtttaaagggtgtattactaattgttatatattaattaataacaaaaaataaacagttaagactagagtatacactaagttgaacatattggaatcataatgcaaatatatagataacaaaataatttaaaaactgatgaggaatcattttttttgtctgatggcacaaacgcaaataagtgtcacggacgataaattactatgaattgtgttatctatgcgtttagcttcttgttagaaaaaaaataaaaaacccaaattgaattgaaaggtgaatctaaggtttactcaatcatcgagatggctcctaaatcaagcgacggtgagaccaagtatggatcttcaagcgacggcgagatcaagtgtggatcttcaagcgaaaaccaatcaacggagtcaatggaaattaccacgggagatgaatcttctatgctggggaagcgcaaggttgaaaccaccgacctggaggatcccgatgaaaatgacgaggaggatcccgatgaaaacgacgaggaggatagtgaaagtgatagtgattccgaatgggataaggatagcttcgatggccgagagtatcattcctctgatgatcagagagagtatgccaccaaggaccttgagaagagggcccgtttttacaagcgcacggtcatcgaaaccaaggtattcatctgtctatcacccttttccatctctatacgtatcgaattttgctaaatgggtcattataaaatctcaagtaacttagtagtttgttttggttttaggttttttgagtcaagtgccgaattcccaccttacctatggggtggaattgccacactccgtggtctggatgaaaagatgcgtacaggtgtgacagttcgtcagtttctaggaaacatggcatctctctttgtgttgacaaatataacaaacgacaggtaacaacatctctctactttggcttttcagagtcctagctagtttatatttatgagatatgacccattaattattcttgtctcttttttccagggatttaatgtgaagttggatcatgttttgagggctaatttcaacccagggggcaggacaacgtactacatcacttttgctgcaagagagtctgattctcctgatgcacctctagtggagtatcaagctaaggtggattggtctgcaggcaagacttatcccatcctttgcagacccacttcacctaaattgggtaatcttttttcacctctcatattcagattttaacatgtagttttgtatagttgacccagaaaaaagaacacgtagttttgtatatatatatatttagattgatcagatatggagtatcaaaaacaatgtggtttcttgacttgttagattgatcaattaaccactctgattgttatctcgtaaattctgcatatagtatactggtttttgtccgcttgatatataagcctaagaagttacaattaccatctgattttgctgttttttttttgttctgtcaatctgttagttgaagttgatggaggagctcaattgaaaaaggtatccgaggagatcatcaattgaaagaggcagccaaggtgatgaaagagagtagttgaagaatttcataaggttacaaatcttgtagaccaagtcataaggatacttgtttattctaagtttctagcgaatctagtagggaccaagtcataaggatctataaattaaacattttagatgttgaacaaaataaaaatagacgtgaacataaacggagaaaaaaacgtagacgggaatggataccatctgtgggagtagctagtttacactgctaagcattaaatatttgaaacaaacaatccttaaataacacaataactaatggtcaacaatgtccaaatctttttgactatattaaacagaaactgaattttcagtgttctttgtcattttgtaaattgatggaatcttgataaaccttctaaaaattatgcgtgcatgggtttcaactcaatacgtcaaagtcaaaaccatctcactcgggtttcttggctcaactcaatacgtcaaagttaaatcatttatgttgagatttttgttttcgttttctaacgcgtttgagttctttctatcttgttgactatgatcagtatgatgaaatacatatcaaataatacaacaataacaagatataaaattattggaaataatcgaagtaatcaatttctaagcatagatatcatcttcacaaggagctgatggctcatgtctaatatttccccaaactcctaatctacaaccctcatgaaccctagcaatatccgaattacatcctctgatttgtcccctaaaaatacatccaaatctaaaccctaaacatatactaccctttggttttccggtctcggttatgacctgataatttatattggtatgctcggttatggtcttctcttcattcaggtgccgcaattgctttaccggtatgaaaagtttcccaacgacttggtcggacccgaaaaatctcttacacttgatttgaaacacaaacactgactcattccttcgaaccttgtcatcttctatatagaatttcatacgataattccaccgtaagaatttcttatcccatgcagcagctggagtgacttgcttgtcacgtgaaccacgtgtgaccgagacggaaacatagacagttggtctgaacaaaagattgatggagttgagatcttgagctgatagaacgttaatctccaccggttgataatactccattataatcagtagaagaagaagagatgagtaacttagaaagaggaggtttcgggattataaaagttgtttgattaagggtcctagtataactacgaatcttttatatatatcgttttaaggatttgcatccaaatcaaaaagcttttggtatattattttgttgggtcaaaatcattatttattgttgaaattatgctatagataaatactttttattattattattttttatcaagcagtcttaaaatataataaaggataaatcagtagtttagatgtcaatctgaaatattttgtagagaggctgatcagtttcaaacaccgcccgtaactgaaataatattgataaaaactaaactaaaacaaaaccgaaaaagaactgatatatagtacaatcacgatgaatcgaaactataagaaatttgtattaaaaaaagattttccttaaaaaacttttacgattattagtatgatcatgactaaaaaatcctctacaacatcgaaaattgtctatcttgttggaaaaatatcaattggacaagagaaaatatatttgctagatccgataatatctgatttcaaataaactaaactagattttaacccgcggtataccgcgggatgatttattttttaaaagtaatatatattaaaacttgcaaattttatttttataaaatatttatattttacaatttatgattgttattaagtatttatatatattaattgttattaaaaataataaattaaagatttaacccgtattgaaacagtggattaattatattttactttttattaatgttgattcaaaaattcgtcttgccaaaaagtcatttattttattaatattaattttatttatgatatgactttgaattataatctaaacattttagctaataacttaggagtgtaccatatttatttaataggggccgaatgcacttttaccaaaatccaccaaaaaagtcttgcaaaaatactatagacccaaatgtaccatatttttttttgtgctaatttttatgtgattaagatttaattgatttcgtatataaaatattaaatcgttttacgaacttatttgtttataatttggtaacagatagatatttgaatattcagtatattttgctttagtttaggaaatttttgatgacccgtctttaaatccaataagccctataattaagagatgaatattgtcgttaaataattttgataatcttaatgatgtcattaaaagattttgtttttgattaaatttttctaatggcatgtaattaattacaaaaagtaaggttatgtactttccaaataatatagtaggatattgttatgctctaaaatgttagatctaatatcaaacgcgcagaattaaaacgcatttggtttcagttttcatgcaaatttggttaattgtttttttttttttttttttgcagtttgatattggctttaaaataggaaaccaataaagtttttttttttttggcaaactggaaaccagtaaagttagaaaaacattctggtttaaaatcggtttatatgtcaaatgtggatatttagagaaagagagatgttctattcactttgaattttgatacccttctccagataatactagttaataatacctaaggacagacttttgtttttctttaatgtaatctttcataaggaatgataagggacgtaacccaacaaacccgtgacgttggccacagcatcgttacaccttgttaacagctccatcatctgcagggagatgtccaccttaagctgtgacgggtctagtggtggctcgacgtggtccacttggttatttacaggctttggttctgagtcttgtgaagagagaggaagaatcgaaaccgaaaatggtgactctgtttctttctcacccaacatgaatttcactcgtactgttctgtggttaccattacggttattgcctggttttttcaaacaagacttgagctggatgtttggttggtgaaccggcggtgcttgctctagtagctggttcaatggtttagtgatgggtttgtctgtcttgggcctcttggctttcttcagttcatgatctccggatgcagaagaagctttcatgtcacggagaaagtatgtcacattcacattgccaaagagagatttgcttcctgatacatatcttaaggcagtctgcgcatcgagtttatacaggaagccaacacggcagatcgaggatttccaggaaactctgatggctgattgatccaactgtccaaagcgtccaaacctcgccttaagcagatcaatggaagggagagattcaccaggaggaaacatcatgaccagcattgttggctcaactaccattgcagatggacccgtcttcttttcttgttgaactatagctggtttggcattgatgggaactcgacattggtctcttactggatttaaaggtgcaagacttgatctctttgttgcatcttggtttgttttcttgtcagaagccagtggtttgaactgaatggttttctttagcttcttagttgatgggacatcttgttgactgtcagacgatatgcggtttctcccagcctttgattgttcattagctctgcacaaagtctttgcagattttgacagttttgttgcggaaggagatgtggccaagcttttctggtaaacatgtgatcggaaatgaaaaaagaactgccttataactctaaaagaacttctatctgaggatccaaagagagggtcaagcgagagagctagcaaattactcaacagctgcagaccatcaagtttcactatcaacatattggagcgtctctttgctgaatctacttgtgacgatttcttggcccaagcttctccagaagataacgctttcctcttatctggagtgtcacggttcagctctgacacatactctttcttctttttctttggttctggaggacaattctcagatttcatttcgccagaagaccgtttcacgacattgcctttcttgatcccaactcctgcagaaaatttcccaccactaaaaagcttgagagagcttttgttagatctagaatttgttccagtctcatcttgtttaaggcttttcattggttcaaatttctcctgatctggaaatagagttgctttttctcccattctcacatctgactcttgagctaaacccttgtcatcatcacgagagagctttgaaacagaggatttctttccaggaatattaccacttgaagaggtgaagttcatgctgacaagcccagtctgctcatgtttcctgggagtttggagacatggagtccttctctggagtagacgatcccaagctgaagatccgttgatgccctgaaactgagaagattcttggacctggccaaattgaactgtcatatcaccagcttcttctcttctttttggaagatatttgtcttgtttagtagaatcctttacattcatagcttttgtgtagctctttgggttgcccagagtttctgcactgaccaatgagccactcaaggggactgtaaacacaagcaatgcatgaggaaatatgaaatctattccaaccacccaacacaatgagatttcacaatccagaatttaagatcaaagatatgccatatccttttgaggcattctaagaatacaacttcatagctataaatcctacaataacaaccttaagaaaagcatttttgatgtcgaaggatacccaaaccacaaaactctcgaatgtagcctatatggctcgagaaacagaaaaacaaactcaacgagatcaccaatttatagagtaccgtatctctgtgatacataggagaaagatctaataaaactccataaaattcgattttggaagcagaaatattacaaatgtattcaaaacaatgccaggatcgctgaaaggtgaatctacctcgaaggggtgctctattaagtggttcatgtgtcttcattaaacagtatacagatcttgccctgaaagcttgttcatatgtttcatcaaactcctcaaacactgctctacggaatgcacaaaccgctactttcttctggaaagactttaagctgtctgtatcacactcttgaggtgctaatgcacaccgcttcacaaaagctagagtttgcacagatgaaaaactatccctagctttctgaatctgcttagaagagtaaatagcttggacctcgtaatcaggcacgtctacagcaaagtaaccttgagcattaataggcctaaagttatactgattccgacatttacaagtcaagccaagagctgaccttctacctacttcattcatagcttcttccacagcttttgcaaagtgatccgaactagtttgctgtgatttctccttcacatgaggttcaaaagggataagctcagcaggatcgaaccatccataactattatccccaaagaaagcaaccagaacgtaacccatcttcttcacacgacgaacagagggagacgcaaaagcttcattgaatatttgacctggccaccatggatgtgactttacctttccccaaaccatatctcccacttcaaaaccatagctcaatgccttcgaatttctagaacccattttctccctcgcaacataatcgtcaaattcggataagaaagatttgtagtccggaactcgccttttctccattttcttctcaccagattcgttgcagagctcataaaatcggtgatcagagtctctaatctctcttttcatttcacaaaatctaggttccgtttcactgttagacactcgagaacctaaatcgacatttccatttccatcacttccagtgtctgcagcaaccgaatcaagctccataaggaaagcttcggcctgatcaatcatttcaaatttcccggagccattgccagaaaaagtaacgaaactatcaccaaaaaccctaggattcacattcacctcagccgaattcatttctctctaaccacacttgaaccctcggtgttaaagagctttcataacaatgaaaccctagaaacaactcgaagccagaagatgcgtaactttgtttaaatcctgagattgtttgctggaagagaaaatttaagaaatttcatgagagtaaagctggagaagatgacaaaagcatcacttggtgagaaggacattttggtaacttctcagcgtcataaatggtgatggtgaacggtcgaacttcccatccagtaataggttgccacgtcatgggacaaaaaaacgtgatctttttattttattttattttgctgcctaaaacgtgattttttgtccacttacgaagtgaggtaaatttaatttaatttttaatgcaaacgaagactaaagagtgaagagagtaagagactcgtaaatataagaaaattatgattgctgatcgtaaactgatttagttttcataattttgtcagacactcccaaaacaaatatttcaaaaaagttaacgaatattctggtgaatcacttgtataacagagaacaaagctaaacatcggtagtaatcaaagctcgctaaaaaaatatcttattggaagaagaaacaatgcgagagactcagacaaaaaaaactatatatatttctttactgaaagcaaatatcgtccggaggaaaatggcattaccggaccaaaaatgatcaaggcgaatcatcatctttttcctgagggcttccagcgagccagccccatacgccacccgagccctgtcgtttagcgttcattgcagcttgttctgaggcagccttttgacgttgcaggagttcgagttccttctgtagtgtttccaatgtttgaagcttttgtcttagctctgcaacatcaacctgcagattcggagaaagtgacccaattagatttgctttgtttttgttcttatgacgtgatgaagcttatcaataaatgacagagaagatatgtgatagatccagtggttacaatggatgaatgttctaatcaagattcctattcatcctggaatatgagtatatgtagtcattaaatcacgggtttcacgagattccaaattctgtaggttatggtacaaaagagatgtggctacggtttagtacctccagtttgaaacaccttgattgttcggctgcaagttggccacgaacagattgaagttcctacaaaatgtcagtacaaagttaggtatatcatattcgaggaaaaattccgagatttcagatgttaaatgtgaatgcaattggaagactgctgcaaccagtctttatgaacgattggttcaccaatttattcatgtcggcttctgttttaagaaggtgataatattagtaccttgtacaaatctgtgtttcgtaattctgcttctcctaactcttgccttagttggagagtctgcatcctctctttgttcagtgatgcctccagctcttccttctcagatttaatagtcgcaataatgcgttcgctgtttccttcaacctggggattaatcacccaaaacataataagagtgcgagaaggtgatgatccggactggagtaactatattctgtgtcgacacaatcactaccacagcatatatgcataagatgcttcaattctctcaaacaaatcaaaaggtggtgctatgcaaaatatattaaggagggaaatttgacaagaagatacctttgatccagggttaacattgtccatgacaatttcccgtaccctgccttcttggctcacctcaacctcagactcaatgtctctggttgtggcattattaacagcagaaagactacctggcaaaggcgcttccagagtctttgtttgcaatgttgatttgtggcttggtttaagaagattaatctaatgccagataagaattagaagcagaactaaatgaaaaattaagagaaatgaacttatgggttcagatcacagtccctacttcgttattgtaacgtccattgtatccaccaaaagcgactagtacatcttcaccattgtatgaactcaccactaaacttaatccctgtcagtagcaaaggaaaggacgatggaaatgaaataagcatgacttgacttttttcgaagtcttgaaaaggcttctaccgtgtttatttgtatagctatctgggaattaatatggataaagtctgtttatttaagtacctcgctagcaagaggtacacgtccttgaactgaagcaacgaccgaccatgcaagagttgacatgtttagtacaacactctccgatgcccctgcagtaatttgtcacaaaattagtcaccccacacacacaaaaaaaaaaacccaagcaaatatcttttgttctagggggtgataaacagaacggttgggaagagaaaatttccaagggaaaagtgcattaacataccactcttgttatcaccgccaccaacaataaaccagttctccccaattgtcacgccagcatgtccagctcttggagttggtgcatcaccttgctgtgctggtcttgaccactccatctatatgtgacaattatatcagaggctgacaaagcatgtttgagagcagctgaaagaatagactcttagcttaacttacagtttgcaaatcaaggacatgcaggtcatcgaaacaggttgcatgtgagccgccaccaaagataagaaggaaccgttctgcatgcactgcagcagcatgatcagacctcggagatggagatacacccctgcaatttgacaccaatttaaatcctgaattgctaatctttcaataacgactaagatactaaaggagataggaggtcgatttctaacatattcatattctggttatatatctaatcttaaatgggtttgacttcttcgaaagagaacaaaatgcagaaacatcataaaatcttacacggcatctatctcatcccaggtcatcgtgtctaggtcaagtatatgcaaatcgttcagaagtgatctctttgcatcttgcccgccaaatatcaccaaggttttacccaccattgtaactgactggcctccacgtgaaacctaaaagcaagagataattataagaaagtctaaatttaagtaaccaaaatgcatatttgacttccaaattagcaaggagaaattctggatttagatgcaccttaaccctgaagatattatgggagggtaaggaaagaaaacaacttttatttttttgtcttttgacggccaaatttttttttgtataaaactgtaatattttcatacaaaggtgacaggaaagcaaatgagacaacatgagagaagtgaagatataccggtggttttccatatgtctttaacattgaccatgtaatggtatggggatcaaagaccttcactgtgacaggaaacagtagaaagtgatatgtaatcattgagattccagaaaaatcttataaatatgtgcaaattatcgtcttcaaaggtatataaacgctaaccttgcatagattctgagggatcctttgtgtgaccaccgatagacagcagcttgttgtcccatgctatctacaaaacaagcaaagaaggtaagtgaataatgtatagctagagtcttctttattacaaactaatatagcaagtgactttcatgaagagaatactttgctttagctgaaacccctctcctgaatatttctgggcaggaaagcaaaacgataataacaaaaacaaaacgaaaaagttaataaacttaccaaagaatgaccagcacaaggagctaacaatgtcggagttgatgtttcctgagattctgttgcaaccttggtttcaactcttgaccaagtccaactttttaaatctagaacctgtatacattccacagaagctttgcttaggaactgtcaccgggactggtattgtcaagctaggagctgaatatctcaattacattaggagcttatgcttataaaccatagaggttgcttacatgaagatcaccaaggtaacggccattgtgatttccaccatatatatacatcttatcttgaataactgctgcgccatgctgaaaaaaatataataaacaagacttagaaaaatacagaagatacatgaatgacataaccttttacttattcttcaaaagagagagaaaaaataaattacctcgtaacgagcttttggacgctgacctgatgtttggggtgcagtccactggttatatacagaaacagtatttgagtcttctgagactacatctttatcttgggtttcagccaaacgtccattctccgtagaaattgtttttgtctcactaaatgtgctcccattctcaacaacaggctcatcttttgctctctgctacaaagatgaatgcactaaaaaactcaaataattttcttcaatcaagcaaaagatatgtgtaatagttcccatggtttggacatcgaatcccatgggataccaaaacttacattaatttggacatctacaacaggatctggaatatcattagatgccctcgaataccaaccaggatcatcttcctgataaaaattgagcaatagagaagaaagcaaggttatgctccagttaagtctttaaaaaaaaaaaaaaaatagacctctttgtcggttacctccagaattttcacaaagagacgcattgcctcaatggagggcatggttccgagcccctgccaactaagtaaatatgaaatgcttcagaacagtagcatgtgtatctttcaggaaaggaacgaggacaactttaaagtcttattttcctttaaaaaggatcgtaagcattaacaacctcagtaatgtagaccaaaaggtccaaaacataggtaagcacttagtttttttccccagggatgcacattcaaatcctgcatttctattttcctctagtagcttacactaaagtactcctttcccgtttccctaatgcatttggattcttacgctctagtaattgatgaaatctaagacatctcctattaatatctaccatgaagcatattcctacaagtatgattcacaaacgcaagaatagaaataaaagaaccagtgataaatgcataaatgttaatcgtagataagtatgggcaaaacacagcacccaatctaaccttttccatttgctttgctccactggtctccaggcactaggtttcggagtgttgcatggtcctacagtagcctgtttcaatgttaaatccaagagatcatcagcactgagcctatctatcccagggataaaaactagtagactcgacattataattagtacaagagaacgtttctctctatgttaaggaacagccagtttcaccccctcgtaagaaattcatctacgactatactaatcaagttatagaatcaatgtagatccaagtaaactacgactgacggaccaacgctccctgagatctaataaaataaaactgtttcaatcatgtttccaatcaaatcgtgatgagatctcgggtaacattttactgagcatttcgaatatactaaccaggatcgaaaataacgatcaagcacagctaatcagacaagtaaagtgcgtcatttctaaaatccgataagaattcggcgagaggaatatgaatcggtgactaaaacaaagaaatcaacacccaaacgaccagatctcgtgaaattcaaaagcaaaatccacaatcgtgagatcaacaatggaagagatcagaaatggaagttgctgacctgctggtatagcgcatagagaagtagtgcagtatcatcggggaatttcgagatgacgtttttcgccgacgaatcagatccgtcgagaccgacataagatgcagcagcgtagaacctctccgggtaagcgggaccagaggttgccctaggcatagccatttgtctctctctctgactacgaccgcggatttgatcggagatggagaagccaatgagcagagataggcgttttctagtttcgtttgttcaaagatacaaacttatgattactttaaattattttcattaatatagaaacatattctcaaaatttaatatttaattgatcaaaaattatagtaattgcttggtgcagtgtttatatagcgagcggcacgatcaagaagacatgattatgctcgaaacttttctctttttattgtcacttcgtatttttgaccttaatcatcgtaatcaactcaatagtgtgaattaattaagaaaaacaaagagaccctatcaatatgaagaaaaaataagctttgctttgtagtatcttgtttctttttgggtttttacaatttgttttccgatcctttacattcaagaaattatattgaacgatttcgcagtagtgtaaatttccgatttcacctctgaccaagctgactctggcgcttgagcgttcagtgtataaagccggccactgtgagcgcaacaaacggctacattatgccgccggaaaagaggtgattcgactttaaactccaactcgtagtacttcaagtttctctctgaatcttgtctgatacttgattctagcaaagttcctttcaaatctgctcgttgaccagatcctgtcactgttcttactattgcctctcctacttcttttggccctccaaacgcttcgattctatatcgtaaacaataaacactttcataaaacagattccgcttcttgaaataaaatgacaattgctcgtcaagaaaacattgatgcttattggcaaaagaaaaaaaaaaacattgatgctcatcgatctaggtcactttatgatcttaacaatcatagcgaatcgggtgtctgcactaacttctgtgatagattcaaagtagtaaagagaatcatgtacttacattgagatatattgtttcacttcaaacatgtactaaatgtaataaacaatcttgaaaattacaactttgaaactagttgttagaccactaaaataatcgatctagtcttacaattttttctcatgatcaattagatttgtttgcaagatctagtaaaccatatcacttagtcgttaccagttaccacagaacaatcaaatgtttctactataagaatgatgttttttttttttaatgacacgtcagctctagggcgattttcttggcgactagggttttcattctttttcagcaagctagggtttcagcggcggcttgccgtcggtttctcatgtccgaccaggttttaccagtctcttctgaggcaggaacagttggttctccatctggatctgtccagcaaaagtcctatgcagcagtagttactaaacggccttctctgaaaaaagatgaatatgaagtctctgtgcaagacggtgtcccaaccattgcagttccgaaagaagttatcactgaatctgtccctctctgggatgattttctggtgggacggttcccatcacaagctccgcatgtcgctaagatccatgtcatagtcaataagatctggactcttggggacaaagcaattaagattgacgtctatgagatagactctacttcagtaaagtttcgaatccgtgactccgccacgcgttcgagaatagtcagaagagggatgtggaacattgctggtttaccaatgattgttgccaagtggtctccgattaaagaagaagcccagccagagattaaaacaatgccgttgtgggtcacagtgaagaatgttcctcattccatgttctcctgggatggtttgagttttattacaagttcagtaggaaatccaatacggttacatcctgaaacagaattatgcacaaagtttgatgaagctaaagtttttgttgaagtaaatctttcgcaagacgttccaaagtgtcacaggttcaaaattgaggaggaaaaagatgttatcgtggagtttatttacccctggttgcctcccaaatgcacttgttgtagtaagtggggtcacctagtggatgtttgtgtgagtaagctcaagcctccagcgctggtgatagaaagtgagctagaagaaggtgaagttttagcggatccttctgcttctgctaccacagtgagagttgctgaccatgagtcagctaatagtgggaataaagaggatgggattcagaactcgattttgatttctcaggaggtttttgaacaacaagtggtagcagagaaggtggtaccaccagaatctcagtcggaaggagatggttggtccatagtctccccaggtaaaggaagcaaaagtacagaaaagtcaaatgggaaaccattaacttttggccaagcaacaattttatcctcttctcggtactctgtcctgagtgatcaggaggagaatggggataaagatgagttccccacaatctcctcagaggaagtcattgagacggagcgaacgaactctattgatgacgttgtctctactcaagcgatcgaaaagaattccacttcggataaagagaaagcaggagcggtgagagtaaatcttcctcgctcctccaagagttcacacaaagtcctttcggagtcttttactcaaaaagctagagacaatgtctccagcaattcgagcagaagaaactccaaaaaacatcattaaatgtcggggttcttctggaatgtgcgcggttttaacaaatcaaataaacattccgttgttcgtgattgggtgagaaaggagtctttaacttttgggggtttattagaaacgagggtggatgaaactagtgctagcaagatcatttctaaggtatttcctgggtggtcttctatgactaactatgaacaccatcgtttgggacgaatttgggttatttggaagagttcggttcgtgtcactccggtttataaaagtggacaaatgattacttgctctgttttgactgaagagaatgcagaggaatttttggtttcttttatctatgcttcaaactatgtggatgagaggcgggaactttgggaagacttgagaaatcattacaatatgccaatgttccgtaccaaaagttggatgattcttggtgattttaatgaaattctggagggggaggagcattcaaattttgttacttcaccttttattccgcagggtatgcgagatttccaagaagtcgttagagactgctctctagctgatatgagctatcatggtccggtgtttacttggtcaaacaagagagaagaggggataataaataaaaagttggacagagttcttgttaatgaagaatggaatcgtaaatttcctgcggcttatggcacttttgaagcaggagggtgctcggatcatttgcggtgtagagtaacgttggcctctgcaactccgataccaaaaggtcctttcaagtttaataatgtcctcaccacaatgcctgagtttttgcaaactgtccaagacttttgggctggtactcccgtgctttatcattcaacctctgctatgtttcgattttcgaaaaagctaaagagtctaaagcctattctcaagtctctaggtcgaaataagcttcataatctgtctgttcgtgtggatcaagcctatacatccttatgtgagaagcagaaactcgctttggaaacagcttcttctgaagcaattgcagaagaaaatcaagcttacactcaatggaattctctagcagtcttggaagaaggttatttgcagcaaaaatctaagttgcattggttggatgtaggagacctaaataataagtattttcacaatagtgttaaggccaggatcgccatgaattcaatccgagaaattttatgttctgatggcattgtgcgtacgagccaagaggatataaaagaggaagccgtgcagttttttaaaaggttcttacaagctaagccagaggattttgagggctctagtgtcagcgaaatccagagtctcttatcttatcgtagttcaattttggatcacgaaagattattgagagatgtcactgaagaggaaataagaaaggttctattctctatgccgcagcataaatctccaggtcccgatggttatacagtggaattcttcatacatgcttggccggttttgggtaaagactttgtaatcgctatacaatctttctttctgaagggtttcctgccaaaaggtgtaaacaccacgattctagctttaattcctaagaagcaggaggttagtggtatgaaagattatcgcccaatttcttgctgcaatgtgttgtacaaggtcgtctcgaagcttatggctaatcggctcaaagaaatcctccctgcctctattgcgccaaatcaatctgcttttattaaagaccgattgatgatggaaaatctgttgctagcttcagaactagtgaaggattaccataaggattcaatatctagccggagtgctcttaagattgatatctcgaaagcttttgactctgtacaatggccttttctgataaatattctaaaagctatgtgcttaccagatatttttatccattggattgaactctgcataagtactgcttctttttcggttcaggtgaatggagagctctcgggttttttccgcagtgaacggggtcttcgccagggctgttctttatctccatacctctttgtcatctgtatgaacgttctctcttgtatgcttgacaaggcagctgagggaaaacggattggttatcatcctcggtgtcgtaatatgagtctcacacacttgtgttttgccgatgatataatggtgttctcagatggaactactaaatccatcaagggcactcttgaagtttttgataggttcgcggctatgtcagggttaaagataagcttggagaaatcaacagccttcatggcaggaatctctccacgagctaaggaagctattcttcaacagtttccttttgcgttaggtacattaccggttaaatatcttggcctgcctctacttactaagcgaatgtcgcagatggattatcttcctcttgttgagaagatacgaactcgcattacatcctggaccactcggttcttgtcttttgcgggtagattacaactgatcaagtctgttctttctagcatcattaacttttggttctctgtttttcgattgccgaaggcttgtcttgttgagatagagaagttgttttcagcttttttgtggtctggtcctgaactcaatgctaagagagctaaagtagcttggtcggaagtgtgtaagccaaaaaaagaaggagggctgggtttaaagactttaaaagaaacgaatgaggttagtcttttgaagcttatatggagaatactgtcggctcgggattctttgtgggttcaatggctctctaaaaacttgatacgtaaggaatcgttttggtctgttaagggaaattcttgtatgggatcttggatttggaaaaaaatacttcagcagagagacaaagctagtcaactccatcgaatggaagtacgttctggaacttccacatccttttggtatgatcattggtgtccgcttggcagacttcatcaactgttagggccacggggaataatagatctgggtattgcgagtcatgctacagttgctgaggtcatgaatactcatcggagaaagagacatagagtggatcttttaaatcagattgagaattacatagcgttggctatacaagacagaggcacggagagtgatcgctcactttggaaacaaaaggaggacagctttaagtgctctttctcttcttcaactacttggcagcgaataagaaccataaacccaagctgcgattggtatcggggagtctggttctcttctgctactccgaaattctcgttcatcacttggcttgtttttcagaacagacttgcgacgggtgataaactccgcaaatggaattctgaagcttggcatagttgtgtgttctgtgatgaggaattggagacacgagatcacctttttttttcgtgtcccttttcctctcaaatctggtgctctttgacaaaaggtcttcttcatggtcgacgcatctcgagttggagccttatcactccacatctgctggatacatcccgtccgtatctacatctcttcactcttcgttatactttccaagcaacgatccacagtttatggcgagagcgtaatagtaggcgacatggggggcttgctatcccggtaacgcaacttgcaaagatcatcgacaagaatattcgaaacagattcagcacggctataaagtctgggaatacacgactccaaggcgggctgcagttttggtttcaaatccatagctagaaatcattctaattgttcttaactcttttagattcttttaaatcatgtcgcattcattgtaacaatcgtttttttgggtgaatatatttttacattctttcaaaaaaaaaaaaaaaaaaaaagaatgatgtttttacttacgagaaactgggtgagacaggggaaacgataacactgacattaagctcaccggtcgaaccgggcggtccaaatgcaacaaccggttcattaacgtttttccggcgactgtttcttgccggaggaaggtctagcgaattctcccgttctgacttctccgccgctctatacaaaagcgtctggtctccaacccacgtagccggatatataaattctgtgattacaaaattgacaatcatttgatttatcttccaattggtaatatcttaaaccggagaaattcgatgacttactaaccgaatccttcaaccgtatcgatacatctgctatatcctccaatcggataaatgacgtcgagttttagattccggcctatccctggcgataaaccgagtataaaactcgtggttcctccgaaattcgcaccaatcgcaagaacagaggacgatcctacacccagaagaagccgtcggttgaatttctcaaccagtggagaaaactcctcggccggggtagttttcaggtcaccggagggttgttgagcgattaagaagttggaaagttttacattagtgggagatgagtatagtagagagaaataaggtttcagagacatttctcgtctctgttcgttaagtgaggtcgctgagtgttgccgtcgactctcttatcacctcgagagggagattatacgacaacgttttaatacaattaccaacggtggcgtttagaacaacagccgaacggcagcgtttaaagagaatcgctctcccaaaaatatgaattgcttttcagtacttcactatcctttaatttacttagagacccttaatcattaatacttttcagtacttcactaaacttaacatgtatacacttcaacccaattttttttatatttagataagttatatattatgtatcaatatgtttgtgaattcttatcgagaataatctattggaggaggaattgtgctcttattaattggtgaaatgaacttgagttaagaaaaagaaaaaagcattgaatttttaaagaaggattttctaaaaacaggttcaaaatggtgatataagtagtttgttctgttttaacatataccacactatatgctttaaggatcatgtgtattataatgatgaatgtaagaactccaaaataaaataaataaaaagatggtcgatagtagtttatactttatagaagtggtaagggctgcatatcatcattcgaattttaatcagcactgttaccgaagaaaaacaatagtatatatatatatatatgtatacaaataaactaatcttcaatgagttcaactaaacaatggaaactttagttaattatattgaattaatcaaataatttatggatacgatcgaagccgaattatatgtagcaaatgatgtagtatatcaacctttatgatgtatatatgaatgcttccgatgaaccctaaacattgacaaacgacagttggatttcttctaacgttaatcttcgagtctccggcaccaagcaccatgtgaatacaattgttgctccacagattatagcggatattataaaagtccctgcaagttatttttatttatatagacaggattagccattgcttttttcttatagcacacgattaagcatgttagtctagtattatatatatacaaaaagaaaaaagaacatgttagtctagttaattcaaatttaacatatgaaagaaaaattaacatccttaaaagaaaaagttataaaagaaaaactagagacgtatacggtatacttgcatgcatgaaagaattaaacaaaagacttgcatgcatgcctacatgcctaggcagcgatttaggatttagcaaatcatttatgcatttgtatatatatttgcttcggtttattcaagtaaaactaatagaatattttgatttgtaatcgaatgtgtatatgctttatgttactcaccgcttgggctccaaaccaacataaaattgaaagcatagttggcgatccaaccagtgaaccaatttgctatggtcactaaactcccagctaatacctttatatccattggaaatatctgccaagaaagtaattaacataaataataataattaacaaatgatcatcggtatgactataatccaaaaacatctgtaaaatagtatgtttgctcatatgtgtatacctcagacattataatccatggtaacgctcccattccaattgcgaacatcatcgtaaacgactgtttgaatgataaattgttatagctagtcaaaattttgaaaatttaacaataatcaatatatatatatatatatatatatatattgtgagttttgactttcatattatttttgatcaagtatgattgcctaaaaaaaatggctgtctaatttggtttagtgtacttgagatattaaagaaaaacagaataacacatttgaagtttgtgtaaatatatagtttgatagagtttttagattataaattagagtgaaattcaaatagtgaaaaacttaccaatattccaatgaaacagaaaattggagtaatttttccaattcccgggacatctttaactccaaacgctactgccaatgtgatacagcttaaacacaaccccaacgctgaagtctgcaaattcgatgtatgaaaataaaaatttatcttatttatggactattttacttgcacagtaaaaaaaaagatagactgaacctaaaagatttaaatttttctaaccataagaagtgggcgtcttccccatcgatccacgaggattagacccattaaagattttggtacctatgcatatgatcattaataagaaattggggtcaggatgtgagaatacaattaatgaagcaatcatatataatattttttttttcttttgtcaaagtgcatttaaaacagaaaaatatctatctaataaatttttacgtacgacgataagagataacaccatcatcccaatccgagcaggaaaccctagaaaatcaaaggattagtttgaaaagcaaaaaacaaattcctaactaaattataaacaattcaattaggaaataaatctgattaccggcaagtttaaatagagtgcttccgtaagaacttattcctgcagttccacataactgttgcagaagcatcaaaccaatgccgatctaaacaaaaatcaaccgaatccaaacaaaacaaataatttgttattcagttcttatataaaaatcaagatcactagaatatatttaatgaatgaataaaactcttcttttcttactgtaagttgatgagcatatctcttttcgaaaagactacgaatgttgatattcgaatttttcttcgaagcttcaactgaaatctacaaatttaaaacaagtataagtgagaatttttgcttaggagtagattgtttttcttttttcttttggtgaatgaatgatctacaagactacaagtgattttaaatatatttatgtcaaacatctgtattttgtgggactgatttgtacgtatgagtaccttgatttcgcaagcttcaggcacaatatcgtattttcttcctcttaacttttgaagaacttcttcacattctttatcacgaccttttttcgcctgtaaatattatgttcatatattattatatatttacttacaaattacaacaatcatgttcatggatataagtttttcacgattgatttatatgactaaccagccatcttggagactcaggtatgaagaacaaaccaataacttgtatccaacatggaatactacctggttaattagatatctatattttagtttagggcaaataaaataataatcaggagaaatgaatctttaaaatcgggatagttgatgggaatgaatcacctattatggctaaagttctccatgacaagaaatttccaaagtaatatacgactgcaactccacagttttgcaaaagctgtgaagtattgatgttagaataaataagtcaaatttatgtataaaatgataatatacgtctaaacttcgattttaaataggtaagtcacctgattgctaaatgtaaaagcccctcttacgtgcttgggtgttatttctgcaatatatacaggaacctatacagaaaatatttatggttacgacgatatatatatatattttttttgtcatcttttcaggaaatagctttaccacgtagctaatgagaccaactccaattcccaccaaaaatcgccccatgtcaagccaaataatatcctgtgtgccaaaaaagaaatttaaaataagaattatatactacaaaaaaacatagactatattactaaaatggtgataaaatatacaattttgttaaacttgcaaaaataaagaagaatataagttatggagggaaccttggctagtgaaattgcaagccaaccagttatgcagaataaatcagccacccacaacgtctaagaaatattgtaagacaaaaaaaaatgagggtgtagaaatttacgatataaatttttgggcttacgacaaaataaaagaaagataggggtgattttgagaataattgatacttaccattttatgaccgaaggcacttgcagctttggcgctgaatattgcaccgatcattcctccaaacgtcgacaacgaaccaaacagcgaaaactgtaaacatagttctcaagaaattaaaattaactagtcatcactgtaacaatatgagctcgtacagtagtcaactttttctattttgttacccctaaataatttttcatttgatataaaaaaaaagcgatgtaactagtagtttcaacaaaatacgtatacgtttgcgtgtatccatccacttgtaaaattggaagaattgactgaaaaattatattaatgttgtttcccataaaaattgtgatgaaagttggacttacttgtgcgagagaaagatccaagtctgacataatggaggacattgtatctgcagtataacctatctgtgaaccataagatgatagaaataattaagttgttcttttttaactctatatacataatgaagttataaactcttactttaatacaattacttgaatttttttttaacctttactgtggttagaaacttgaaatttaaaagagatgtcgagataagatatggctataggtagcacgtactatcaatccaacattttcgaggtccacaagattgaagatatgaagagataatatatagtatagaaactatattattacctttttcatcttttgtcaatatatataaacttagcttttaattcgaaattaagtattacaaatctgaggccaaaaatcatcatggttttgattatctgcgttaaaataatttctaaacaacaatcttgttgaaagacaataaagtttagtatataacattaatgctaaagaaaagaagttggtggtttgaatctgttccttagctcattatacctctggcctagatctggaatttggttctaattaataggaacatctatatgagagtgcatatatagagaagaaatagagagctagagagagagagagagatgggtacatacggcagcgccaaaggtgaaggaggcagagacaatgatgaaggtggagaagataagaagtggagttgtatttgcactgtcttccttttttgccaataacaatcctttctccatattattctctccttccattttcttcaatcaaaccctaattaagaacaagaaacaaagagataaaatatttgcgtgaagtagaatgttttttctttctcttccctatgatatatagactagctagctagtataatagctaggattggttaaccacaaagatggaaataaatatcatgctatgttgtgatgtaaatgcatctggtttttattgagtctaggttcatgttcattgtttgtatcaaccagcgtacggtttattacattttggtttaaggatccggtttgctttggttatatgctgtttaagtcattcatctgaataagattccctcaacaataaggccgttagcctaaaatcgtcggttgccatttttcttgttcgaacttatttatggactataagacagaaacatcaacttgtgaaaaccgttgaagtgcaatataaaaaaaggttcaatcattttttcgtaaagaagaaaaaaataaaaggagagaagaacggacacgtcattttagttcgagacaatcacgaaaccatagtacacatgtgggtgtggctcttgttattcactgtcttgaattaaatttagtgctggtttatgatgtcgaaagcttgaatatactagattgattaatcaattgtagctatatcgttttaaaaattctgtcatagttataatttgacggtacttaaaaaacaaaatttatcgcacaaaacaacgttgggtgttgaaactcgattcattgaaccaagacgccccaaaaaaatcaaaggtctaatcaataggtgggaagaaaagacgtattttgaacttccacctaatcatcgcatcacactcatcatcatgattgtttttgtttttcatcgtcaagatttaagtacaagactttggttcggtttgaccaagaaaatagattccggcgcaatggttagcaaccaggtcgagaagaccaaacttcttcgggaaatataccggttataaccggcccaaccgttaaccgacgtatgcgtctgcgtctgcctctgcctcgaatctcttcttcaatttggaaggtgcatgatattgttagtttgttttccactatagcaaagcaaagttcttaacaactttacgagatttgtgctcttatatttaacaatttttttaaaaaaaatttaagtatgcatgttggtatattatatacttatcagctatggttgacttttgaattatattcaaagacacagaagaacaccgaaaagtaaggaattaggcacgttggtgaaagagagtttgtggattttgtcctaaaacttagtcacaataagtcagctttaggcttcagctttaagtatctccagctccgtaattcttcaagcagacacaaaacacacactttttctccgcagctctcggatctctatttcaaatagcgttttaactttgaggttgaaaaaacaaactcatgaatctcttctacttttcctcgagacaccagagacgaaaggtttccatcaaaacatcaaggagcatctcttcttaattcttatctggtaataatgtttttttctttcacttatcacttattcaagatttggctttaggagcgttattctctgtttagttaatttgagctaagattcatattttcctctgttttttttccatattctctgaagcatgacaaaagattcacactttcctctgttttcttatgtcaaaattagaaccaataactgaaagatttggtcaagaagaggaaatgggaagaacatgtttgccgagatggcgattaggaagactaatggcaggattacaagtcatcttaggattactggtgatcactgtgagcctctcatgtctctaccgattccattccgtgggttacttcttgcaaaacgaagacacttgcaacaatatctacacaatcaaagaagtcagcagcgaaggattcgacctaaaggcgctgcacgatcgtgttgatgaagtactagaaaagatggacaacttgtacgagaagctagagaagacggtaaaagatatggagaagagcaaagacggaagcaaaaaggagatgaagaagtttcttgaagatgaagtgatgaagccattttattatgctcatatcggattaaggcaaatccggttgccaaaacccgaaggaatcagaaactcaacggaaaaggaagagcctttgatcaataagtttctcattgaagagataaggcagtacattacaccaaaggagaatcgtgttgggaagataaacatgtttggaacagagagagtttacaacactattggtcatgcttgtgcgttgatgaagatggagctagagaagtatatggattatgacgttggagcgtattgcgatgatgattggaacttagcacagaagctgatgcttaacgggtgtgatccgttacctagaagacgatgcttgacaagagcatcaatgacttaccaaaaaccttatccgatcaatgagtcactgtggaagcttcctgatgatagaaatgtaagatggggaaattatcaatgcaggaacttcgcgtgcttatcaagcaagaacccgaaaaggggttacacgaaatgcagcggatgttttgaaatggagaaagagaaagataaatgggtcaagaacagtagtttgttagttgattttatgattgaagatgttctgagagtgaagccaagtgagatcaggattggattggattatggtgttgggacaggaacatttgcagcaagaatgagagagaagaatgtgactattgtcacaacagctttgaatttgggagctcctttcaatgagatgattgctttgagaggtttgatcccattgtacatatctttgaaccagaggctaccgttcttcgataatacaatggatatgattcacactaccgggttaatggatggttggatcgatcttcttctgatggatttcgtgttatatgattgggaccgagtgctgagaccgggagggttactgtggattgatagattcttctgtaaaaagaaggatcttgatgattacatgtacatgttcctgcagtttaggtacaagaaacacaagtgggctatttcacctaaatccaaggatgaggtttatctctctgcattgcttgagaaacctcctcgtgcaatttaaggattacaatatgaagtttaagcttcaatgtttgtaattgacattcttactcatttggttgtctaatccttgttctagtttgaatacaacagaggttttcagctctgtttcacttgataacttaatcgagactatttgtatcaattcgaaacattgaaagtggccaaaaaggcattttagcgattgctgaacgacattgatgagaattttaatataagcataaacatcattttacgttgcagaaccaatggttcactaccaaaagcccctgaataagccaaaagcttgttcagcaactacaatacctctggtcaagctatcttgaattcgtgaacttataacaccattttctcaggtgaagatgtcatcatctactctagtaaaaaggagactagacttacctaacgaagattcaaaacaaaaccaacccaaatgagttagcttttcaagttggtacaagggacatgatttgagtcttgatccgtcccatgcacgtttggatttctctgtagatcggtaggttctgtgggcatcgtggctgcaagcttgtgactgctgcgtctataagctgtgcgacatcagctggagggtactgtctctccgtgcacatctgcaagtcacgagaagtaaagttcaatgtattactatgaagctgcagtctgtttaagatttaggataaatgatgaatccaagtcctaggttaagtggcatttggcacacacggatagctactttcaatgtcccgaaaagtttagaaactactaaagcctaggtttagtaccaaaccaactctaaacttagtataatagattcataacggcctccagattatcacgttgggtatgcaatccttctaagcaatttcctaattacctgaatcatgagccaagtggcaacacaggaggtgataagctctgaaggcatttgagcgtttttctctgaaccatcttgtgagtttaaatcgttgttagccacaggctctgatccatttgaaggagatgggttgtgatgatgctctatactgccatttacatgctcgtgatgtttgaccatagagctgcgtaatagctgatttttgccaaccaactctaaggcttcttggatcattgtgttcacatcttccccttccttcacagatgatgcagcctagaaaccgtagagtgaccataacttagcaaaacatatgtatgttcgagaatctagaaaagtggatgaatcgatacctttatagctgcatccaccattgcttgcgctcttgtttttgaacccttgacaatttctagcatctctggctccatttccttgtcacacagcacaagaataagtgtattcaagattaatcagaaggaatgaattacgtgggcactcaaaggtccatttattatgatcctattcgatttccaaaacatttgaacaaatgtaccgatatgaaaaatagaatatcagtaatccattaccttttcatctaaagcatgctgtagcgcttgtgcccgttgaatctcagcttcttttgctttgttataagttgtgatatatgaatgattagtctgccgtggactactagtgttgcttgatactttaccatgcagaatgggagcaatcatatcaccctgtagagaatttatgaattaggcataaaatttacatgaacatgcacaggaggatctaggaaggtttacaggctttgacagaagtagtcaaacttccatctttccctacctgattcagaggaggattcatggaaaagctgacattttcaagtccgcaaggagggaatagcacagacacaccaaggtttgtattcccgcttagctgtgcttctttcttcatagacaagcacttatcaatttgcctccttagaccctctggcatgtattccagtggatttaaaggcatgcaatcaatgtcctgtcacaaaaggagatgatcaaacaactgagaccttattttaccaataaatcattgtgtatatggaactggtattgtatttgaactaccataaccaactcaacgcccaagtcatcgaagagaacattgcatttgttatgatcaacagtgagaatttttccatcatgaatctcccgtgttttgggatggatggcaatgactctgttcccaactgctaatggccgagccaaatctgtaggaagcccctccctagcacccgttcgaagctctgtataatgctttcgcacagattcgcggtactgtttaagtttctcccgctcttcatgtaaaaatctctcagagaatcttcgtggtctaccaagagaactgcaaaaaaacgaaagaaaccttttataatctacctatattctctggaagtatccaataacataacttgaacaaaccttttaatgacgctccattcaagacgagtaagtcttggaatgtgaccaagccccacgtgatttaggtaatcgacaaactccatctttgaaaaccagggatggtcgatagcactataaaaccattcaaatatgcaccttcgacgtgcaaagggaaacgacagagaagtagcaagcttatcctgaaattggaataaacaaatatatagatgtacaagatactgatgtgcgtaggagaagtgaagttagaggctccacctttaacaacaactcttgttctgaaagagatctggaactacgtgcagctttatgagtggtttcagaagatttagccttttcttgtaagcttttctgcagactcttctttcgcctgtttggaggtttctgcgataaactggttggacccgagtcagaaacttgtttaggtgacgctactatatccatcccaggtcttttcttatcacttgttatagcagattcctccaacgccttaacagttttcatctgttttgactgagccggaacttgaccagcgcgttttgttttaaccaaagacttcatattattctcatcttgaggcaattcctgcaacataaaaaaccaaatcatatgaggtaatgttttcttcagaatcacaaatttgaatactcaatatgcatttttaataaagatctcgaacttgtttcaaaggatagaaaacagagatcacggagttcaactaaggtcaaaaaatttatgtacaaggaagcaatataggacttgcaacgggtttcaactaattcaacatacacacagactaccttcttgtttatggatttgttctgactaaactctgctggagcttcatcccctagtacctgaaaatagagcacaattaacatttacagctaaaagatgcctagaagaaagagcacagattaagagaactatcttgctaacctttggtttacgttttcttaaactgccactagtttgtggttgtagcttccctgtgggaacatcatcacaatcagtggataccagccttgaaggttttgactttctcttgttagcattctcaacagaagaaattgcatgaaggagactatcatctggctctacatttgctttttccccatgactgcttgtggaagtagcttctggtgtgctagatttctcgtccatgtcgtattctgttctttcttccttcaactgagcagataattctggacccaatgcaatttagttaaatttaacaaatacagacaggtaaaggccctaatgcgaacagtgaacactgcagaattaacccaatctatataatgagaatatctagaaaaaaaaaacataagtttcaggtatattgaagttacaagcaaaaccacacaaaactcacctgactccatcaaatttgctggaagcattgaagctgacaattcggccaatgcttgcagggcatcaaaagctacacaggaaaagactggcaataagtttcagatccgcataagttttcagcagaatatgaagatagttagtttgaatggacaatgcagaaaagataaataatcaaatataacaacagtagagcttgcaaacgaaaatatgttaaatatctctaactttccttacagaaaggggtaacattgaaattaaaatcaggcttcaaattacattagtttttacctccggaagtatgtttgtcatctcttttctttgggctgcgcggtgagtatttctctcttgaggcttcaatagcagcctttcgtctttgtgatttacttctgagcccttgtgtggcactgcatgcttctccattgtcatcagaatcattacattctgcttcttcgactttcactcttttcttgtagactcttttccccttccgcggagcctccatttcgccagccctttccatatccatcaacaaggtagtatctttatcagagtcaagtttcctttctcggctactttccatccactcctcgaaaatggagctgccacagtgcttagactgagattttctggttcgcgactagtcagaagcacaaagttaaatagtgtttttcagtgaagcaaactcacacagaaaagaaatcaaaaagataaccgcttaaaattttgtcaagctgagagataccattttcccccagctctttatcggtgagctatcgctaagttctgttcttctatttggtgattcagaaacttttggagaccctccccttctcgatgcatctgttaatgctaacgctaaaaaatgtgctacatcatcattggcatcgaattgcttcctggctcttttatttggtggagtagagccttctctatcatccctcataaatgaagtttgtacaggaacccgtggtgtacgttttccagtggcatgtcgctgagttcctacatgaactaagaaataaagttacacgatcttgaacgaattggtttacaggtactagacagatggatatctattcctggactatacaaagtcaataacaaatgcagaacaagtaatcaacttcctaacctgcttaaatcatagagtaatcatttgatttagcttcttcagacgaaaataaaaattagaaaactgagttaacacaatgtagcactttaccattagctcgtgcttgcttcaaaaacgtgaggcatccatctggtgaaccaattgactgttgtatatccacttcctctggagaatcgctacgttgaggtttagcacgtttgcgcttttgttgtttccttggtacttctgaagcatcatggccttctccttcactgccactcccttcctagaagaaatatcatatgaatgagttacaaatcggtccacataactttatcaaacatacaaactggcccaacagataggccagatagggtacacaaaactcaaagttttcaatgtcattggtgttactgtctactcacgttaacaatgaaaggtttttcaccaaccacccacattttcaaccaagaaatttcattttctcatctactggcaggtcacttcacataatatcctttgtgtggcagccttaataaaatagatttctcaccatgacactgtaatgatctgtcatcatcgcaataaggccagctacagaggcagttccctcggggagagataaatacgcctggaagaagaagcatatcttgtgaatgcaaagttatgtaggttttacaacatttaaactaaagcttggaaaagaaacttgccacatcgatactaactaaaactgaaacatagcatgtccttactcatacccgattcatattaaatagagcttccaccatgtcaacagacctgctattccgaattgcagcagccacctatacaaaaaacagtctttaagaactctgattgccactgaaactcacataaacatatgtgagtgaaacagttatttacccttctccactcttgtccgtgcttgcggtaagcatcatagaaacgctcaagttctaatctggtccactgaggtcccagcttgtcagacaatttcttcttctatgataggaaaaataaagcacagaataaatacatcagagtaacatctcattcaacattcaagaaatgaagaccaatttactcacacgtagcttattttttttcgatttcccagcatcttttcttggggaagtttcattggtgaaacgcttgttcacactcctcgacttcctaactggtgccatttgcacgtttctctgcacaagtatattcaaatatatagttagaaaccaaaaaatgcaattgtgacaaaagacacactttaaactgatacggacaagatacgacactaagtcgataagcaaatttggcttcctctaagacatgtacaaactacgaatttcaacatttcaccaggggaaaaatcaagacgtttttagggtttagggtttagggattagagctaagaaaaatcaaaactctacgttttttaacaaaagagtagaaccaattcttggatcagtaaaaagcagtgttggggaagataaatagctgcagtaatcgagatgagaggaaatattaacgaaaatcagaatttgggtattttaaaaaacacaccaaattaaggaatcaattacacacagtgaagaaacacgaaaatcatccacaaaagtcaggagctttgacaaaatttgagaaaatgtgttgagaaaattgtttaaatttcagatagtaaaacaaaatcgaattcgaaacttcaatcgctaacctataaatataaataaaacgcagattctacaaatctgaaactgattcctcaaaaaaaaaaaaaaaacttcaatcgagtgagcttccaaaaatacccactaaacctcagctgagaaaaaacggaactcgagtcaaaagaaaaagagctaacacagaaagtgttaaagaatccaaaaaaaaaatccgggaaaattttgagagtcgaaagaagaaaaaatttgaaacggaaaaaggaaaagccttttaaaaaccctaatcgaagcagatccactaaccaattaggtgacttgaagagtgaatagagagatacccgaaccaccggtgggttcgaaagagagatagagaaagctcgagcctttagtttcaaaaagagatcgatgagaaaatatttgaaacaagggttttagagagagagaaggcaaattaaggaagaagaaagaaagattattatttgtttaaaaacaaaaaaaaaaaggaagtgagagaaagagagagagatatagaagaattagggaatgagaaaaatgagaagagaggtgttgccgcgaaacttgaatacatggacgacttcagccaatcagctttccagatttgtcacttttttccattttttcgatttatttcttccttttattttgtttcactcttaatatctgaagctagtgcatgtgtgatcttgaacgtccacgtggattgtgaggttgtttacatcgttggattgttttagtttcacttgtgtggattctggtatcggtagcagaggattatatttgaaattactggagttttataaaccgaaaaatataaataaaataataatgggggaaatcagtttcttgaagatcttactaattgagtaattatccaaggataatcatttttggttagagcttcccaaagaaaaaaatatttggttagatttgctaaaacatttggttttaacaactttagatagggttaatcatttttgttttttcttataaaaaaaaaatagataaactatttaaaaacgacagcggattaaatagacttggttacatctgattctatctggcccaaataaaaagcccaaatacaaactcatgacctatagaaacccaaagtaacttgacattaataacgaagaagagagttttcaattttgtgatggatattatggcaagaggccaaatcattagtcaaagagagcattggaaagacttgcgcaagtcaaattaagcaactgagtttcgtttttttgctttttgaacagagccaaagaagccatatcaggataacctataaactaccacacaaactcctaacaaaaaaaaaaagaagtaatgatgattccaagccaatcttgcttctgttttttcttcatggtttcattctttctacacactcttgcttctcctacgcttcgccattgccgccatgaccaaaggaatgctcttctggagttcaaacacgagtttccgcgggtaaatgaatccaaccaaattccttatgatgtatcgttaagttcatggaacaagagcattgattgttgttcttgggagggtgtcacgtgcgatgctatatctagcgaggtgatttcacttaaccttagtcatgttcctcttaataactcattgaaaccaaatagtggtcttttcaaacttcaacatcttcataacttaacccttagtaattgtagtctctatggagatattccttcttcattaggaaacctttttcgtctcacacttcttgacctttcgtataattatttagttggtcaagttccaccttctataggaaacctttctcgactcacaattcttgacctttgggataataagttagtaggtcaacttccagcttcaataggaaacctaacccaactagaatacttgatcttttcacacaacaaattcagtggcaatattcctgttacattctccaatttaacaaaactgctcgttgtcaacctctataataattccttcgaatccatgctcccacttgacatgagtggattccaaaacttggactattttaatgttggtgaaaactcattttccgggactttgcctaaatctttgttcacaattccttcattacgttgggctaatttagagggaaacatgttcaagggacctatagagtttaggaatatgtattcaccatctactaggcttcaatatctatttctttctcaaaacaaatttgatggcccaatccctgatactctatcccaatatctcaatctcatagagttagatcttagtttcaacaatctaactggatctttccctacgttcttgttcacaattcccacgttagaaagggttaacttagagggaaaccatctcaagggacctgtagagtttggaaacatgtcttcatcgtctagtctcaagtttctaaactttgctcaaaacgaattcaatggctcgatccccgaatctgtatctcagtatctcaatcttgaagagctacatcttagtttcaacaatttcattggtacaatcccaagatctatatcaaagttagccaaacttgaatatttttgtcttgaagacaataatatggtaggtgaagtaccaagttggctatggagattgacaatggtggcactttctaacaattctttcaacagttttggagaatcatcagaaggtcttgatgaaacacaagttcagtggttggatcttagttcaaattcatttcaaggaccatttcctcattggatatgcaagcttagatcgttggagatcttaattatgtccgataatcgcttcaacggctcaattcctccatgtttaagcagcttcatggtttctcttacagatttaattctacgtaacaacagtttgagtggacctcttcctgatatatttgtcaatgcgacaaagctactatcacttgacgttagtcgcaacaagttggatggagtactaccaaaatctttgatccattgcaaagctatgcaacttttgaatgtgagaagcaacaaaatcaaggacaagtttccttcttggttaggatctctaccgtcattacatgtcctcatcctacgatcaaatgagttttatgggacgttgtatcaaccccatgcatccattgggtttcaaagtttaagagtcattgatgtctcacacaatgacttgattgggacgttaccgtcattctatttttctagttggcgtgaaatgagcagattaacaggagaagatggcgactttagactttctgaggctccatacatgggaaaagttttgaatgctactgcattctttgttgattcaatggaaatcgtgaacaaaggagtagagacggagtttaagcggatcaacgaagaaaacaaagtcataaacttttctggaaacagattttctggaaatatacctgaatccattggattgttgaaagagttacgtcatctcaacttgtcaagtaatgcattcacaggaaatatcccacaatcattggcaaatttgatgaagcttgaggcgttagacttatctctgaatcagttgtctggtcaaattcctcaaggacttggtagtctctcgtttatgtcaacaatgaacttctcttacaactttcttgaaggtccagtgcctaaaagcacacagttccaaggtcaaaactgttctgcattcatggaaaaccccaagctcaatggtctcgaggaaatatgtagagaaactgatcgtgtcccgaatccaaaaccacaagaatcaaaagatttgtctgagccggaagaacatgtgattaactggatagccgcgggaatagcttatggtcctggtgtcgtctgtggattggtaattggacatatattcctttcacacaaacacgagtgttggttcatggaaaagtttcgtcgaaaaaagcccaaagtagtcaccagaattgctcgtccctctaagcattaatttgtgacgtatatgtttgttgactagcgtatattgtttattacaacagcttgtatatttttaacttatattacaacagccagcttgtgtaatcaattgttcaattttttttctttattcaacaaaagaattcatatattgttatatattactgactacagaagctgagagaagaatatgttcttacaagttgggatgtctatgagactagaaccaacaaggatgtctcttgctagttaatttatatgacaaaaggctgaaacatgaacttttaaagatgattccagtcttgattgcaccattaaacgtatcataatccagcgtcaacctcacataagccttcttgtgaacctcacgcaagccttactggttccagtctgatcaatgagttaaagtttcttggtcttatttaacatgtttagaaaatattcaactcacttagtttgattctttgaatcaagttttcagttattagttccaacttgtaaaaatggttgcagaacaaaatgatgaggaagttttttagtatcacataagtccagattcaagtttttttcaattgtatctaaaacacacacaactttcagattgaataaaatctgaatttcattctcagcagaggctaatataaaaatgacaaaagaagaggaggaggataggagctatatgtctactatttttatttttttagccaatgagagagctccacttcataccccacttttaccaatcgagcgatttcacaaccagtctcacccatgtcgcgttgagcgcgtgtctacgatttctaaaggggtttgtccacagaaatcatgccttttttgatccacgcaactcactctcaaaaatccatcgcgtgtcttattttttttggttttcttctctaaaccaaattaaaccgaaccgagatcaatttgaatttcaaaaccaatgtaaacccatcaaacccatcgctgtgaaaacaaaaagctcggccactgtaacaacaaaaatggagacgacacaacttggaagagaaatcaactctaaatagccaagagaatgttcgaaaaccccctcaaatccgatgcttcctttgattccaacctccaaaagcccatctgctcaaatcttcatttcgaggatgaggactcgaggagtattacaaggtacctcaatagaatcaatggcttccatggattttgaaactttacttctaataaacaccattgtaatgtcttgttgtgaagttgtgtaaggaacaaaggatagtgaaagctgaagagtgggattcgtttatggagtttcagagttttttttgactaagtggcctctgtttttgattcttcagtggtcaattttgtgatgggatttgattgaaattggagaatgatttcatgaaatctcttcgggctgaggttgattcatgactctttcatttttctagtgtctcattgatgatagacataagaagcatacttaaggccatagagagtggtgaattggaggcaatcaagcctttgccttggtaccctaagaatctttcttttcacggaaggagattagaaaaaaccagatacttgagaggtacattttcatgccagttgcttcagaacaagtattcacttccattcccttacttgtgttagttcagcgcttgagaaatattatgatcttgtttcagactttcagctgtcaagagacaaggcccgttttactatcaggttaaaatcatggtcagcttcttgtcccaaaccacattgttgcaaggttttgtaataaatcttggctcgataatgcattcagaaacttcttctactcatatctcaaaatatgttttgaattctaaaccccatggttatcaatataaagaatattagtatctatttttctcttttctggtgtggttgcaatttatcgtttgtctctttcgtggaaacccttaattcaggcggtattaagtctttctcataaaactttctaagtcaaaccaaaattccaatcgaaattctcagcatgaaagtctcgaacacgtttacatttcttacgcacccaaagactcttgcttcttgcacacgtctctcttggctgtcctttaccataacgaatttgatgagattgtttcaaaataaaatgtttctttttgacaagtctgggattttaatgtaattatcaatagtcatgcacattatacaacatttaaaagaatacgggggttgttttgcaattttcagtagttatacacatttatccgtaatcactctgctcaagaagcttctcctcttgtgtgattctcctgcaatcgctggtgatgattcctctaactctttcgtcgccgtctctgaatcggctcgttttatccacatcacgttactcacactctctatttctcagcaatttcaattcgctctctctgatccaccggaaattaccgtataaacctctttttggcgcaaggtgtcatgctagtagcagcagcagcagctcttcctccttcacggcaaagtcttccaaagagattcgtaaagctcaaaccaaagtagttgtcgacgagaagcttagctcgatccggcgactgttttcggagccgggtgttggaatcgacgcttatatcataccttcacaagatgcacatcaggttctctttttttaaacctcttcttaactcgtgattacgaattgaataggaagttctagtagattcaaaactgttcaattgtgtgtgtttttaagtcaattattggtccaagtgggcaagtttgactatagaaaggagtaggtagaagtctactagagagctgcaaatttgtgttttgttttctatttttctctctctctaaatagagacgtagaagccatagctatcataacctgttacttacaaaacaaacaaaatgattccaagccaatctaattccttttctggtagtgttattaccttgtatttcttcctcctgggttcccttgttctacgcactcttgcttcttctaggcttcactattgccgccatgaccaaagggatgctcttctcgagttcaaacacgagtttccggtaagtgaatcgaagccaagtccatcgttgagttcatggaacaagactagtgattgctgtttttgggagggtgtcacgtgcgatgatgaatctggcgaggtggtttcacttgaccttagttatgtccttctcaacaactctttgaaaccaactagtggtcttttcaaactccaacaactccagaacctgactctcagtgattgccatctctatggagaggttacttcttcactaggaaacctttctcgtctcacgcatcttgacctttcgagtaatcagctgacaggtgaagttctggcttcggtcagtaagctaaaccaacttagagaccttttactttccgaaaacagttttagtggtaacattcctacttcatttaccaatttaacgaagctttctagtttagacatctctagcaatcagttcacattggaaaatttctctttcatactaccaaatttaaccagcttgtcctccttaaacgttgcctctaatcactttaaatccacgcttccatctgatatgagtggactccacaacttgaaatattttgatgtgcgtgagaattcatttgtcgggacttttcctacatccttattcacgattccttcgttacaaattgtttatttggaaggaaaccagttcatgggacctataaagtttgggaatatatcttcatcttctaggctttgggatctaaaccttgctgataacaaattcgatgggccaatccctgaatatatatctgaaattcacagtctcatagtactagatcttagccacaacaacttagttgggccaatccccacttctatatcaaagttggtcaaccttcagcatcttagtctttcaaacaataccttggaaggcgaagtgccaggttgcttatggggattgatgacagtgacactttcccacaattctttcaacagttttggaaagtcatcatccggagctttggatggagaatcaatgcaggagttggatcttggttcgaattcacttggaggaccttttccccattggatctgcaagcaaaggttcttaaagtacttagacttgtccaacaatctcttcaacggctcaattcctccttgtttgaaaaattccacttattggcttaaagggctagttctgcgtaacaacagcttcagcggatttctcccagacgtatttgtcaatgctagcatgttattatcacttgacgttagctacaaccggttggagggaaaacttccaaaatccctgatcaattgcactggtatggaacttctgaatgtgggaagcaacataatcaaggacacttttccatcctggttggtttctttgccatcattacgtgtcctcatcctcagatctaatgcattctatgggtcgttatattatgaccacatatcttttgggtttcaacatttgagactcattgatatatcacagaatggcttcagtggaactttgtcacctttatatttctccaattggcgtgagatggtgacatctgtcttagaagaaaacggctctaatataggtacagaggattggtacatgggcgagaaagggcccgagttcagccatagtaattcgatgactatgatatataaaggagtagaaacggacttcttgcggatcccatatttcttcagagccattgacttttctggaaacagattttttgggaatatacctgaatccgttggtttgttgaaggaattgcgtcttctcaatttgtcaggtaactcattcacaagcaatatccctcagtcattggcaaatttgacaaatcttgagacattggacctatcccggaatcagctatcaggtcacatccctcgagatcttggtagcctctcttttctgtcgaccatgaatttctcccataaccttctcgaaggtccagttccactaggcactcagtttcaaagccaacattgttctacattcatggacaacctcagactctacggtcttgagaaaatctgtggaaaagctcatgccccgagttctacaccactagaatccgaggaattttcggaaccagaagaacaagtgattaactggatagcagcggcaatagcctacggacctggtgtgttttgtggattagttattggacatatcttctttactgcacacaaacacgagtggttcatggaaaaattccatcgaaacaagcgcagagtagtcaccacaagtgctcgttgaacaccatcacctctcacaatttctctgagtgattgtgaaacgtatatgtttgttatgatatctgtcagttgtgttatgcataaactctttgtctttgtaattttctactttatggtattgtaagaaacggctttggtggtatctgatcttctatatgttgggttgaaaatgcattcagatttttcttcctagtcaaatctcaacttgtcataagaggatgtttcaattgtagagccaaatggaagttcttcttcttctaaatcacagtatgaaattctccaactcgtgttttatttcattctccccaaagtttcttgctccgctcacacgtcaatcttgctgtccctgagtataccaaattcgatttggagattcaagataaaaaataaatatgatttggaccagtgcgggggttgttatgcatctatgcaattgtttttgccattttgatatgggtaatgtgttgtttcggtgaattttacatactaggagcttaagatctactttcataactgatgttgcctgtaatatatttctgtgccattaggaaagtcacaaatttatgttttacttctaaatgtatccataaactgcctgagtttttcatggcttgagtgtgatttttctccatattttgtactagagcgagttcatcgcagagtgctatgccaggagggcttatatatcaggatttactggaagtgctggtaccgctgttgtcaccaaggataaggcagctctatggacagatggccgctattttcttcaggttttgatcattatcgtcctttaaaattatttgattgccatctcatattgaaaggaaatgtggagtttcttatctacattctctgcaattattctatcaaaggcggagaagcaattaaactctagttggattctcatgcgggctggtaatccgggagtccccacggcgagtgaatggatagctgatgttttggcgcctggtggaagagttggtattgaccctgtaagctattattaaaccttctaaattgtgtctccttttgtccttaaatattgtagtttgtggtttgttatttacaagactttggaattcatgaagggagcagttccttttttccgccgatgctgctgaggaattgaaggaggttatagcaaagaagaatcatgagttggtttacttgtacaatgtaaatcttgtggatgagatatggaaggactcaaggccaaagcctccaagcagacaaataaggatacatgacttgaagtatgctggtttagatgtggcctcgaaattgttgtctttgaggaaccaaattatggatgctggcacatctgccattgtaatatccatgcttgatgagattgcatgggtgcttaatctggtaatactctagcatagcatcttacatttgaatctgttagttttgtgccactgatatcagcttatccttcacataggtcccaatgtattgatgttgtattctgcctcttctgactgcagagagggagcgatgttccacattcacctgtaatgtacgcatatctgattgtagaggttgaccaagcccaactttttgtagataattctaaagtaacggtggaggtgaaagatcatttgaaaaacgcagggatcgaacttagaccttacgattccattcttcaaggaatagataggtaagtacttgattgtccatgtccatttatgaacttcagaaaaaggaatttccctcactttgagttttctcagtttggcagcacgaggagctcagctcttgatggatccatcaaccctcaacgtagctatcattagtacctacaaatctgcctgtgaaagatattcgaggaattttgaaagcgaagccaaagttaagacaaagtttactgatagctccagcggatatactgccaatccttctggtatttacatgcaatctcctatttcgtgggcaaaggccattaaaaatgatgctgagctaaagggaatgaagaattc

SEQ ID NO: 49 - DNA, 79296 bp, Arabidopsis thaliana
gatctctaccgattggactcttgaggaacaatctctattggaagatttgcttgtcaagtaatcttctcgctctctctctgtatgtttaagatttggatttgctgttttatccaatgttctttctatctgactagatgtgactagatgtagtgaattctgcgatatgttattttccatggcctttcaagcatcatgtagcttgaatcggaatatgtgttgagaattgttagctttggtcgggttttttgaattatatctgagaagagaaacagtggtatttgattagctgattgtgagttttggatgtggtttcaagtatggtaataaataaaatactagaaaaatgactagctagctagtgtggtatcatatttatgataggctcattagtgttagagcaatgtgaaaattttaggatttaattagaggatgagttgtctacttatctgtaatgactggttgtaaatttttgtaggagccttgttaaatcctatcactcttttagtaattaatctttatataggtacgcgacagaaccgtcggtttttcgatatgcgaagattgctatgaaaatgaaagataagactgttcgagatgttgccctgcgctgtagatggatgactgtaagtttcttgattttgcttaatccggcgactttttcgttgttcttgattaaccttcttcgtgtattggctttattgattagtaagaatcaactgacggtttttcacctccatgtggttgctgatggattgcagaaaaaggaaaacggaaagcgtaggaaagaagatcattcctcgaggaaaagcaaagataagaaagtatgtggatttcaatcctatttgctgctacttagcaatttcgatactagcaaggctaagaaagatatttgaagtacaaaccataaatcagcttgattgaattctaatgtgtaactagcttgaacctttagtcatttacttgtgagtttggacggatgaaagttcttgtgttgtcttgtggatccatttataagtctacaaaaactgattgattgtctttcacatatctgtttagcaggaaaaagctacagattcttcagccaagtcctcatctcatttgaatgttcatcctaatggtccttcttatgctccgcctatgatgcctatcgatactgatgatggtatttcatataaaggtttgtctaagattctaggctttttccatttaaaggctaaatcttctagattggattagaaggagcataagtgtttcggctttattgcagctattggtggtgtgagtggagatcttctcgagcaaaatgctcaaatgttcaatcaactttcaacaaatttctcagctttccaggtgaattcaacttccacttttcatcttgtaagttttgtataattcgctgagttttttggacttgatttgattctctgccttgtgctgttggcttttgagcaatccagtggttttatgattgattttgtactatatcagcttaagtttacgttagttctatccaattgtgtacttatgaaagattctttcccattgcagctacatgagaatgtcaatatcttgtgcaaagctcgagacaatatccttgcaatcttgaacgagtaatacattttcccatatatctatagatcatttcgatgtcattgactcactttgggaaatgccattcttttccaacaaagttttcgagctattatagtgtatcaactcaaatcttaacgtgctttgctgattgaatggattgcagcttgaatgacatgccagaagttatgaagcagatgccacctcttccggtgaagttgaatgaggagctggcaaattcgatcctccctcgcccatcccatcaaaggaagtcatgatcgaggcgatagatggttggttctgaccaaggagtctctttaatccgggatcaatgaagaaaggaataaatcgcgggatagagagagagctccactcgtactggttgatagaatgaggggtttcccctgactcatagagttatagtctctttttacaatttccgtcagtctctgaatgttttagcaaatggttaattgatacatgagtagggtcgcgtatcgttgtttaggatgtgaatagatttcaattggtatggtataagtctctctgtataaaattggtatcaagctgaaaggtttgagattagaaagggcctatatcctaatgatgcacacccgtgatgcatttctctcatacaaccccttttttagaatgaaacgaaagtactgaaccatttcttgtaataataaagccgactgttttgtaacacaaatgtaagtcttgctcgtagcttacagaagaaatctcgagtcaaaaggtaagtcagtttacaaaaacgaaaagttttctattcagaagattattccaagcatcttagaagttccaagagaagatcgtaactctctcacacatcagccaagtctttgattaatttgcgctggtaccacttgcaggagtcttcaactctcaacctacaagaagaagcaatggtgagcaagaagttgacctagtaagaaaaaggatacatagtgtgagagtatgaaactattgtgagatgctttcttttatgaaatcctttcatcctacaacagagtggaattaatatatgattgaacaagttgatcaaaatgtgaatgaatcgtttctaggtacacaacactatgagctaccactagtaatgtaacttaagaaggtgtgaaactgcttttgttattgaaattcaccaaactagagagactctaaagtctcaagcaatttgtccaaccaaactctagaaaactcaagttaatgggcaacattttgtggcttatataggcagtggtgaaatctcaatgtctgaaactaattgttctttcatgagaagcagtaccagcaaactataacacctctagaaattcttgaattctccgtagactaaacaattgtgaagaaatcaatgaacaatgagaagtaacccaccaaacataagagcttgctatgacattcagatcacgtggatagcttgattgatcaaccagagttatgagatcatctcactaacaaacaatcgtttcaagatgcataacactatgagctactactaccaatgtaacttcatgtaagcagaaggtgtgaaactgcttttgttattgaaattctcaagcaatttgtccaaccaaactttagaaaacttgttaagtaaattggcaacattctgtggcttatacaggcagtggtgaaattactacgcttgcttgacctctctagaaattcttgaattctaagttgattaaatatcaatgaacaatatcaatgtaaccaaccaaacaaaaaagctttctgtaaaactcagatcatatgaatagcttaatttatctaaaagagtaacgagattatctcactagcaatcaaatcatagttacgaatggagggagagaggtagagaaagagctgacctgagctggattcgggttctcataaccaccagactccaaacctgatactctaccttccagagcactgaatttctccttcatctgcagcattggaattttgttaacgatttgcaggatattcgaatgaaaactttcccaaatgatgaatttctaaaacattgaaaatttacatcagaagaaatagcgaaacgttcggcatagagatcacgccacacgatatgagcaatggaacctccggtcacggaaaaaccaagcgtaaaccagagaaggcgagttctcaacatctctttcttcttcttcttccaatttctgcaatgtctctgaatctctctgacgcattaccgagtcgtcaaccattttttctttttgatatgggcctttatattggcccattagtttgctaaaacaaactaaagcatttaagttttttaattgagatgggcctttcttatatagaagtccaagcatttaactagtaaaaatgtctatcgtggcccaaaagaccgtgaaggtccgtagttgataggatatgaagcagattataattttgtaaatagtgaaaaaaaaaaaaaaacattatacacaaattaattcttgtatcaacaaatagaccttcaaaaaaaaaaaaaaacatatcattcaaatgattagtcaataacatgttcaatacatcacactgtcctaaccaagataaatatggttgcaagacaataaagagagatcatttaaataaaagttactttttcaagaactttctaacttctaatccaatagccgtcaaggccaagaccgcgaccgcaaaaccgtaaccaccattccaactagttccagctttagccaaatgaataccgtagaagatgttagaaatagccagtatgatcagaagtcttcctatgttatgatgataccaattccaatattttctgtatttcgattgcttatccggccgagctagcaatgccagcatctgaaatatcaataaacaaaaccatgtaaacatataatcgtcttgggtgttcttcgcagtatatacttcaaatttttgagtgttattaggaagacgaacctgaagaacgcccatgacaagtatggttatcccgaggcctttgtgcttggaaacattattggccttgagccggttttcaagaaccaaaccgcaaatgacaccagttaaaccgaggagaaaaccagtggtttggagagcgatatgggcatagaaccaagtggggtcccattgcttcatatgtcgagccactatggcgccaacgataatcaatattccccagccgaacatgttcattagcccatgtgtcttctttagcttagagtgtggtgaaactttaaccacactttgcgaaccttttacattcatcaatggaaaaccaaaacataaattagtccaagcaactacgaaacaagaagaatttctagattctaatacaaactcatgttcttttattaagttttgtaccctccatatcttgaaaatttttaacactaagttttactcatgaaaaagttaatctgttttttcactgcatctcacaatcatcaaatcaaacaaaccaaaatagacaatgatgagatattaaaaacaaaagacctgtacatcattttgttttgtctttattacccgaaatattgttgaattgccatttggtacaaaaatcaactaaaacttaattactactccaagctacagcatctagacttctagagagtcccataatctcataatgtggctaaataaattcaatcgtgttttttgaccaaaaaaaatacaataagaaaattggaaattagtgttttggaaactatatgagtagtagtagcagtagttgggcagggtcggtataatgtgaaaatgactccaacaaagaataatggtacaatcttgaaccagttcctaatcgtcatcatcgcatgtgtttaatttgttttgaattaacttagaaaaatattatgttgttggaaggcttaccaaactagtggagatataaaatgattaagcagtcaaataatggattaattcaagattgactttaaataattagtcaagctgggttttgcttacctgtattataattgatggtcgtggtggtcacgaagcggtgctctctcaacctaaaatccggcgaagatgggaagaatccggcaggtcccacagcgtaaagaagactctgccgcggcagcgtcgccgtcaattgaaatctcatgtaaagacgcgacgacactgattcgatcttcaacgagccgttgacgatcgttagatctccttggtcaggattaacctctccgggagatttcccaccgagcaagtacggtttcacagtcccggaaccgccgtcggaaggtatccaaccaacgatcgcgctgcttccgatcatctgaccgttggtagagaatccgatcccgatgaaagcgcttgaatccggcgccgataagataaagctccatgtgttctctgccgttcttgcatactacgcgtgaatattattagaaattcggtttcaatattttcagagttggaaatttgaaaattaggaaaattgacttactcggaggatgaaattttggggagtccaagcttcggtgcattgaaggaggctggtgttgaaggtgaggtcgttgagaggtagagttgagttgcaggaatctgtagcagcttgttgagcattaactatggtggagagagcaattaagacgaagatgatgatggaaacagaataaagcttcatgttttgttctctttctctctctctggatctgaaagatgaaagagagaggaaagtaaatgactaatgaagaaggatcatgatgatgacgacgacaatgaattgtatatatatatatatatatatatatatatatatatcttgtttatgagatagtgtgtgtgaagaagcagttgagaattcaactaattttaaaattctttgtatcgttagaattcgtttttttatatcattattattactaatctggtaaataaagagctctgtttcattaagaaagagtaaaaatcctttcgttctgtttctctgtctctcgtcggcttaagatgtggaaaaatgattgcaatgtaccagctaacttaacatgttttgatcatttaaagacaaaaataataaacttgattgaaaaggacaaaatgataaatctctctttaatttttggagtacttgctacgaatcctagctttttcacgaccagtatcggtctagtcagtttaagtttcaagtcaactggttattgattgcatctgccgcattgtgtttattcattgatcgaccaatgggatttttcagacatacagataatagtatgtactactatacatttgcctttttggtgttattacttttagtacttggattcacataaattttgtaacaactggcttctattagctagacggtctatttcccgtctaattcaaaaccaaactttgtaagacagatgaaaggagcaatgaatttgtaatccagttaagctaaaatgagatggtaacgtgattgttactcaaatctctggtttgggttttttacactttcagggaccagagaaaacaaccgatcctgacaaaagcaatatctgttatcctacacacacacaatataaaagtcattgacataccaccgcttgtgccatctcaacaaacaccatttcactagtctatatgggctccatcatctgaacaagaaccattcaattgttggcttttggcatcagcaatcctcgccgcacttcagtcatgtaatccgttggcgatggaggaggtaatgtcttgtttgctgcagccaggatctgtaattgttttgacacaaaacaagagatggggtctcatcattcatgtactcacatctttagaaaaactagaagcatatgataagagtttgaagttagttccacctgatgaggtagtttaccccaaacactccctccatagtacatgattggtcgcactgtgaaacagagaaagtaggcaaacttgaaaatcagttatacttgactaaccggaagacagagatccagataagaacatagatatatctgattgtatttggaggcaactcaagcagcacaagtataatagacacaaaggacaaaggaaaacttagaatcccttaatctcaccagatagatccacagttgggtcgtcgtattgatgcatttcagctgcccatcctgttcatgacaaatcaagagcacgtaaataagacaagtacataaaactgactgcataagcagtgaattcaacacaccttatctattaagttcaaagatttctaaaactagcactgactcaacaaatgcttagcatagcaacagttgatagaagaacgaccagatagtgatacagagcaaagaataaaccagctaaatgtttaaagagatagttcagatttatacgttggctcatgagctgataagctgcactcctggagcagtcctttattgttattatcctctgggtctgggatatgttttccatctgaagaccagtagcaggaggctgatttctctcattatcgttgttctgttggctacttgttcgatctgcatttcactctttatttagccaagaaccatagcatactagcaaaaccagatatagcttgaacgacgatttattttcaagaaaacaggcaaacaaatgggtcaagtacacacatggagaaatgaatcaaccagcggatttgctaataaagagagagcgagatctgaatttcaggctaaactcctaataattcactttcttagaaacggttcttgaagttaccaactatgcacaaacacaatgtgtacagattcgcatgcaatcaattcctgaatctacaaaacaagattacttctattcatcgacaatctttgatctaagctataatctccacagaactagatactctcggaattaagaaccgaattgattaagaatcaataaagaacgactgaggcaaagaagacagagagagagagagagagctcacatacctcccgacttccggcgattcccagaagccttcctgtgacacggagaagcaacatcgaaaggtaagaacggagtagcgaaatcagtagaataaagaacactcgaaatcagcagatcaaagaccactgaagaagaagaagaagaagttacctttgattaggaggagtgtatcgattctgattggagctcgaatccgccattgacgagttaggatttacgcagttttttcagagaactctctctctctctctctctctctctaccggaggagatctgtcaacagtcaactgtttaacgcatagagaacgttgaaaagcgtcttctcgtctgaagtcgttcaatcttcacgcgcgaattcttcgacgcgtgtttatcaacctctcgcgcgcttttattacgcctttccgaaattaacgtttcgtgttcaatttccggtttgctgaaccaactgtatgtagatttctggttgaaacatctactggtccaccattggactttatgggccttactacatttttgggcccaatattgtaatttagctgatggatccaaaaccggaatcggatctgtacccgctccatcgtgaggtctctcacagcgaaagaagggttttgagggttttcacacctttcgctgtttcctcgtcaatttctttgtttggttgttctttcttcgcatccaaagatgaagctcgtcaggtactgtttcgttctcagttcttcttttctttagaaaattcatgttgttcttaatcttagttagctcctggcatggaatccattcccaatattgagcctgagctgatttgtgttatatggttttgattggatcgagtaggtttttgatgaagttaaacaatgaaactgtgtctatcgagctgaagaatgggactgtggtccatggaaccatcactggtaagttcttattgttagcttccggtttctttgtagctcttctcatcttttcttctctctcgatttctccgttgctaggtcttatacaagtcgcgatctgttcccttattttcaattggccctaatcgcgtccttgtgatcacatgaataggttgagtaaacacacagttagagccagtagtcataaaggtatatttattgaagtttaagcttgatgatttgggcaggtgttgatgtgagcatgaacactcacttgaagacagtgaagatgagcctgaaggggaaaaacccagtaacacttgatcatcttagcttgaggggtaataatattcgctactacattcttcctgatagcttgaacctcgagactttacttgtggaagacactcctagagttaaacctaagaagcctgttgctggtactgcttcattcatttttggtgtttgtaatattcgtcttcataagctaaaagacttctttatcagtccatttattcgttctctctttctttcttctttagggaaagctgttggacgcggtcgcggacgtggccgtgggcgtggtcgcggcagaggtcgttagatgtagcagcgctctggaacatgttgaaggtttgtgagtttaatttttaggagaatgtacgagttatgtaactagcaactctggcaaaggaaagatttgattgagaaatagtatgattgatgctctagtaaggagttactttgtaatggaattccatggataacaagatttggctttacatgttataagagcatctacaagtagagaatttgtgtgatactgatagctcaagactttttattcatttaacaaatctgactatcaaattgcattaacatgttgacaatcttagtatagaaaaactgctatctcctccgttaatcttccacatgaaacctatctcacatgatcctgcaattgggatcttgattgtaaacgggttccccgatctgattgtagggatcacacgggtagggataggaagatggcacaccatatccatcatgaggccatggttgataacatggctcaggtttttgccatggttgacaacatggctcaggtttcttctcttcaggtttcttctcttcgggtttcttctcttcgggtttcttttcttcttctggctttttgtcaccatccttaggtggttcaactttagctacgctaacaagctccgcaaatgcaacttttttcctgagtgtgttgattagagcaatcatatcgacttcaacaccggtcacctcaatctggttcctgtgatctccctttatttccacagcgttcacgcctataaaccaatgcgataaatctttagattcaacaagaattacaatcatcaagttctctagtgtttgtatcattgttacctttaaactgaaccgcagttttcattgcctttgctcgagttgtgtcatcagtcatagcaattcttatcaggatcttttgctgagtacaataagagaactccttaacatcacaaagagaagtctctctctttcacaagagaatcgaagttattacttgttgttgagtacacaggagacataccttcatgttattgtcttctgagaatccgcgtgatttgtttgatgggagtttgctccgaacttttttgtgtcttcttcgatcacaaattagaggaaatataaataaggatcgattttatatattcatttgttccatgagtcgttgtctcacacaacggaatccgatagtttgaatatcgttgtcaggttcatatcttcggtccttacgtgttttattggttctagttgccgattcgtacgagcttattaccaattttttaattttaaaaagcctaacaaaaatctttatttgattgagtcaaaaaattagatgaaatagttatttgactgggtcaaaataaattgattaaataatggtaaacaacacaaataatatttgtttactacaccgttgcctggtagttttagacatgtatggcaaaagacttaataatttttgagtcgatatgtcaattatgatgattaataagttttgtttgttcatcatccagttgtgcataacaatgaatagaacagatgcgttaaaagtcttggtcttctctagagtacatgtttccctctaacttccttctcaataaaaaaaaagattaacttgactactaatctgtcatccatctgtattaacaaatgttatatgcttgacttgcaatacgtactttcgcaatcatattgcagttttctaacgtaatgaaacaataagcttttagtttatactaatgtgtgttgtctaatgctaatttgactttaatttcttaacacattacacattgatgatgccaattgcagtgatatcagcaacttgcaaccgtttgatccaatgatatatcataggtaattaggtatcatatctcatggagataaacgggtaaataaatataatcttatttgctaaataaaaaataatcaagtttaagttttaacatcttcatatacaatctggtttctgtgatctccctgtattagcaaaaaaaaaacatgatttaaaaaagaatttggaaagaaaagaaaagagcgggaaataaatccaaagatttgaccaagttaaaccaaaacttttttactatctgagaaaaccattcagtttccccaaaataaaataaaaaatcagccttaaatcccgtgtctagggttttctttcgtagctgattgggggctgcaagagtttcgccgaggacgattgagaattttgattttcgaaaaatggattctgtggaggaagaaggtgttgttagggttgaagaagagaacggacgcggtggtctccgtaggcatcggagggtttctacgaagctggcgaattacgtagatcctccgactgacgacgaagaagatggaggacccaagcgaaagggcaaaaggggtggaaatagggctccgaaaaagacaccgaagaaagacgaggagatgcaaaagaacgaaattgatgaagcaaaccgagtcactggtctggtgaaggaaaaaagagccgcgactaagattctgaatcgcaaagactccattattgaagtaggagaagcttctggaagcatgcccaaggaagtaaagggaattaggattgggaaaaggaagggagaaatcgatggtgagattccaactaagccgggcaagaagccaaagactacagtagacccgagaatcattggttacagaccggttagtgatttctctgtaaaatttgtactcttttcataccttacatgacgaccaattcattaattttgggatatattatataggacaatatgtgccatcaatgtcaaaagagcgataggattgttgaacggtgtcagacctgcaatagtaagcgttattgtcatccatgcttggacacttggtatgatcttcttcttaccttgaactttaatttcgtttcttgttactgatttcattttactgtccagaagcctgaaacattggtctatttacttcttgcaggtacccccttatagcaaaagaagatgttgccaagaaatgcatgttctgctctagtacttgcaattgcagagcatgcttgcgtctagatactaaattgaaagtaattttttctcgtatctaccatatcttgcttgcttattattatttttcgatttacttaagctccttaccataataattactcctatgctatgtaggggataaattcgaacctcatagtcagcgaggaagaaaaggtccaagcctctaagtttattctgcagagccttctcccacatctgaaaggaataaatgatgaacaagttgctgagaaggaagttgaggccaaaatatacggtactttctttgcttttatttatgattggatattcgttattattggatatacctgcattaattcccaacaaaatctcaaagtgagtgggttcaattttttaagtgggaaactggaagctcattagttccaggagtttgaagataccttaatgttgtttaaactcacaggactgaagtttgaagaggtgaggccccaagacgctaaagctttccctgatgaaagactatactggtatattaccctgatatttttgtttcagttaaaatgacaagttcttatgtcttcatgctgtttgataacatgcttcgttgttgttctaactttttgggcttacagtgatatctgcaagacttctatctatgatctccataggaattgcaagtcctgtagttttgatatctgccttagctgttgccttgagatccgcaatggaaaggctctggcatgtaaggaggatgtgtcttggaattatattaaccgaggtttagagtatgaacatggacaagaaggaaaagtgattgaaaagccggcgaataagctagatgataagttgaaagataagctggatggtaagccggatgataagccgaagggtaagccaaagggtaggccaaagggtaagccggatgataagccgaagggtaaactgaagggtaagcaggatgataaaccggatgataagccagatgagaagccggttaatacagaccatatgaagtacccttctctgtggaaagcaaatgaagctgggatcattacttgttgttgtggtgctggggagttagtgctgaaacgactacttccggatggttggatatctgagttggtcaacagagttgaaaaaactgctgaagctggcgagcttttgaatttacctgaaacggttttggagcgatgcccttgttctaactctgacagacatattgacatagacagctgtaatttgttaaaagctgcttgtcgagaaggttcagaagacaattatctttactctccaagtgtatgggatgttcaacaagatgatttgaagcattttcagcaccattgggtaaaaggcgagcctgtgattgtgagaaatgtgcttgaagctacatctggtttaagctgggaaccaatggtaatgcatcgtgcctgccgccagataagccatgtccagcatggatcacttaaggatgttgttgctgttgattgtttggacttctgtgaggtcagttttttcctgagtaaattgtattgtccatgtcctttttataaaagtacttaattttaatggctctggtacttgcatagcaattaatttattcttgtctagataagtaagttcatgtttttcccttctggcttgatttctgttttactgactgttcaactttgtttttctcatcaacagtgaatataattattctttagctttttccagggttttgccttttctggtagatgcattgaatagctacatgtcaaattcatattagtcttactaggcaacaaaatgcctcatctgttacttttcagatttgtagttgtaacttcttcttatactcgtatttatctaatggcttgtaatggttgcaggtaaaagttaatcttcatgaattttttactggatacacggatggccgatatgatcgaatgggttggccactagttctgaaactgaaagattggcctccagctaaagtcttcaaagataacttgccacgtcatgctgaggagttcttatgtagtttgcctttgaagcattacactcatccggttaatggacctttgaatctcgctgtcaagcttccccaaaattgcttgaagccagacatgggaccaaagacgtacgttgcttctggatttgctcaagaattaggccgtggagattctgttactaagctccactgcgacatgtctgatgcggttagtacccatatgatttgtcttttctcgttttcatatccatttctttcttctaagtctgtccattcttattgtttttctttgcacatctataatgatttcagaacctatgaaaacattaaaatcagataccatttcctaatcggtcacttagattttttattacatttaggattcgtctcctcttcttttccagatcagttccttaagttattctgtttttcttttggctgagttttgtggactctttcgttgaactcctctttttcgcattttattcgggctacactcctcctttgaagcaaaggaactctccttagatttgttgcatcctcatattctgctttagggccgaaaatcaaagtctctggcctaatgttcttgaacattctaagattgcaatgtccatttgaaagttcttacgctgttcataggacctatggaccaagctttatccattcaatgtgagtccatcaatagctttcttagtccttcataggcctggcattcggtttttggttctgttaagttcgttttttccgggtttggaaattgcccccaaaaagaatcggatgttatttcggtttggtatataataaatgaaatttaataaaaaatattaatcttaggtaaatgttttgacaaaaaacaaaataaaaacttgtacaggttaatgtatttttaggtaaatgtattttttgtgcgcaccccaaagccttcatccattctgcttagtagagcactttgcttaggtggattgtatctcagactttcataggatgatcgtctaaatagtatacggaaaagatgcgacattatggtcagctccgtggatatctgctgttcaagacgcaagaaattgttcgttttgctggcgcgggcgaggactattaaatcaagtttgtttagttgctgccagttgagcttcccaattcggcaatgaccgatcttaaatttgaaaatgctggtttttcagcattttataaatgtttgattgcgggactaatttggctaacattgaacttggtagacaaaatcgtcgaatagttgaaaaatgagattattattgaatgaatacacattgaatgcaaagattacgcatttcatttgtggtaatagttccaaaagaaaaataaagtgtttgtgattgttcgagaagatatgaaacaacagatacaatagagctaatcgtcgatacaactggtgtagccaattatagtcgtctgtcgtatcaataatgacaattaaactgaaatgcctagattttacatgttgctgctaccactagttgccagaactggaaccaaaattaatgaccaacatcaatttcgcagaattgtcagtactagaaccgaaatcctgattgaacatcccgagctgttgttacttcttgatattgttcggaatgatgttattctctcacatcctacacttttcataaccttgtaagcgacaaaacacattgaaatcgattatgagatgatgcagttgattttttttcaaatcatcagtaaacatgaacttgttgatttctacctcaatgactctttccaattaggtcaaaaaaaagttgtcattatagaaaataaataattatttttctctttggttttttgccaaaaaaaagaatttggtcaataaaacaaaaaaaattaggtcaagcatttttttttttttttggtcaatagttaatttagtagattttggttttgtgttattacatcattaccttccgtttttttctcaatacttcttttatgaccatttaatctcttagaaacgaaaataaacataatctctctcctcgctttctaattaaaataatagtttgaaataaaggtcaactgttgctgtaaaataaaataaaaaataacggtccagggtgttatttttatattataattagttttactcacttttatcttaacttttcttctttagtatcttaatatctgtaccctttggttatttcaggtgaatattttgacgcacatatctgaagtgcccaatatgcaacctggaattggaaatctgaaaaagaagcatgccgaacaagatctcaaggagctgtatagctcagtagctaacaaggaggaaatgatggagattcttgaaaattccagacaacaagtccaaaatgttgaaactgatgatggagctctttgggacattttccgtagagaagatattcctaaattagaaagttacattgagaaacatcacaaggagttcagacatctctactgctgtcctgtgtctcaggtacaaactatctttgcatgcttatacatttttccttctcatgttcaaaagtttgattggtcacagttttgcatgtatttgcttatcttacgttgaccttcttcttttaggttgttcatcctatacatgaccagaacttctatctgacgcggtatcatataatgaagctgaaagaagaatatggtatgctttattttttaagtaatcaacctcattatcgtggcagttttggtcatatcttatgagctttatattgtaggcattgaaccttggaccttcaatcagaagcttggtgatgctgttttgatacctgtaggttgccctcatcaagttagaaatttgaaggtaatattttatacttttagcttaggatacactcaatttgagcaattggactttcagtttttcagcaaagaatcatcaattgatcatttgagttctcttgtgtcttgcagtcctgcaataaggtagcgcttgacttcgtctcacctgaaaatgtcagcgagtgtttacgcttgacaaaacagtatcgtctacttccaccaaatcattttgcaaaagaagacaagttaggggtatttctcttgtctcaagttctggtttttttttagcaaagtttccaaatcctctcttattgttatttttttgtttgttcctgtgtgtttacctgaacaggttaagaagatgatagtccatgcagttgataaagctctcagagacttaagtggagagaagtgagttcttacttctcttctcgctatctatggcaatcgtcagtaaaaatgtgttcttttcgtttaagcttgagttctttttttgtgtttgttcaggtctccagaacctgaagagaagaaacaaaatatgagagggccgaagaagggggcagccaaggcagttgccaaggctctcaaagacttatctccaagtgaaaagaagtgagtatttacttctcttctcactaccttcaaaaacactagtaaactgagtttttttcttttgtatgtgtttaggtcttcggaagcagctgaagaggagatatcaaatgggatagtcaatgcaatcgataagggtctcaaagacttacctccaagtgaagagaagtgagtatttacatacttcttctcttctcactaccataaaaagacatttgtaaactgagctgatgtttttgcttttgtgttggttcaggtcttccgaagccaaagtggagatatcaaatgggatagtcagtgcaatggataaggatctcgaacacatatcttcaagcgaaaagaagtgagctttttcttgtcttctgactacctgtaaaaaaatactagatttttcttcgtctaagctgagtttatcttaattttgttgtgttgttcaggtctacggaagaggaaggggtgaaaagaccaaatattgtgaggacatatgagcggagaaaaaagctgggaagtgaagtaaccaacgcatacattgacagattagaaatggagaagatgtagtagtagtagtagttttcaattaacatcatcttttgttatagctttagcaaactcttttgctactttcatatctctaagttaaacagagtagtactaagggatagactaagaagatacttagttatatctatgtttggcatattttgtattctctcctcaatcatctacaaactctgtgaatttactcgagtctaagaagtatttaacttcattcctgtagaaaaatagctatcaacataacagtaacaggtatagaaattgtttgttaagttactctatatgcaacctattcttaacgaaacaaattgcttatttttgtttcaagttgtctaagttataagtggagaagaaagattctttaacttacatagctagctaggccttaaagtgtcataacaatttaacatttaatcttcttaaccaaatggaatgtataatcatattaaacacatcgtatctctttggaggatcattaaccaaaatatgcctcttcactttcttcactccctcgtataatctcatataccgctcttccggtatatccatcagtatcctttttagttccggtatttccttaaccgataccgaaaccgagaacttctcccagttcaaaacatcactaaacggcaaaacatagttctccgaaataagaaccggtacacatccgctgtatatagcttccggtactctcggactggcaacttcgtgaccactcgggcaaatacaaaaccggcttttcctcatcatctccgtgtaatctaaaccgtccggtagattctcgtaaaccagaatatctttatccttttctttccagtggttaagaagaaccggacggattttgccgtgtgattttccagcgaagaaagcaagtgttgtacgagagattggatctaaaccaccggttaagttgttgatgtctccggtcagtaaattaatttcgggaaacggagcgtctttctctggattaaaatattctgatatgttggcgttgcatagtactcttatggaattgaaaaatagtttctttacgtaccatgttgccctgtgaccctgcaacaatgtggttagttaccgtgagagaaccaaacactggtaaataaaacaagaaccacttacccagtcatggcaagacaacatgaagtgatcaaacccatcgcttgtgttccaataaggatatttcttggaaattatttggacatagtcggcgatgacacgttccaagacagccttatctcgaacaactgggtcgaaaagatggtgtaggatcatcacaacactaaaaggtaagaagtagacatgagccttgtccggatctcgggttcggtacttaaggacatcgttttccataaagtttaggaataatccttccatggagtatatgtctttacaaagtccatagtgaaatattggcggatctccttcttcgtatacgtatatcttgaacatcttctccataagaagataacttctgcaacaagtaaacagtattcataaagggtaacttctatgacaagtaaacagtttttttttttttttttaccggtgaaaggcataagggttccggtaaatgtcgccatgaggaacatagtcttcgtctccaaggggagacgatgtagtagaactataatttaattgagcttctctgatcaacaccctcgcggttgctaattctgcttctactttcccatcccttttccaatatccagaacctggatttgatccgtttctctttcttttttccttgaaaatacaaaactaaattcttgaaaatacaaaacatagaaaccatttttcttgataactgtaagcaaaaacgtgacaaataaaattacttctttggaaatactttttgtacatggaaacatatttaacacacatatacactggtaaacatgtttgaaacaattgtaccctaaatcgatgaacggtaagaaagatggataccgtgatgaaggcgggtgagaaggaagaggtccatagtgaagaagatgttgaaaaataaagatgagaagatgaatttgaatcttttgctatgaaaatggcaaagcctacagcaaaagtggcaaatgccaaaagaaaggcgttcaggtatttcggaatgtaatctctcataccttttccattctaattcctattccattattgtgtttgtgtttagtctagcgagagagagtgatgatgctgatactaaggagattttaagtgagctaattaaagagtctctcaacaccacacaatacaactacttcacatgcattacagtgacatacaaaaaaaagaatacaaggatgtcaaaactagactcctggttttatggtctgccatagaatctcttcacacaacacaaccttttttgtattttcttcttatcgttgataatgttctagaattagggcttttattgggcccagtgcaaataaagtggataatgcataaataatactttttaaacacaaattatgggccttaggattggtccattagaaaaaccttatgatagataaataatgtggcccatcaatgtcacctccatctccatatacatatctctcatcataaacagccgtcaaaacaacatcaatggcaatgcacactgttcgattgtcgccggcgactcaacttcacggcggtatctctagcaatctgtcaccacccaatcgaaaacctaataattccatcgtccgatacggatgcggatcttcgaagcgtttccgtatcgtaacggtcttggcgtcactccgggaaaacgatgcaaacggaagggataactccgtgagagctatggaagtgaagaagatctttgaagactcgcctctgcttcctagtacgaatccccactttcgattcctttgagctgtgtgacagatatcttcttcatttgcagtagacataacgtatatatgtaaatagtagcagctagaatttggatttagtgatgattagttcgtttttgtttgaataatagagccgttatcatcgaaccagctcacggaatctgtctctaatggctcccgcgttcgtgttgcgtatcaggtaactaattcaaaggaactgaattgtttctgagagtcataatgttttgggactttattggctaatgaatgattctccaattagggagtacgaggtgcatacagcgaatcagctgctgagaaggcttatccaaactgtgaagctgttccatgcgaagagtttgacactgcttttgaggtcagaatctcgttcctttactgatcaagactgaaatgatcagtatttcattttcttaagttttggttgccattagtcttgctttgttcttgtttaggcggttgagcggtggcttgttgacagagctgttttaccgattgagaactctttaggtggaagcatccatagaaattatgatcttctgctgcgacacaatttgcatattgtaggcgaagtcaagctagctgttcggcactgtttgttggctaaccacggtgtaaatattgaagatttgagaagggtgcttagccatccacaggtatgccacatacctttgtgcataatcgagttctttttctcttggcactatttaaacccttcttcgttgctttggatcaggctcttgcccaatgtgaaaacacgttaaccaaattggggttggtcagagaagcagtagatgatactgctggcgctgcgaaggtatgttttatgttcctagtatgtttatatattcacactcacaacttacagtggcagctaaataagtttgtgaatttgattcgcagcaaattgcattcgaaaatttaaatgatgcagctgcagttgccagtgaaaaagctgcaaagatatatggtttgaacatagtcgctaaagatatccaggttttaaagactttccgaatgccttttccaatttttcatccatatttttacacttctgctggattatttgattgtgaagttcaatcaatttaggatgactgtgataatgttacaaggtttctaatgctcgcaagagaacccattatccctggaactaacagactctttaaggtgagaaatccagtataacttccatctgcaaaggcaactctaatttctggcaatgtttttttttctctgatggaatgagttactttgattcttgtagacaagtatagttttctcgttagaggaagggcctggagtacttttcaaagcgcttgctgtgtttgcccttcggcaaatcaacctcacaaaggttttgattaacacactcaaaatcttccttcattatgtgcagccttgtttccagtcccttacaatcaattttattgtggtttcgatcagattgaaagccgccctttaaggaaacatcctctccgagcatctggaggactaaagtaatttctctcacaaaaccactgttaagtctataccgtacccagagtgtctgagcagtgatgaaagtgtctctctttctgtgcttgacagatactttgactatcttttctatgtggactttgaagcatctatggctgatgaagttgctcaaaacgcacttaggcatctcgaggtaaagcctttggtcacttgatctgaaaacatgtacatgtgactaagactctggattttgttattggcaggagtttgctacctttttgcgggtactgggaagctacccagtggacactacaatgctctaaacatttcaaacatcttcttggtaaatagttcattggtttgcatttcggatctgagttagtaaaattatatcaagtgaggtgaaatatttgaatagtttgtgacagagatccgcttgatgatatcataatcctggtataaggagctatatccctgaggtgaggtctgagaggagtcaccaccttacaagacattccgctcttgttacaaattctgtttagttttccaaaaaagatcatctttgtttttagtaagaatgtagtcactaagtcagatatcaatgacaaataccaaagaactagtgttttttcgtgtttcatccatacatagatacttatcctgtgtcttttttagaaatttctttttgtatgacgtttcaaaattttgattgactattgttagtggtatatctttgagttaataaacgagatataatctgttttcctgttcacaaaaaaaaaaaaaataaaaaaatcatatatcatccaattttcttttggttcagattttaaaacattgggaaaaatagggactagatgacaaataacaagaaatcagaattttggaaggattaaacaataatcgcttcttgtgcaataagccaaaaacaggattaaacagattcgctcagttctcaaaacgatgaaagtagcggagaagattgttttcctctggaatgattccgatggatttgctgcaaccatttctgatactttaaaccctagccctagttcccctcttcgcaaactgtaaactcgactcgtcctttctcgatttccgccttttacttactatctccgcctaacattgtaattcctgcagagaagaacagatccagcttccgttggataagtatggcgttgaaggtgtggaaaccggcgggagtatcgttcatttcgtagatgaaaatgaagtttatcaggttcctcctctttaaatcgcgtttatattctattaatcttcatagtttaattgagttcgtttctcgctttatttatagtcgttgtttgttcttagaactgaaattttattcagtgatatagttaagctgaagaatagtggtctccttaatttgtacaagattgattactttctgattagtcgactctgtttacctgcaaaatgtgatatgatgattggattcttaaggatgtgcaactgttactatgatttgtcttcattaaattgtatttgccgaaactaaagccttatgagaaaaaaaactaagtctctatatatgcttaagttagagtgcttagaggtgttgacttggctagtgaaaaagcaataacaaatgccttttcttcagtctgtcagctaaatggaacctaacttatgatattggactgtcttctaagcttggtcagattttggcccttgatgataatattatccccaaattggttatcttgcaacttgcaagacttgatatcatgttttcttgtttctctgttgaatgtgtatttctggactatgatttcattgcttaactttcggactatttcttatattgtttaaggtctcgatttttcttcttcgaagttatgagcctccagtactagtgtgtgctatgaatgaactgctggacctaattacaaggggatcgtcaactctacccacaatcatagctcctttctttgtggcggcatctaagctcaagttcaataacagatccctggaagcaaataacagaaaagctagtcttcattacgttcaagttgctacagaaacagagaccagtaggttatttgcttctcgcatcgagaaaccaccactatcgatgcagatccattatgaacctttgtcatgcttgcttcatctagctcgtgttaaacgcctgcctaccgctattctcataggccaaagaagcaatagcctaactcataaagctctagacgaagagcttcaggtaattttacttagtaattttgtctcagtttatgcttgtttttcgctggttgatttcagctgaataacgagtttgtgttgttgttgtcatcacaggtgatccatgaaacaggggagctcgtggctagttggacaggactgtctttctcaagagacagaatcaagtggagcgcatcaaagacatcaaaagaagaagaaagtccgtggcgtgctctttatggctaatcttcacaggtcaggtctttttcatggcccaacactgctacagtctttgcttggacctgcagtaaatttccctattgtagtagtacccttttgttaaaattcttatgctcagcagaaccaaatccacgtcactctgctttttctaggatatttatttatgaaagaaacagtttctttttttttgggctgacttggttcaaccaaatcttaaactctcagaagcattttgatttaaaggtacatatatttggtcaactcatgggaggatcataacataggagtgggattacttaatataatacaaatgattagagttatgattggtgggagaggcataaaaaaagagagattaaaattggtgtgaagtccataaaaggcactcatgaagtatagtaatagagatagttaatgttatcttaagagaaaataagtgaggtgtcgtcagctctgctaactgctaagccggttgtttaataataggatattgatgaagaagaaggaatacgatgttttgtaccaaagtttttcggatcgtccgagaatcttatcctactgacatttcagcatcatatgttattttttttgtttgttgtttttatatatcttgttcgatctttttagtgcgtcttatcgtcgccttttcgctttcattatcatttgattagatgactactattcacttatttgccaggcagatttgttaatattttaaccaattagggtctttgatcattcgtctttgattggatacatacgagtctggataaagagcaattcattttgatgttttcttaattgagaacgaaacacaatattaactcaccattaactaatactatattatatgagtttaaaaattaacacttgctcaatttcaaaaacaatagttttctgattaacaatgcatcatttcaattcgacttctcatcttgtaattataaactttgaactgaagttatgatcaattatttagtggtactaaatcgtatattcaataggaacttaaattgtaaacatgtgaaaacagtcagacacttaaaaaaatggaggtggggtttcatccaagacttaaccatcattctttcatatttggtctatcatgttttgcttttttatattactcaatttaataaatcgatatcgagtacccaagaaatcgaaataaagaaatgggtttaagtaaaccggtgaacaatattaatatgaggaaagaaaaaggacaaaagagagatctatcatattgatttcattatttttcagcgactttatgattattatttttatgaagaatattggggcaaaggctagtagtacgtagacgtagtgtgaaatatctttctggtctgaaagagttatacagacgtatctaacttggcagatattttttggttttcattcagttctctctcccctcaatgataaatatcattaatttattttatttgttctaccaaaagaagatatttttgttatatacgcccaccgaaaaatgaagaagaagaagatatttttggcttttgtaaggtcaaagcaaacagatttatcaattattattattattatctgagactgagagagagagagagagggagattttctgaattctgattcgtcgaaaagcatcaaaaaagtgaacgcttgagaatccattatggcacaaactagccacttggtaacttccacgtcgcgagtagattatcttcaatactcgcatgcgcgtgagtaaaaaacatacaacctttttttcttttctttctaatagtaatatctttaagaaatatccataaaaattttattgctttcactataaatacgagagggacccacaataccctacacgaacttttttgcactttttcgtctttttaattaataaaaaaaagaaagagaaggaaggaaattaggcacttttgataaatcagattatgtcagaagcgcctacatgtccctttgcggacacacccacccattgtctatccattcatttttttttttcatttcttcctccagagagagagagagaagccacaacaagaagaagaagaagaagaagaagaagaagaagttctggaatagtcatcatcttctctgtttctaggctttgtttatttgtctctaaagtttctggattcaacttctgaagaagatagtagtagtccacaagaaggatcttctttacgtgagttgtttgtttctcttctccctctgtcttttcttttctgattttaataatcccaagtgtgttcttattttcttgctatctgttgtataattggtgttagtgattgattattcattgtatatcgatgaagggttggttttgatttttgttgaattggatcttttgatttggggttttaaaacttgttcggatgatgatgattgggattgatccaaaagttttcgttatttattggaaattcagattttttcgattcagttccatttgaactagtaagtcaaacaaaatctctagatttactgatctggggtttatactttgaagcttgagttgttgttgttttattaatttatttcgattttcagtaatatccatttgtaggttttggtctctgactcttgtttataataaaagctctgtattgagtaaaatctcatgaaagtaggtttcctttcccttttttatccttctcctttggttattaatctcctacaacctttttttagaaattactacctatattcagaaagattccatctatttcttcttcaaggcttgcttttttgaaccaaaagtctctctctttttcatctaataatttgtttacttttttggacagcagaaagttgatttggtcagagccaaggaagatgggttacatgtgtgacttctgtggtgaacaaagatctatggtgtactgtcgatccgatgcagcttgtttgtgtctctcctgtgaccggagtgttcattccgctaatgcattgtccaaacgacattctcggacacttgtctgcgagagatgcaatgctcagcctgctactgtcaggtgtgttgaagaaagggtttcactctgtcaaaactgtgactggtctggccacaacaacagcaacaacaacaattcttcgtcttcttctacttcgccgcagcagcataagaggcaaaccataagttgctattcgggttgcccttccagctcagaactcgcttccatttggtctttctgtttggacttagctggacaatctatttgtgaacaagaactgggtatgatgaatatagacgatgatggtcctaccgacaagaaaacttgtaatgaggataagaaagatgtcttggttggatcctcttcaattcctgaaaccagttctgtaccacaaggaaaatcatcttctgctaaggtaactttttttctcaatatgttattacttttgcatccatggatatacatatctatcatttctttactaaattcagagttgttgtttgttttggtttaaaggatgttggaatgtgtgaagatgacttctacgggaaccttggtatggatgaagttgacatggcacttgagaactatgaagaactctttggtaccgcctttaacccctctgaagagctattcgggcatggtggaatcgatagccttttccataagcaccaaacagctccagaggtttttatccattaccctttcttcttagatttatcaaattggatgcatctctgtgtgattctaataatgctctcttgtttttgctcaatccagggagggaattcggtgcagccagcaggcagtaatgattcgttcatgagttcgaaaactgagccaataatttgcttcgcatcgaagccagcacattcgaacatatccttctctggagtcactggagaaagtagtgctggagatttccaagaatgtggtgcatcatcttccatacagctctcgggggagccaccatggtatcctccaacattacaggataacaatgcctgctcacattcagtaacccgtaataacgcagttatgcgttacaaggagaagaagaaggctcgcaagtaagtagtagtctgaaactgcaaatacatgagcatcattgaagtgagtgcaggattttcctaatgtgactctggcttcttttttctggaaacaggtttgataagagagtgaggtatgcttcccgcaaagcaagagctgatgtgagacggcgtgtaaaggggcgatttgtcaaagctggtgaagcttatgattacgaccctctcaccccaaccagaagttattgaagactccttttgaaaggtacatagatatatatacatggcgaagaatcgaacaagaaaggttttgacttatgggcagtttcaagtgagcaacttggaaaattgtgggttagtaacaaaacaagactactgtagcatgaacagatttcaagactgactcttgtaagcaatcattcattcttgggattcaatcgttttttttggcctcagaagcttcattcttgaccagagggattattctctgactttccttgtccaaactccggtttcttcttcttcttcttcaggcgtctcacactgatcagggttccatgaattttgttcttctcttggtagttaaaaaggcagggaaggagatttagagtaatttaaacaatatgtgattgttgtatatgcctttgtatttgtttgtatactcataaatgtttttctgttttgtactcggcattcttgtaaattaaagacattatccacattcttctatagacaaagaaagttatgtggtaccacttaacctaagtctcgttctgtaacaaccgactagtactagttcaagtttaacgagattttggtttgtagtaacttcaagaggttgatccaacaatgaggcaatgcaaaacatctgaactttattatttaaatgtcagattataaaggggagtccatttatgtgagtttaggcgctttatcgctgtttacttaaacttagcttctactatgtcaattttgaacacttatcaaaagtgattgagatgcaaaacagtagttttcaagatgacatatggaccaaaagtttttaacatttatatttggagtatttcggattttacaacttaatgtgaattttcttgaagactcatattcacaagccttaattttcgaattgaggaataaacattcagagaaagttgattcgcgagcaagaaatttgtccaatttgattgctgactcggatttgaaaacattgaccaaaggctaagaaaagaaggaagagaggaagagtcttcagatacagactcaggtagcaaagttcttgtcttagctcagaaacttaaaaagagagctaaaaaagacctcttaaaagctaagaaagaaaaaaatttgctaaatcaaaagaaaaaaaaaaagatatagaaaacaccaaaacactggtttcatacaatacctttccctacccttatgatcattctctctgtaaatctccttcatgcttaagccttcaacttcatagcttcatctctttggtaatttgttagatggcacacacacacacacgcaagtcaacaaaaacccgcacccatatatctttcctgatttctctggaatttgaaacttgttgaatcttcaaaatctttttctcctttatacttcctgtttcagtaattacttggccaattcatctgtgtttgctgaggctgttggaaaacgttaggcgcaggtgcaaccatttcagctccagccacaccttgagactgttgtaaaagcggatgatggactcctgttgctgttactgcttgtcccggatggtacatacctgggaatgcgacgtgaccagcttgtgctggagcataagtcacgtgttgcccatggtgctgtaaaccatagaaagagcttggcacatctcgtcctggtccagtaatccatacaggtaatgcttcactctgcagagaccccacaattataaattaatcaggaaagggaactaaactttcaactgagttggttttgggagggagagggaatatgtacctgttgccctgttgtactgtagccgttgttttctttcaactgcaatgagttgagatcctcattggaagtcgaattcccggccgatgcagcagaggtgggattatatcctgctgggaaagacccatatgttggtccatacccaccagtaataccgacatgagtcatgtttcctgtattagtcccaggcttgtaatgagggagtgtgtatttgcctcctgttgcagttccaggaggtggaggatatacaccgcttgcctgaggttgctgagcatatgcaccattgcttaagtattggtgcattgtagggggaggtaaatagaatggggagaagtatccatatggcacgtagtttggtggataatgcgacatatgtaagcccggagggcggaaaacaggaacaggctgctgcgtgacaggtatagagctctgcattagtccagcagcttgagttaccagtggtggtggactagcagtagacaggaccaagttatttccaccctacaaatcaacatgttcaagcatttcagaccagaaaagtaataataacagctatatttttatctttcaaacgtgttatagggcttctgaacatataaatatgcagtccaattagaaaccataggtttacttcaattttatcaagaagaaaaaatgagacttagatccaagtagctgacatgaaaatttgactatttgattgatgatgctactgttggaagattgaattaaacgaaaaagtctcaaaaccatcttaaattagatcaaaatcgtgaaggtgtgaattataaaataaaataaaaggttaacccccaaaaactacactaacctcttgcatggtttgagatgaatgcggaggcaatactgtaatcccattaaatttggaggcaacccctggggaaacgaagggagaaacacggccatcactgtcaggacctgagcggtagaactgagcatagtagctcgccgtatcaaaaggttgttggcccttcaaacaacaaaagtatagttcattacgaagacatattagaggtgacaatgcctaaaaattatataatgagcaaaatgttactgatcaatgaagagtataagctaagtataattaatggtttaagtagatcaaccattcgaaaacttgacaacttaatgtaattaagggcataccataaaactgggaagacgaagggcatcacgtgcttgagggtcagaagtctcaaattgtggatgctggttcccaggagctggaggaacaatcccaataatattacttggaacctggtcaaacgagttttgattgctttcggactccaacatattctcctgcttggtgacatcatactctggagctgtatttgttgcagtattaccttcaccagccatattatctggaacttgtgaaggtgactcggagtaaacattaccgtcctcttctttttcaatcgaatggacagttgggtgcctgaatgcataaaaaaagtttcgcttagggactggtcatataaatatagttatatttcaagacataaagttcaataactagaagtgaaaaaatttgggtttcgtgttcggataagtgttcataatgtaaaggttatcatgacttccagaaaatcagtgactgcacaaaatgttttactttctgtttggaacttaagagccaagcaggacaaagagttgtttctatgaacaaaacccacttaactattgacactatcagttcaactgacaccctacacagcatgacaaaaagatatatattttgttgacctagaacctgatatacaccgtagtgctttggaagtttcggctatgctactaagcaaaacaagcgactacactaggaaatttctcttacctatttccatcagtaatctattattcacaacttctttctagctcatttcactctaaatttagagtatttattcgcataacaacatcaacaataattgacaaagtagagaaaggtagatacctaaattcctcctctgcaaaactttcttcaacttcctgcgaattatgagaaagaggtgcagatctcttttcactctgaggaaaggctactgtgctagacgtaatagaaaagtcagcatcaaagcttccaaagcttaacttggttcgttcagcctctggaacaagaatatggtttggaataataacatgctgacgttgaatctgcaagtcttcaagctgtctctgcaatctggatgtggcttctgccgaaggggtagcatcttcaactgatttgtcactggcttcagtaggaactgcaagagtttcacctgtagatgatgcaccagagccctgggtagtgttatggttcactactggcttcggtttccattccttaatggaaccagcacctagaaacaagtatcattgacataaagatgtcagaagattccagtcttgtgcaaataaaaaaacaaaagaaatacaataatgaagaactgcagcagacaaaaagtgtttcctgtaaaagcaagtcccgctgtatgcacattttatcatctggaatatgtactatatgtttcttatcacagatagtagaaatccagtacagcaaaaataaatgtatcactgttacctctttgaggaccgacagtctgatgtgaccgattactgtagttagaagaaggccgactacccgtgctgttgctatgagatgaagcaggccttgaaccataagtatcattcacggcagtcttcccaaccccacgggatctggtatgggacttgctttctccaatgtgctgttcaggtgctgtttgctctgatttgggatttgaagatgtgaatcgaacttcagaagaggatggacgagggagtggcagagaatcaactgccttctgctcagtatgcacaaccctagagccaactgctacacgatttttgcttaattccacagaagacggtgcaccatcaatgttgtttgagggcactgaagatcggccagctttaagttgacctgaaccagctggtaggttggaagactggcgaacatcagagcttcctgatttcggaccaacagtacttttatccatcacagcagaatggctgtaaaccaaaaaacacaaaacaaaaatcatgagaaggatcatctatagagtatatccatgctggaaaaaggcccacccatctttaactgagggtgttatacatccacctataagtcacatagaatcaaggagaatgatacataaaaggaattagtactataggatgacaatcaccttgagaccagagctatatctttcgtttttatctcttgagaggttgaagttgatggatcaataacctgctttggaccgttttcttttttgaaagaattctttgcaccagcaacatctgatcagaagtaaacattcaccacacagttcatcaattacagaaaaattaaaaagcaacatgttacagactgccgctagggaactttctctttcacattctttcgctaaacatactaaaagccaatcatgaacacaactagtatgtcctaggaggaaaatcaggaaagaatcaatactgagtaaatataacaaaaagtattgtgaccgcaagtaaccaccttccagagacaactaatgtggcatattaagagatgcgagttcatatgattgtaaaacattgagttcatcagattgttatttaccatttgatgcatgacgagaagagaaattcatccgaccacccctgctaccacggccccctccaccagatctccattgtgattcagcagaatccttgttgttgatgttctgtaccatttcaataacattgtcaatacccatgtcccaaatatatgcggtttaatagacatcctttacacagaaacccatgaagagaccaaaagaactgcaaaaaccccatacctctttcctcttatcacgcttttttttaacctcatggaatggatctgcagagtcataaacaattttttgcattagcacataagattgtatagaaaaacacaacaaaaaaaaacttaaaacatatcctagcaaccatctctaaattacatggtacacaagcaggttacatgaagcactcgaaaagcctgatgcaataccacatctccaaagaatcctattttcataacaatttgttttggtaagatgatgaaaatgtggatttctaagcactagattcatctacaacgcagcagtctttgtttagaactcatacctagcaaaagtattattcctagacaaaccactcagaaaaattctagttagaagctaattctctttgtttcacacatcactagtgtaagtaattgattcccgtatattccaaatcaattcgtgaacctttttttgtgaaaaggaggttacaacacaatatcacataaacaactagagacagcttaaaacttaataggcgaagaaaccgatgatagtgaattcagataaaatctgaaaaaaaaaaatcaaagagcagagaaatcagatgctaaaacctaagttacaggagaaaaccccaaatcgaaaaatacaatctcgatccaatcaaagaagagaaattaggtaaagaaaaaagtgcagagaaggtcgagattataccctgaagaagtaagcgttgagcggtctcatcaggatccatgttacattcatgaagcattgcgataatctcatcctcgctatagttcccagcagtggtctccttaatgttctgaatcatcttccgagtagtagccgaaatcgaaaccctagcgccactgccgaccatcctctcttctatcaaacgtaaaatctcgcttctgatattttaacaggaatcgaaatctggacctagaccaaaagaggtctgagtacctatatatgtatacgaagaggcgagtgataaatcagtacgagaggatgggatttgaaactagtttgggtcgacgaaggagaagaagaaagaagaaggaacaagaaaaaaaaaaaaaaaagaggaagggggcgagagaaaggaatgagcaaaataatacgcactgtgattttggaagcgtagggctctcttttcttttttcaattttgttttgcattcctttgtagctttttaatattgagtttttttgtttgttttaatctgaatctttggtaaataatgataaccaaattgttgtcacaatctttttttgtccacaaatatatttaaattaggatttaggatatcttctgaatatttacactacataataatgacaaacataaaacatagtatttaagaaaataagaagaagataagttttgattgtaacttgatcatattaaatctcaactatctcaaacgatgttacccatatcattatgagatgagcgatttaatgattagcatattattatttatatttttacatctcagtaacgtattattgttttctatgtaaatatttaaattatcaaataattataatacgttattattatccccaccatgataattacatatatatttaatttactgaataagtttattttttttgtctttggtaatttcttttacaataccaaattaaaatattttaaaaattggatttcaaaaacataatgagttatatggttgtccaaatatttaccaggtccagtacgcttttagcattattaatagcaattagcaactctagggattgtcatttacataaacaaatcttcaattttttcattaattttcctgtgttttgggtccctattgcttctaaattctaataaaccgtccagatattgctgttatggaaacaatttttcaataaatctcatcaactgattctatcaaaatctaatcactaggctttttcccattagcattagcgcataacaaagttttgaatattaatatcattatccataggcagcttagattttttttccttagcatcaaattaaactcaaaaccgaaccaaaccgtaaatccacaaactaattttggttcgaatttaaaaacattatcttttaattttgtcatgccccctctgctaagtgcaaccattcgtcttctcgcttcatcgttttctcttttccgatggcaaaagcttgcctcttgcagtctactctactcccagcttactctccacttcacaaacttcgtaatcaaaacatcaccctctctttctcaccgcttccgctgtcccgatgccgtcccggaatccactgctcagtttcggccggtgagactacaatacaatccatggaggaagctccgaagatatcatggggatgcgagattgattcacttgagaacgctacttctcttcagaactggctctctgattcaggtctccctccgcagaaaatggctattgatagagtcgacatcggtgagcgaggcctcgtcgcttcacagaatctcagaaaaggagagaaattgctcttcgttcctccttctctcgtcatcagtgctgattccgtaagttcacactcctaatttcactcggaatcaaagaatctaatcttatattccttgatctcacttgcaagcaatccctcacctcttgttcagatcaatgcaaggttaaagtatctggctttcatgaatgtgaatatctaatatcggagattgggttttaggaatggaccaacgcagaagctggtgaagtgatgaaacgttatgatgttccagattggcctttgctcgccacttatcttataagtgaagcaagtcttcagaaaagctcaagatggtttaactatatctcagctcttccccgacaaccttactcgcttttatactggtaagttttgtacttgtttctgtagctgaactttggtctcagtttcttactccctacagcctttttgtactatttcaggactcggacagagcttgatatgtacttggaagcttctcagattcgagaacgggcaattgaaagaatcaccaatgttgttggaacgtgagatattgttctttctttctttctttctctcaactgctggaaatcattgatgcagtcactagtacttattgtttgtaggctagggggttgatgattatgtcttgcaagacactgctcatgtctttttcctttttcttttcctcagttatgaagatctaagaagcaggatattttccaaacaccctcaacttttccctaaagaggtaactggtatacgcccattttgctacagcttactatttggacatgtaataagatgcacttctgtaattacaactagtgttggttctattttattatctgagcttaaatttgttttgtccacatgtatatgagtgtgctatttcttggttgcaggttttcaatgatgagacatttaagtggtcttttggaatcctattctcacggttggtaagaactactgtatcataagcaatcattatcttgataattgatgtaaatctagatgtcttgaatttgaaacaacagacttgttctttaatcttagcatgactttctgcataatatagctgtctccaacaatttattgtttgaacaatgaccactcacaaccaaaatattgcattatttcgtttctctttccttccgtgtgctgcgtgcttgtctctgcaattcagacttaagcttctctaacacaggtgcggttgccttctatggatggaagatttgccttagttccatgggcagatatgcttaatcataattgtgaggtacttctacttatctttatgaccaattagctcctagattctcctaatcagaaagcatgattgacttatggtaatcaatatttcaaaatctgcttggaaaggttgagacgttcctggattatgataaatcttcaaaaggagttgtctttacaacagatcgaccatatcaaccaggtgagcaggtaaataagataaattcattcagataacctgagcgagcattgaagtttaatataagtcagtgtataacacaaagaagtcccgtttacacagtttgccttttagcgcttcagtaagtcagtccaaagtggaaccaatgttgtctgaagtctctgatatgtttcagtaacatgacattgtgcaggttttcatatcctatgggaataaatctaacggagagctattgttatcttatgggtttgttcccagagaaggaaccaatcctagtgattcagtagaactagcattatcacttaggaaaaacgataagtgttacgaggaaaagctggatgctttaaagaaacacggattatcgacgtattccattctccaccatccatgttcccctctcaaatttgtagatctctcttgattaacttgagttttgttttgattgtttgtgttaacttttctctggcagacctcaatgctttcccgtaaggataacgggttggccaatggagctaatggcatatgcttatcttgtggtgagccctccagatatgagaaacaactttgaagaggtttggcaactccatcttgaccctttttaccatccaattcttcccaaattcataatacatctcttatcaattattatccatttcagatggcgaaagctgcttcaaataagacatcaacaaagaatgatctaaaatatcctgaaatcgaggaagacgcattgcagttcatactggactcatgcgaaacaagcatatcaaagtacagccgatttctaaaggtaagtaacaaaacagctcatctctctctctttgtgggaaaattttcactccatctgcttatagtttgctttgtcaattatctaattgtaggaaagtggatcaatggatttggacataacatctccaaaacagttgaaccgaaaagcgtttctgaaacagctagctgtagacttgtccactagtgagcgcaggatactgtaccgtgctcaatacgtaaggaacaactttctagccaatacgatagataagagtctgtggatcgatccatgatattgtggaatctgtgtttttttttttgttttgtttgggtcagattctgaggaggagactgagagatatcagaagtggtgagctgaaggctctacggctcttcagtggacttaggaacttcttcaagtgaatgttgaatgaggacatttcaacagctttaagatggatcaaaggtaggcctcgttgtgcttcaaccaaaaatgtagttttttattacaaaaaaattgaacgttggtgtaggcatggttggatctgtctcactcgtataggaatatattggtccagccatatatgtaatttgatcattttctataaactcaaaacctgaacctaaattgattaattaaggaaacgcatgagagagtaagggtagaaacatgttcttcgtatttgatccgaatcgaactgaaataatcgatccaacaaacaaagataatttgaaaattaagaatatatctgactacaactcataacgaaaaccgtaccaaaactcacactccttgttaccgcaaacaagataatctgatggtacacgtcagaacatttgtttctttagcaaagcaagtaaacattccactgtggcaaagtaaaaaacgagaaacctataaagtcttcctaatgaaacgtactgattttatggagtttccattttcgacataatatgacgtggcaatatctaaatggtttaaagatgttttatctccaatgatataacgccacgtaagcccgctgaccaaataacccaaagagtaagcaagcgacgtcgtttatagtttgatgatcttgtcgggtaacgaaactgccccttgagtcaaaacaggcttcttcgtgtccgattctgaacgagctcgctctttctcatccaattctctccaccgtcttctactccgatcaatcttcaaattttcttaacactcatcgaccagatcgagtttccatcgatctaatcaatcaatcatcagatttgatcttctcaagaaggtaaatccctctcactctctgtgtcaaacctaatcacctcgtaggaatcgaaattggaacaattcaatttggtttggtttggaatctctagtcgattcttcttctaaacgattgaattgcgttttgtgctttgatataattcgaaattattgtggcagatgagcttgaagggtacgatcgtattactagggctcttatggagcttccaggctacgttagggattagattcgtgatagaccgtgaagaatgtttctcccacaaggctgaatatgaaggtgatacgcttcatgtctctttcgtcgtcatcaagtctgactctcaatggcattttaacgaggatggtgtagatcttgtggtatgactttttttcttctaattgaacttttctacattctacattgcaaaatcgtcgaaaatcaatagaattggtattcctaaacaatgcttaggatttccattgttaatgttggtagataatttgaagtatgtattgataaagaatttggttactctttaaagctgttatattgtaccatctggttaatttggtggttgttgttgttgttgatatattttggatgcattttgaatagatacatggcccaacaggcgaacaaattcatgacttcagggagcagataagcgcaaagcatgattttgttgtccaaaaaaaaggggtttacagattctgtttcacaaacaagtctccttatcatgaaaccattgacttcgatgtacagcttggtcactttgcatactacgatcaacacgcaaaggacggtaaggattatctgtttagttttgtttcagtttcgtttggtgatgaggtatttagctgaagatggtttttgtgcagagcatttcactcccttgatggagcaaatatcaaagttagaggaggctctttacaacatccaatttgaacaacattggttagaagctcagaccgatcgtcaagctatcggtaacattttttcctctaaaaaccacatttgttgttctcacttcaatattgagtgatggtttgaatatggttgttccttgtgcagtgaacgagaacatgagcaaaagagcagtacacaaagctttgttcgagtcgtttgcactgattggggcaagttttctccaagtttatcttctgcgtcgcttgtttgaacgcaaactcggcatgtctcgtgtctaaaagtatcgagtttattatgactttgaacttattttgccttaaaatgtaccagggaatctttacttaaaacctttttacagacagatcgtagttcattggaagatttgctttctcccatgttcaagaactaatcctctcgtgatgataattcttttttttctctttattaacagacaacttttccacaagctaggttttcatttcaatagagaaaatagtgattccttaaaaccttttttccctaaaacaaagagaataacaatgtgatcaagctttgaataagacgtgtcaaaagtactcaaaatcccttaactggattcgaactcttatagagaaggttataaaagtggacactagactaagttagttgggcccagagtagatagataaagccagctatcattttcttagtcgtcgtacaagttacctgaaaataaaataaaaacacaaactttcctgaaaaagtcgtctccagttttaagcattgataaatccgacaagaagtccgattttgttccatagcttgcttgtgtttttagtggattgagtcactgaaagagaaatcataaggctttgttgatgatggatcatttggtggagacgaattcagttccgagcagattggtggaagaaaggcttgatgagattcgtagagtaatgggtaaagctgatgacgacccgttaaggatcgttggtgtaggagctggtgcttggggaagcgttttcattgcaatgttgcaggaaaattacggtaagtttaggggcaaagttagtgtgagaatctggagaagaggaggcagagcaatcgataaagccacagctgaacatttgttcgaagtgattaattcgagggaagaattgttgaggaggttgataagaaggtgtgcttatctcaagtatgtggaagctagattaggggatagggttttatatgctgatgagatattgaaagatgggttttgcttgaatatgattgagactcctttgtgtcctttgaaagttgtgactaatcttcaagaagctgtttgggatgctgatattgtcatcaatggtttaccatcaactgagacgtttcaggtgttcaatgagattagtaagtattggaaagagagggttaatgctcctgttattatctctttggctaaaggtgtggaagcagagtttgagcctcatcctcggattgttactcctacgcaaatgatccatcgagcgagtaaattcacttcccattgtcttttatctgattgctagatgaatatttgatatcatcttccttagtatttttgttgatgtagagaaactttctatttttattaaggttatatgagtattgactgtgttggcgttgaagtgtatgatcagtagttgttgtcattggaaattctacagtttgcttgtcatattctctttgcagctggtattcctcttgagaacattctctaccttgggggacctaatattgcttccgaggtatacaataaagagtacgccaatgcacggatttgcgggtctgaaaaatggaggaagcctttgggaaagtttctaaggcagtctcatttcatagtctgggataatagtgacctcattactcatgaagtaatgggtggcttgaagaatgtttatgccattggtgcaggtaagatcaggtgtcttaaatggttatctgaataatagtgattcaaagtaaattactggaactggtgatcagaggtcaaagtttatgagctagtgtttgttttggcgtttttgtattccacaggaatggtggctacactgactaaggaaagtgctaccagcaaatcagtgtactttgcgcattgtacttcagagatgatttttattactcatttattggccaaggagccagagaaactcgctgggcctttgcttgcggatacctatgtaacattactgaaaggtcgtaatgcgtggtacggccagaaacttgcaaaaggagaacttagccttgaaatgggtgacagcatcaaaggcaagggaatgattcaggtactccatatatctcaatgacttcggttttaagtgttaaattagccttaaattatgtatgtttgatattgagaatttgtcgaatttgtaactttcatctgagtcgaaatagcaagtgtccataccagcaaaattactaagaactttgttctgtataatgtaaatttatgttcacaaaatccagtttatagcataaaacagtaaagagtattgcacatttcaaagaaactaaagaattttggagattgaatctaaacgccactgagaaaatacaaaattctgtcatacactgttgttatcttgtggtcctagattatttatatgaaaggctaatgatgaagtgctttggatgatgtaatgttcatagggggtttctgcggtgaaagcatttttcgagttgttgaaccaatcctcgttaagtcttcaacaccctgaagagggcaagcctgtaactccggctgaactttgtcccatcttaaagatgctctacagaattcttataacaaggtactctcatctctttactgggtaaataacatatcaacttggacctcattcataaacatgattcacaccttgatgatgtttttagagagttctcgtgtgaggcgattcttgaggcgctgagagatgaaacgatgaatgacccacgtgaactcatcgagattgctcacagccatctcttcttccagccatggcttcttggtcagaaaccttgagcactttcttctgtataagttcccctgctaggctttggtgcagacttgtttgtattttgaagatttatcagaaatacgcagagtagataagagttgtatacaatttatagttggagaataaaagttgtgtactttatagtgaaactcagtctcatattatatctttgactttcctttccttagaaacagtttttatacaatttataaatattgtgtatgggagctaaagatacatgctatacctatacatcacaaattctatatctgatatttggagctttaaaagaataaactatccaccagaccaccagtcatcatcatatcatcttctcaaatttatcaagcttatttaccctttgcatagacctcagtaccaataacatgaatatccctgcacacaaaagaatatttatgaagcttatgtatccttgtcatagacctgaaatatacctgcatatacatctacatgcacgtgtgtacaacagctttgatacctgctccaatgaaggatccattggcaacaagctgacttccttggttgctaaatgtaaccccaatattaagtagagttcctccaagaactgtatacatcgtcgccatctgcagtattgtcgctttccgggctgctctttccgactgaaccaatacgaacaaacaaaatccacaatgggtatctattgctttacaaaaccatgacaaagcttatttactttaataccagttctgtcagggtgattagaccatgaaaaaactgctttacctcaagaacccgaacacggagtttcagatcgcctgaatcgagttctttcacaaactcttctattcgctgcactcgatatggcatagacagagtagaagacctggcctgtacaggttttaaagttgaatttagtacaaatagaaagaaaagaagaaaaaacagagaaatgaaataaaatacgagggaaaacattacatcatcagcctgctttcttatttcttggacaagctgagttcccgagcgttgcctttgttttagatccaggagttcctgtttttgttgatattcatgagaattgacacaatgataaaaaaagagtagactggcgattgcaaaatatttgggtttcgagaagagaaaagaggtaagaacctgcgcataaggagccgcaaccttcacaaaggaaaattctggatcaaggatgtaaccaatacctgcaaaatcaaaagcataactgatgagacttgtggaatattattacaaaaagaagataaaagaacagattgaataggcaccctcaagtgtggaaaatgctcggatgacaaaggtgaaagttgatgggaaacggaatggctgatcctgggaaattgcaaacagatcctgccatagaaaggaggaattttttaatgtaagaaccacatagagatagagctcagcttctttttcaggtacagttttgatcggtacctctccaatagctgccaaagtctgttgctgatctggtgattggcttaataggttgtccaagaaaaactgaacagatctccttacctaaaacaaacacgtataaagttgcaatgagattacatatgtaaacttcgcataaataaagagtgagactgtaaggttaccgatgaaagatctccagtgggttgaagtgcttcaaggtctataaggttttgcatgacctgtaaaaacattgagttagttttcttattttcagattgagaattaacccttgcaagaaaaaattaccttttttgcatctttttcataaacagaatagaagagatcaagtaatctcttccgagtaaatgttttgatctctcccatcatgccgaagtcatagtagatgattgattcatctacatcaattgcaaggtttcctgggtgcggatccgcatgaaagaagccggttttgagtatctaaaacagccaaaacatgaacataagtttgaaccataagaaaaaaaagaagacatggacttcaagaactgttttgctatcttgttattgacctgtataagataagcttcaatggcccgtgatgcgattctagaacggttaaaaccccgtgcagctaaggcgtccaagttgttgatcttaacacctaatcacagaaatcaatgagtgtttataccgctacatactttatcaaacgacaccaatatattgggtagtttcaacacgaacctggtacatactccaaagtcaagaccttcatggcagagtaatcccaataaaccaactacaatgaaaacgagataaccagaatgagtttcatctatcccacaactatacaagaacttatctcatgggggttttggtttagcaagttaaacttacaggtacgcggacccagtttatattccggaagtctctccggaatctgtcagcgttcttagcttcgtttatgtagtcaatctcttgatacaaaattctgaaaccaaaggaaatatcagtcctacatagcctggagccacaagttataactacgtcttgggaaaactacttacaaggcacattcttcatagataccaacccaatcgtttgtaccaaatgattcacttttctggaaatactcggcaatcagcttcagatttcctgataaaataaattacgccattttcagcaattctcaaacatccatgcaggtattctattatataactcagaagttgttactacatacgtagatcaatatcgaaaagtttctttagtccgggtctttgtacttttactaccactttctcgccattgtgcaaaacagctctgtgtacctaagggaatacaatttgaaaaattatgatacaaacatcaatatctagatgaattgcaaagaaaacgataagcgagtaggcgttcttgagggtgttgctaagtattagatacctgaccaaggctagctgcagctatgggttgctcttcaaattctttatacattacactaataggagccccaagttcagcctcaatgaagcgctttgctttctctggagaaaaagcggggactctgtcctgaaaaccagtttaagagaacagtaagaaaccaaatgcataatttcaaaagtatgaataaagaaatagcaaagtacctgcaacttggaaagctcatccacgaattcgcgcggaaacaagtctgacctagttgaagacaactgtcccagtttgataaacgttggaccaagctgcaatacactctctctcaaccatgaagctgtttctcttcttctgcttttctgattatataacaacaggtgaaattaataagaatcaggaccaacaaaacatcaaccaatgaatcatttaaattagactaaaatgatgaaaggtttacctgtttttcttctgtgaatcctccaacataagcccatttcgaattatcgaacaagatacgaatcctcagggaaataacaaatgaccaaacatcaatactgcgttgaagtgagctataattctcatcagcccagctaaaaccttcatcagaaggaagaaccctaactccttcaaccggtggaggaaggtacgattctgttgttttctttggtgccttaaccaaagttgacgccgcaccattaatgtttctactactaaccaaactcgctccattaacacctttcccagccgatccattcacaccatctttcctcttcaccacctcactcgcaggaaccattttgactgaacgtccattgattccaaccttagagggcaattccgactgtctcatctcaatacgaaatctcttagacttgctgccataacactgagtggcttccccagtgaaatgattctccaaagagctactgaaaccaatagctttggtgactcttgcggtctcaccgccatagcagcagctctgagaagctaataaagccgccatttccacctaatttacaagaaaccaattgaatagacacaatcaaacaacaaaattcaataagctggattcataaaactggaatgcattggagaaaattatgcggcaagcatcatttgtataatctaaagttctaaactataaaagtatgaccaacacaaaatttctagtgatagaactccattaaatcatacttgagcctattcaaaaccatcgagttcaacgacacctctaaattattgatttgataagagaatcacaacgattctcagccatgaaaaagatataaataatcagcgaacattaacacgtactatagcaagaggaacccaattttactacaacccaaacctgttctgaacctgggatacccaaaagtaattaagaaaaacaaaacaaaaaacagagtagaaattaagaaaaatggaacctttatcaaagtcctgaattgggttgactggtgagacaaagatcaacccagacccagaaatttcgtagcaggaatctgtagaatcagctgtattaagtagaggaatttcttggaacagagtcgagagagagagaggtaagaggactaagttgcgtaatggtgtcgtccttatgactaatgagacgtgtgttgttccaccgaattttccaccttcctaccaaaatcaatattgagactttgtgcgtaaataggaaaaaaattggatttgataggacagggaaaataatctttgtaacttttagtgccaaaattaagacaataagagttttggaagatgcgtgtccagcttctacatctcacgtttattgtgtggacagttcgaaagagagtgttgagcatcttttctaacaataaaattaaaaggatataattgctcgttagtaatccacttaaaggggtttaaccaatttaaacggtaaacttttttaagagcaagcaaaacaacaatggttcatttcaaaaaggaaaatgacaaaactacatattaacatatgaacaaaacttgtgacgcttcaccacatagtttggcttctacatgatcggatcataggcagctccaaaaccgaagttccacccacccagactactattggaagtcattactctatcacaaaaccattcgtctagtttcttcttcccaagtatgaaatgttgcatttgcgagttcggctgaaaacgaatatttcttgctcttcagtagcgcctcctgagcaagtaatgacttccattcaccgctcaactctttcctttccttggctctaaggctcctcaacttctgtaacatctgcttctgtgcatagttgcttaaatgctgaaacagtgtcgtctcaagcgcatcctgtaaagcgcacagctcatcagcagcaccatcttcctccttctccttctcattagcctcattctccatatgtttgtcaacattttcagaaggtaatttgtcatcataagagtcgcctttttttgcaaatccatcaccatttccaggttcactgtttgtcactgcttcaactacctccctatccttcccaccagtctcattctccatagttttgtcaacattttcagaaggcaatttgtcattgctcccatcaacacatcaagatttatctttgccccatatcgccatggacaagtcaaaagcttcagaatcttgggggttactaaagctaggcagcaggatgaatcattatgttggaccgttagtcttcttttttttgctttcataaacttgtaaaaaataaataacctcttgtcaacaaatttcatttacatactccaagcccgtgggccaaaaggatcgtacggagccattttttgttggtccaagactccaagcgaagaagactatggacttcttgtattattagccaaaattaaaatttgaagttaggtaacaaatttatggatttaggaaaatacgtttataattgtattttcttatttagacattgcaaatcccatgccgttttcttttgttgttttgtcaatttcatgccgtatgattaaagtttacaatgcattttgtataagacaaatgctttttgataaaagaatattaaggtacaaaaaaagaaaaggaaggtaaaaagattcctttttccctctctttgggccttaaatagagacagagaccgaaagaaagaggagaaacctcacacaaaattggtcctaaacgagtctccttcagtcgtaatttgcagcagagcaacgatggcagcgactccaatggaaggcaaatgggttcaggtcagctttctcgcctttgtgtttctcttagagacgaatctcgtttcatcggatattacttgtctcatgttttcggatttttattgaatcgtacgagactttcggcttttgaaattctaatttcgttttggaatctgtttattattctctgtaaatctgtccaagttctctgttagattgctgatgtgattatacacttaggttcaataatcattttggttctacaacgaatctcctagtttatgctttctctgatcaattttggatttgtggatgatgagtttgtcatttattgaatggactatggattattcaccggcagagttgttcatatcatgttgattaacagtttactgatggaggagggtttaattttgtaatcatcatcacatataagtatttgaattatttatcttgtgtagacactattggattagtagactatgactttgtcattattcaattgactagtatttgtgaatgctgactcaactctttgtttctttctcattgatttctgctaatactttttgtaatgttgattataaaaacattgtaagatttagtatttgagtaatttatgttttgtgttatttgtcattcagcttaaacagaaaggaaccggaccaggagcaagaagctctcatgctatagctcttgtgggaaacaaaatgtatgcctttggtggcgagtttcaaccacgtgttcctgttgacaaccagctctacgttttcgacctcgaaactcagacatggtctatccaggaagcttctggggatgctcctcctcctagagtaggtgtagccatggctgcagtcggacccatcatctatttctttggtggccgggactcgactcaccaggagctcaacgagttatactgttttaacactttgaccaaccagtggaaactactctcttcaggggaaaccggtccacagaaccgaagctaccactctattactgcggattctcagaacgtgtatgtgtttggtggatgcggagttgatgggcgtctcaacgatctatgggcttacaatgtcgttgatcagaaatggattaagttcccatctccgggagaagcttgtagaggaagaggcggtccaggactcgaggtggttcaaggaaagatctgggtggtatatggattcgcaggagaagaagcagacgatgtccactgtttcgacatagctaaaggggaatggaaagaagttgagacaaaaggcgaaaaaccgtcagcaagaagtgtgttttcgactgcggttgttgggaaacagatactgatatctggaggagagattgacccgagcgatctggggcatatgggagcaggatgtttcacaggtgacgcttatgggcttgatacagagacgctggaatggaggaaatgggaggatggggttggatcggtggagcatcccggtcctagaggatggtgcgcgtttgcagctggatcacgagatggtaagcaaggtctgttggtttatggcgggaactcgccgagcaatgataggcttgatgatatcttcttcttcactcccaacactctactcaagtgattggtaactaagtatggtttggttttcttgccggtgagaggggctgtgtgaatgttcctttttttttagtttccttttggattggatgaactatgaagatgtgtgatgtgtttcattttcctctgttatttgtaattaaataatcgaaatttttcattaaagaagataacgaataacatcagcttaatggttattttagcaactaaaccataatagagatacacaactaaggatgagagcatcaatggaagctttgaattctatttattacccactcactctctgtctcattgagtcagtagttgataggtatttaattgcaagaatctctctatattggcaaaaacaaggtcaaataaaagtttgttttgcgaataccaaatccatcaaaagatacattggtttaccttgcaaaattattcaaaatatctcgttttggggaaaagatgttgcagtttgctactcacacgacacacaccaacctatatttaatactcactgaacaagtaacccaatgcatgctcttgtttcccacactcccacaaatcataaaatacaattatgttattatttcgtatatcgggttattatgttatttttaacttttatttagttatgcgatatttccttatttctaactcttaaggttggcgaaaaaggaaaaaaaaactcttaatatggtgagaaaatatgaaatatatgacgtggattttccttaggtctctttaactattttgtctgataacaataattggtttatagctttggcgtatagcctccttaagtgttatctcacgtctcttcatattctgcttctctcagaaatttccttaattattatagcaaaatttgatctgcatttaaaccctaatatttacgttatatcattaatttcttcttctttccgtttcttattttaggagaataatttgctcagtttagtgttcacaagcagagtcgctctaaacggtatgctcgattctgcgtcctttttttgctccttctatgttttatctttctagctttcatagttttttttttcctgcattatggtttcagcgacaacggattgatcgttttagggtttttacttccataattatttcctaattttttctatttttaatcaatttaatagagtgttgattgcgatgaagaagaaagccattgtgattgatgatggatatacaaggtttatggtgaatgaaatgtctgaaaaaatcgatgttccaattatctgtcttgacgaagatgatgatgatgatgatcttatggttgataaggagtacaacgtcttcttggatcatcttcgaagaggtgataagaaaagttcaagcactcgccttgaagttgacaatggagcatctgacattcgtagattaaagatcttttcttgtgattcaaagagatctaagcttgggaatgagaatccagtgaagaacagagttaatcaacagagcaagaggaaaactgttggagttgaggttgaaagagttaaaatccgagaaatcattcaaagagacaacagagttgctgaacgaagaaagcggaggatcgcagagttagaagctgcaaagacttcaagagacgttccttcactcgaaacccaacaagaagacattcaacaacgagacaacaaagttaggaaactttccgagtcaaaggctgagactttaagaagagatgatgttccattggttaaaactcaagaagacattcaaagagacaacagagttgctgaacgaagaaagaggaaatgtgacgatgctttaataaaagatgttccattggttagaactgaagaagacaagagggttgctgtggagattgatcacgtagagcgagtacatagagttacagaggttaatgatgtagatgagacttcttcaaggagcaaagaagtttttgtagggagaaggaagaagaatgaggggagtgaagcggttgtggataaggattacatgaggtacctcacatggcttgtagattctcttagcgattcgacaactgagccaatggaaaatcttcagaaagatgatatggatactctaaaagaatcgacaatggtacctgaattggatccactagtagaagtgaaggttgaaccacatgatgattggtctgattatataattgcgatgggtgattccccttttttggatggagaggagtgtacaccgtttgtggcgtccaagaaagtggttgatcttgatgaaggaagcaaagagaatgaaagtagtagcagttggtttagaaaggagctaatggatgttttgaaaaatccatatgatgaaggagagatgaagcagctccatcgttacgtatcaatccataaaaaaatgactcgatgcagagaactacgaaagggaagaggatctgattatgagactgacgaactgggacaatcttatctagaaagtttccctgatttcgaaaaagaatacaagcttgtggttggtgttgataaggcaagagctttgaagttgctgcgtggctttttcttttacttgaaatatgtttctcatgatggtgttttcaagccttgggagaagactcaaagttggcaaccttagaaatggtaaagcttttggcttcatgtagattaagtttttggatttctgtctgtttttttttttttctttgttgttggatggcaatctgatccagtgtagtttcttgtaaccaaagaatctggttttatttaggtttttcctgaaaactgatgcaatgtctcaagactttctgatctcatataacaaaaattgaaggaatcagatgagtgaaggcattacaatattcagtttaaacgttgtatcaaaaaatctgaaacagcctttgaaggtcataacaatcagacattgtcaagttgtcgaaactaacagagaacaagatgtgtaaccaaaatcagcatcaccttcctttatatttacatggctaatatatgttcgagaagtacatgttaggaccatgaagctatgagtcatgttgagtcacctattcccttatgaaccagcatatcatatactctgtctactttactcggctctactttgaagaagctataagcatcagactttttctttatctgccccttctttatttctcttgttaagatatccaacatcttcaaatagtgtacaggcagtattctggtctcattgcacatcttcttttcctgcacaaaaaacagcttcaatctctcaaaccataggaataatgtcaacaaatcaacaaaatcacaaataagatgacaaacatcaagtttgaaaattattgttcttacggtctctgagagtaagtcagctccaaggagaccatcaacatcccaagtgtccaaaccgctgtatattcttggaggtgtgacctttggcagtgagtcagaaccaaagggatgcaaatttctgggtaaccctcttggactttttagtgttttaccggctatactgcctggtgcaccgtggttaagccgcagcagcatactttcttcagcttccttctttctcttctcttctataaatctatttgcgtctgaagttgtcctgcaaccagcagttctagcttcctgcaacatttattaaaagctcaacttaatgttcccacctaattgagtttgtaatccagtactcaagcttggtaaaattttaagcatcaaacctgaagatcctcgattcttctgagaatttggtgctcttcaatgactttcttaatcagttccttgtgctcttctttggattggaaccgcgcaaacactttacagcttttatatatttttctctcctctgctgaaaggctcatctcatattgatcagggtacaacaagtttctttccagaacaaattccttcctccgcttcctctcatcaagcctgccaacaaaggcacaatcttggcttgtagcattggcttatgaaaaaattctccggtttaaaaatggttgttcctgtgataagtgtaccttttcgagtaaatacgaagaacctgcagtttctgctcacgctcagcatctgtgtcagaatccttaaattccatgtcagcaagcagttgctcagcatcgttgtcatgttcgatctcaaattcttccctctttagattgtaaccatataactctgttactaatggaactttctctccaggaagtctgagtttcttctccccgacactcctgtcagattgttgttttgcagctaagacacaagggccgttaactacctttagtttttgttcgcgtaaatatcactttgcataaaaacttgttccagtatataacaaaccttccaacttgatgatgtccttagcctgcggtacattgcctttcttcttgactgtacaataaaaagtattactttacatatggaatcatggaagagataatatttggggtcgtagtacgaaatgcggatgatttgcgtccttagccataaatctaagtgcaaataatgtctacaattttatatagataaaagcattttcacatacctccagctaaggcagacaaaggtggatctatttcattgaccttccctgaagcttcgtgtctgcccatggaaacataatagtacttttaaaaaggtgcattcaacattgtaaacgtaggtaaactattgttacaagcataagtatatacttgatttcagctgacacaggtaactcttcttttggagatagcctcacaaatgcaggtatttctgtgacaaatagtaaacagagctcagcatcctccttttttcagtcaaggttaatatacgagtcccaaatcaacaagaaaccccgctaatagattttaaagctgacctgttttgactgcactatctttactcatagcaagcagctcatctttgctctttccaatagtatgggacaagtcctacagagcggggagctagagtaaataaacaagctaggttcaactatctgacgatcatgtgttttcatcagtccttaccggaagtggaaagcatggtgactgcatgtaagcagaattgaagtgtttaatacattctgtcgttgtcttactaccaacatggtctgcaacttctttccaattgccaaacccgtatgtcgcaatggcctaacacagtcaatttacttcccaatagtcagatggaatctctatatagacatgggagtgtacaatcagaaacgattaatgattacctcaagaaggagtatctcttcatcggcattccaatcagaagtaacaagcgaaaaagacaaattgtcctgtcaaacaaaagggtagattcaatacaaacaaaaatacaaccatagaacattttctttgttttaaacacaatcactaatctaattacttttcagctgacaaagcgttgaattgaattcaaatatactgctcggcgttggaaactaaccataacacgatatgggtgactgttcttgtgacgattaagttcaacgccgacagaaaagcattccacacaaagatcaaagtccatacaaacagcacatttgaaacgaaccaaaccagacagatctttatcgcaatagttacaacagtaaaggccaggtttcctctcattcccagcttcaattcctacaatgtattggtacatgtaagaacttttggaaaacgcagcttggtacatgatacatcaatgcatatctatccacagcagaaactttagtcctatcagtatcacacctaattgcacaagtaaacggaaacctaccggtggaaattgatgccgcagcattctcaggacccaatgatatctttttcctttttgattttctgaaacagccaaaatcatcaaaattaggataaagacaagagacgacagcagtatgaaatcaagagccacccacaagtaccaaaagaactccgattcagataatcaaacacagctaagtggattaccagatattgaaatgttttcgcaaagacaagtaagtaattgaacagagaaaaccctagaagacttcgagctaagatggacaaagaacgaaactttaaacgaaccctggattcaggtcttcctcagcaggacgagaagctagtttcgaacgacccatcggcaccaagctcgcacttcttcccggcagattgaagaaaaaaccagaagagcgagaaaacgctaaaaagcagtgaaaaaatggtaagtcggtaaatgactaaattacccttaacaagtgtcaataattatgttcacgccatctttaaaccctacggcagttgtcagtggtcacgtctctctcttaacctaaccaatccaaagttgccgctagggtcaccggaaaacttcagagttgtgtcttctattgaattctccgggaaggtaaagaagattagtgggttttgattgtgctgtataaagatgtgtactttgtttgagctgtctcttaaaccctagcaccaatccgtgaaccttgaagtttgtcattccggtagaaattcctcagcagttgatctaattcgttctctgtgtagtattagtgatggggctttctcttggggaacaacatttcattaaaggtgggattgctcaagatcttcgaactgatggtcggaaaagattgacttaccgtcctatctacgtcgaaaccggtgttattccgcaggtagtgtaatctcctagagctcgtccgcttctcattgttgcttcccagttgtttaacagatatgttctttctcttgtttttgttggctctaggctaatggttcagcgagagttagaattggtggaaccgatgtgattgctagtgtaaaggtacttcctttgttctctctgctactgttctattgttgaatgggaagtgctattgtagatgttacccagtaatcttgtgtaattgcaggctgaaattgggaggccaagttcacttcaacccgataaaggaaaggttgcagttttcattgattgcagtccaacagctgaaccgacatttggggtgagcttttcttttatttcgtttggttttggttctatctagcacttgtcacacccgttctatcgttctattggtgtttctcttactagtggaattgttcaacatgagattttggttatcattacttttcttcagaatctcctaaattctactgtgttaagtctttaggcggctaattctttgtgatatgttgttacttaggggagaggaggtgaggaattgtcttctgagcttgctttggctcttcaaagatgtcttctgggtggcaaaagtggagcaggtctgcaatcatgtttatgcaatgcttttttttacctgcacactgttacgctttctgtttgtaacgtttatagcaattcatgttttggtaccaggagctggaataaatttatcttcgcttttaatcaaagaaggaaaagtttgctgggacctttatattgatggtcttgtcattagttcggatgggaatctattggatgccctgggtgctgccattaaggtaattcttgtgatgtgtgtttggttttctctcttaacccttagtctcaggttttagttacgaatgttagtgagtaaatcatacccatcaatcagaatcatgagaaaggaaaggccagagaatataggaaacgaaagggaatgggtctttagttaagtgtatatagattagctcaatgtagttgtcttgttattggttttagtagctttacgatatgtttccaattgatagtttaagcaacccaaaagtcatctttcctcaaggctgatcacatgctttaatgcacttgttgactatactcctgcaggctgctttaaccaacacggccatcccaaaagtcaatgtttcagctgaagtagcagatgatgagcaaccagagattgacatcagcgacgaggaatatcttcaatttgacacttccagtgtcccggtcatagtcacgttaacaaaagtaatcgaatctcacttttcttgattcacatcgacatcttcttatgtacatttcgctaatcttttaccatgctgtccttggtttttgcaggtgggaacgcattacatagttgatgcaacagcagaagaggagtctcagatgagctcagctgtatctatatctgtgaatcggacaggccatatatgtgggttaaccaaacgaagcgggtctggcttagacccaagcgtcatccttgacatgatctctgttgccaagcatgtgacagagactctgatgagcaaacttgattcagagatttcagccgcagaggcctgcgaagacgaatcttgactcttgagtctcagagaatcaaagtttcaagatgaaacatgttagcaagggatcaacaatatttgtatctgtggaaaatcttatacgaagtcagaacagattaagctaatcaaaatcctttttcctatgttctaatgttccatgctttgtgatagtaaaggtgatatttttgccattatagtattagtaacattatatctcatctagggattattaaaagaggcgttccttggatctctgtgtttaaagtgaaagacataacaagttacaaaaggatttgtgatattttgggaggaggaaatgagaatggagatgaggtcagcaaatgaaattaagtggacttggaaaaaagagaagattggtggtccatgattaagctcaaaggtcaaaagagtgtgtgagcagtgttggtcacgtgtatctcagcttcgggtttggtaaaaatggctttgaaacattcaattgttttctgtaaaactcccaaatccgatactattcacatttgtttcctccttcatttcataacaagcaagctggcagagaaaatttggtagtcatctattatgtcatagaattatgatatggtacatactacaaaacaacaaaaggagggagcaaatagaaagcgttaaatggcaaaactcaacgaatttacgtatattccgatgaactaactaacaatgatattgataactgtttttgcgaatcaactaacatcgtttccacatttaaattgtgactagcataaacaattaaaaagtaagatttgaaaatcagtcggttaactaattggaaaagaaaatgaaactaaattgattgactaaagtgattttttcttttcttattggccactaactcttattttgttttcattatggaaaaagagtcaaacctaatcaaatatatttagtctatgatttaccctaataaaatatacacaaaaaaattgataactacagtacttaaaggtttttaactgtaaaagttaattttgacagtaaaaatatttatttctaaaaataaaataaaaaaaaaaagagaaaaagatttaatagcaaaaatggtcgtggtacggagagacggtggcgcgtggaggcgggagaggagcgtggaggaaaagaaaaagagccaaaagagaggaaaaaagcaaacactttcacttggtggacccatttgtccctcccccagactctctcttctcatctctctctctctctctctcttcaaaccctaaaaattcacgcattttggcacagttaagttcgctgaatcccgttcctcttcctctgtctctctccccaagaaaatcactcagatcaaagctcaaatttcggatctcacagctgtcgcttcggtaggtatttcctcttcttttccccccctttctcttctcctgtttcgttttcgatttggattacacgaaattcatgtgatatgttgcttctttgggttttgtaaaatgattgctggtgaattgtattgggaattttgtgcagaggaaaggatgaccagagaacatcctcccgagcctcttgatttcttcatctggactgttgaggtatattcaatcaatcattccttctttataagcctttcatgatgatcacttcttcaattcgcatgtttcttggaattgagctcttcattattagacttgttggttgcagaatcatgtttattaaattattcagcctatttttgatctgaattcagcctatttaaccagttacagggttgatttgatatttcttcaggtatgaccctagtttgccttaggcttgttcttgttgtttgatccaattacactgattgatttagtttactatgttacttattttttttgctcttttggtactctgcttgttattacaagaataaatctcaccttaatgattgcaattacatcaggcaagctcgaatttgacgcacctctagctattgaagttccattagtggtcatttagtttactatgttacttgtcgctctagtccaaggaatctgtgtttgttgatgtacatatactccggaagtggttttacctcagggtgtgtagactgcagagtgatgttcgcatatgtcacttgttgatttgctcttcagaaaaggttgaatattggatgaagattagttgatgaaaactcgataacctgtgcctgataccaaaaatagttaagagttagtccactcatatggagaagctggaggttgtgtgttgctgaatggttttgttctatcagatgctattatggattttcttagttatgctcgtgtgtaatggcgagcatcttgtagatgagaagctttgttctttttttcttcaggatgttgggtcttggctcgaggagataaaccttgggggctaccgccagattttcaaagaaaatggtgtcaatggagaatatctagaaagcatgtctgtgtttactaccgagcagatccttcacttcataaggaggcatcacatgaagtggggagacttcatcaccctctgtaaagaactcagaaggattaaaggtactctatcgttctctctataactctcagcttaagttgttgcaggaatttaactatggaaagaaatgtctttttttttacagtggcttgcttgaaaggtgagcagagagttagacggccatggtgggcaccgtcttgtctatccgtagtctttgttaaggcagccaaacgcaaccgacagtctcgtgttgtatctctcaagcttgaatcttgacattacactttggctgtttatgtacgtacttgtctctcttctcttctcttgttttcttttcctttttttttttttttggtttgggtttgtttgtggcacatgcactaggaagaaacaaactcaagtcaaaaaagctgtttggcttggtgaaatcttgcaagcgggaaaaaaattatgcgttttgtactttggtggtgtatacaaagcttgctctcagatgtttaatatatggcttgtgcaatctttatgtgacagataatagtgtgacgaatccaaagtagtaatttgattatatgtaatgtggaaaccgattgaaacccaggcgatattgagaacgtagtaatttgattatatatgttatatgttccaatgattttggacactaataaaattatttaggtcacaaatttaaaaactctatcggtggttaaacattttcagagatagcgtccattcaaacattttcgtggtgcaaattttcggagaaatatggtagagatttggcgtatagctcatctcatgttcctctttggagattagtacgtttagtaccctatcctcttggacgaaatctcttatcgagtatcgagtccactttatcttcacagaagtgagtaagtgacaaacaatgggaagcgaccacaacttctaagagaaaatagatattttatacattctttcttacaatttttttgcagttgaatttatcatctacaaagtgtaaaattatggattgagcaatgcaatttttagaagaaacaattaatggacagagatataaagttttgtaaaaatctttaaaattaataattatctttgaggtttttacaagtttattatatgtccctttccattatttatttttttcgttattgacattgcttacatacagtccattattttaagtttctcttaattttattttatttattagatacacacttatgtgatacatattgatatcatctttaccaaaaatcttgagcttagccaccaacataaagttttgacaataactcgtcatcggatttttcctcagtctatcaaaccttatcaagtctagtcgtctagaaggggaagacatgttcaaacggggaatcagatttatcgtcgttatgtgagtttattttattccatatatggtttctcgctcgatacgtttgatggtacaattcatcatgcgtattctcacttcaactttaatcgaagccttgttcatattgtataatcaaccgttgatacgtgtcaccgcatctggacatatcacattttttgttggatttcttatactcacccctttcgtgatccgatcaaataataaaactgtgtttttggtacatgttcttgttgggatagcgtttgtatgttggtttattttcgtgttagttatcttcttcattgcatacattctaaagcaatatgatttcttatacaagccaataaggttttaatcaggattatccttaattaatgtattcatacttaccgttcacaaaataattatgagaaaaccaaataccggaattacccttcaaatccagaagcttcggctttggcctaaaaaccctactaaaccccaatcgtctctcttcttagctcagagtgctaccgaaatcaaaatccaccattcttttctcttccgagattttagaagtttgcgacgatgatcaggctctctaagcgctccgtctctaccctcctacgctccggtaaccaaagcttccgtatcgccgccgcagcttccacctcccgttcttccccatctgccacggtattcatttcaatttccttcatctatccctcgctttgggttttggtttctcggttcagtggccaattggctttcgtatgataggcgaagagaattgattggattacttacagtgtcactattttccccccttttaggatgtcaagagaagtgacactgaatcgagatggtactcatctttaaccaatggacaatctaagaatagtgggtcatttgctcaattgaacatgaaaaccaattggtttatgggataccggaacgaatccagtgcagcagcatcagattcttcctcacaagctcctccaccggctgagaaattcgagtatcaagctgaagtacgtacgatctgtgtgtttagatgatttcttgttttgtgatcaattttgtgtgtgtcctcgtcactaatgtttgaaacaaatggcaggttagtcgcctcatggaccttattgtcaacagcttatacagcaataaggaggtgtttcttcgggagcttattaggtatcgtattattctctatctttttttgtttcgtaatggtttttgtgtaacggactcatatttagtaatctatattttacttgatttgttgttcaacagtaatgcaagtgatgcattggataagcttcgttatttgagcgttaccaaccctgagctctcaaaagatgctcctgatcttgatatacgtatctatgcagacaaggagaatggaatcataactctcacgtatgacttattagtttctgatttaaatgtataaatttcgttttgagcaaatggttagtagataataatatgctgtcaatgcttttttcccactttgtcagtgattctggtattggtatgacacggcaagaattagttgactgtcttgggactattgctcaaagtggaaccgccaagttcatgaaagctctaaaggtcttactggtttctctgatactattgcttctctttcatggaatcacttgatcaactaagcattgttgtaacattttcaggatagcaaggatgcaggtggtgacaacaatttaattggtcaatttggtgtagggttctattcagcatttttggttgcagatcgggtaagttcttatgttgtgatgtctgcagattcctttattgatatactcacctctccaccaattcaataccataattcacatctatctatcttttgaaggtaattgtgtcaaccaagagccctaagtctgataaacaatatgtatgggaaggagaagcaaattcaagcagttttaccattcaggaagatactgacccacaatctctcattcctagaggaactcgtattactttgcatcttaaggttcgttatgctttgatatttaatttgtagatcaattctgagtatttgttccttcagaagacatgacatactaaattatctctattatttctttccccaatacagcaagaagccaaaaactttgcagatcctgagcggattcagaagctcgtgaaaaactattcccagtttgtttctttccctatttacacttggcaggaaaaaggatacacaaaagaggtatgatcaccagagttagcagatttgtgaacttaaacatatgtacttttgtgtcagatgcaactaatattcttaccttattaactggctttgtatatttggctctctctcttgcaggttgaggttgaagatgatccaactgaaacaaaaaaagatgaccaagatgaccaaactgaggtatatatacctgcgtctctttacctgttctaagaaataccttgatcagcttctggaaatatcttaatcagcatcagaagatagctagatgtgtaagaaaagttggcttagggttggggactatttttcttgtaacagaaaaagaagaagaccaagaaggttgttgagagatactgggattgggagcttacaaatgagacacaaccgatttgggtaaggacttgtcaatgtatcttgagtgcactctgaatcaatttaacagtgtattttatttattgcagctgcgtaaccctaaggaggtgacaacagcagaatacaatgagttttacagaaaagctttcaatgagtatttggacccattggcttcatcccatttcacgacagaggtattttcaaaggaacacatttattgaattggatatttccattaaacagccgaattagatcgtctttgttagacgatccactgaaatataatgctctttgattctcttgttggcaatgctcagggcgaagtcgagtttaggtctatcctatatgtgccacctgtttcaccatcggggaaggatgacatagtcaatcaaaagacaaagaacataaggctctatgttaaacgagttttcatttcagatgactttgatggggagctggtgagaaaagtttcttttggtgtggttcaaatttctttcaagaaacctctgtctttctaattatattgatatcatttttgtggtgtttgtggccagtttcctcggtacttgagctttgttaaaggtgttgtggactcgcatgatctcccacttaatgtatcacgtgagattcttcaagaaagtcgcatagtaagcgctcatatccaattcgtatgcaaagcctttatgatatatgttttgttttaagtgcaatgctatgttaagcttacgattttgtattgtgtctccaaggtgcggatcatgaagaaacgtctagtgaggaaggcttttgatatgattttgggtatatccttgagtgaaaacagagaagtatgtttcataactcttgttcccctaagcttacagtttaaccttttttaattccctttagaaatcactgctacgttctggtgatgattttcctgacgaatgagaatggcattgttaacctatacaggactatgagaagttttgggataattttggcaaacacttgaaattagggtgcatcgaagaccgtgaaaaccacaagcgtatagctccactgcttcgatttttctcctcccagagtgagaatgacatgatcagcttggatgagtatgttgagaacatgaaacctgaacagaaagccatatacttcattgcttctgacagcattacaagtgctaagaatgcacctttcctcgaaaagatgctggagaaaggacttgaagtatgtgttgttcttctgaatggggcctcgttttgttcttccttgcaaatattcctattaactcagaggtgattgacatgtatttctttgtattgtgaacgtaggtactatatttggtagagcctattgatgaagttgccgtacagagtttaaaagcttataaggagaaggattttgtagatatcagcaaggaagacttggatctaggcaagtgcctgatgtaattccttgatttagcatgtcaggtaatcacttatgtataataacaaattctggctttgatctttgtattgacaggagacaagaacgaggagaaagaggcagcagtgaaaaaagagtttggacagacttgtgactggataaagaaacgattgggtgacaaggttgccagtgttcaaatttccaaccgtcttagttcttccccctgtgttcttgtatctggtaaatttggttggtcagccaatatggagaggtaagatctgacctttttcttaagcaaggatttccgttctccttttttgcccctggtgaactaacacagaatatgttatctggacaggctaatgaaggcacaatcaactggtgacacaataagcctcgactacatgaaagggagaagagtgtttgagatcaatcccgaccactcaattatcaagaacataaatgtgaagtcaccattcatcataacttgtacctggctattataattaaatctaggagccgctttttgagcttggcttgtttttttcttgcaccctgcaggctgcttacaatagtaacccaaatgacgaagatgcaatgagagccatagatcttatgtatgacgcagcactagtttctagtgggttcacggtgagtcctattctacattaacattcttaactttttgttgtctctagaattgaaataaagtaaatactggtaaaacttaattgttgtttctcaaaactacagcccgataatccagcagagctgggtgggaagatatatgagatgatggatgtagctctttccgggaaatggtcaagccctgaggtgcagccgcagcaacagcagatggcacattctcacgatgcagagacgtttgaagctgaagtggttgaaccagtcgaagtggatgggaagaaatgaacacaagcctaatgttttatgtccctgctacgattctcatcatattcttcttcttttattagtagtagcagtaaaagtagaaccccaaaactcagaacaataggcaatgagcgaatgataatctctatttatgttggagagattaataattgattgagcttgtttttgttccagtttgtgttgatcctcctcggtataattttaataaccgttaagaaaaattcagttggggtgtttttggaaagatttttcgagttttatctaacaaaactaaaattttgggacatatggtaatttttaattaaatagagggatgttgttatcgtacgaattgggttggtttaaaactttgtttggacagattcgactcaaacgttgaacgcgtttaaaaaagtcaacaaaagtcgaaggttaccggctggtcaggttaaccgttagagattaatgaactggcagctgtatgtcttttttatagttctgtcttaacaggcaaaaaagtgtttaatttatctttcctttgggtttctcacggagtcacggttcctcgttcgtcctctcccgtcgtctctccggtgagtccttaattttccggcggtctttttccctttctcgtctgtttggtgctttctttatgtctgaggcgaatacagcaaaacgtatctgttttggttgttgagttcgaggctggtcctgaaaattcggtgacaaaaagagtcaataactctcgtgatcgagttggatgcgttgttttgagggttgattcagtttatgactatgtattttggtacttgcaagattttctgattttatgaagattcgtgtttgacttttatagcgtataatctacggggcaaacagattcgagcaacttgtttttttctagcgcttgttttgtgtttactctgtcatgtgtttgtattttttgagcttccactagtgattaatcatctcagctcaatttgaacataggagatgtagtttttatctgtcggtggatttctagggattttgcaaaatgttttgggctttcctgaattagtatgtgatttggtcgtaaagtattttagggatttatgtgttccttggggtgaatctgacattgacattatcttggtgtctgcagcactaaattgatgggcacatcatctgggtccaatcttcctcaccagatgctacctccacgtcagcaactacaaacatctctttcgcttgtatcttcagatccccacttgtcacggtctaattctggcattgtgcgtgaatcaccagctgaaagtgctagctctcaagaaacttggccaacctcaaaatctattatgggaaggaagacagatagcggaaagacagggcctgactctcatgatcaacatgtgatccgccatgtttccattgctgataaggtatcgctacgggacatagctagagagagacttgacatagtcgctgagagaatgcatcgattaccagaagaatatctcgaggagttaaagaatggtcttaaggctatccttgaaggaaatggtgcgcagcctatagatgagtttatgtttctgcagaagtttgtccagacgagatctgatttaacttcaaagacacttgtcagggctcaccgagtgcagcttgaagttcttgtggttataaacactggtatccaagcattcttgcacccaaacatcaatctctctcagtcatcactcatcgagatctttgtgtacaagagatgcagaaacatagcttgccaaaacgaactcccggctgatggttgtccctgtgagatatgcgctaataggaaaggcttctgcaacctgtgcatgtgtgtgatatgtaacaagtttgactttgcagtcaacacatgccgctggattggctgcgacgtgtgttctcattggactcatacggattgtgctattagggatggggagatttcgatgggagtttctcccaagagcgtatctgggatgggagaaatgctgttcaagtgtcgagcgtgcaaccatacttctgaattgctggggtgggtgaaagatgtgtttcagcactgtgcaccaaactgggatagggaatctttaatgaaggaacttgacttcgttagtaggattttccgtggaagcgaagatacaagaggccggaaactcttctggaagtgtgaggagcttatggagaagattaaaggtggactggctgaagcaacagcggccaagttgatactcatgtttttccaaggtaagcccactcgctattgttatatgataagggtttactctttatagacctaaccatgttttgtgtatgaagaaattgaattggactctccaaagagccttgaaagcggagaaggtgggggtacgatagcacctcaagatgcatgcaaccgaattgctgaagttgtaaaggaaacactgaggaaaatggagatagtgggtgaggaaaagacgaggatgtacaagaaagcgcgaatggggcttgaggaatgcgagagagaggtagaagagaaagcaaagcaagtggcggaactgcagatggagaggcagaagaagaaacaacagatagaagaggtggagaggatagtgaggctgaagcaagcagaggcagagatgtttcagttaaaagcaaacgaggcaaaagtggaagcagagagattggaaaggattgtgaaagcgaaaaaggagaaaacagaagaggaatacgcaagtaactatttgaaactgaggctgagcgaggcggaggcagagaaagagtatctgtttgaaaagataaaagagcaggaaagtggtgggaatggtggtgaagcgtcacaagcagtgatgtactcaaagatcagagaaatgctgcatggatacaatgcatcgtcgccaagggtagatccaagatcaaaccagcgaaatcctttcagatccaatccttagatgtttgtattgtctctctttgtttgtattaaaaaaaaaatccgaatcaattaaggttggatttgtgtgtgaagtattgtggtctttgtattcaaattttgcacatgatcgtctatgttgggccataatgttatgcaagctttgacacagagtgttgccaaaatctcgatacttattcactcggatttagagaattgtggatttcgctaatggagggagatccatgttaccttaaatagtttatatttgagccaacatgagagccaaagaacatcgccaccgactttaaaaagaaaatattttgcccaaatggatattacagagtagttatttgcaataacgtcctcatgtttgggttataataacgatttgatttcttacggggtataaagcaaaaggaatcaaaacgtttggggaaataatgtaatattctggaaacaaaacgcgtataatcggattgataaggaatattatatcatcgccgatgcaatcatcgaccatcgttttgttttcctgtctacccaaaaacaaaccctagtgtccgaattctcgacaaaattcatcggctccaaattccattcgtgctttttgaattcgcgttcttctgattcaagatgtttctttcacctggtcattctcctcgtcagatttcttctccatcgccgtcttcttattccgatgataccctccgatcaacgcctcgcagttcttcctcggagatcattcctcgaaaccctagaaaacggatgagagttctcgatgaggacgcttatgttgaagcaatcgagaagatcatcgagcgtgattactttccagatataactaagcttagggatcggctcgattggatccaagcggtgaaaacccgtgacccgattcaaatccgagatgcccagttgaagattatcgagaggcgtggaaagaaggcgaatcatcatgttggagataccgagggtaaaactcaaactcctggatctacttttctgagaaatttcactcctttagatgaatttgatggtaaaacccctagaactcctggagtatctggtagagaatttcatggtgttgaagtagatgctggtgatggagatgaagatatagatcttaatttgtccctagatgagttctttaggagatatactagtgaggataacgagagcttttcgaagattcttgagaaggtaaataggaagaagaaggagaagtatggctttctccttgaaggtgaaaaggaggatggtaaatctattgaggatgtgaagagagataggattacagatgggtatggtacatctgatcagccaccgagtactttagaaggatggaaatatacggcgaagaatcttctgatgtaccatccagctgatcggggtgaggcgcctttaactgaggcggaaagggcagtgagattacttggattgactaaggagatagttaaagggaacactcgttttcatggtaagactatggattctaggccaagagaagatggttctgttgagattctctacactccaatcgcaggttcttccccgatgcatatctcaggtagggacagagacaagtctaaaaggtatgatcttgatgatctaaggaaaacaccgaatcctttctatgtggaatcagataagagggcagacaatgggtatagttttgttagaacgccttctcctgctccaggtcttgatgaatcaccctttataacatggggtgagattgatgggacaccaatgcgattagatcttgaggatacacctattgatattggtggtagtgctgatggaccgcactataacattccatctgcacctcctagagatgtaagggcacattcattatcaagggatgcatcgcgaaaacttagagagagatcgaatagtatgtttaagaaacctccgttgccatctcctcatcgaagtggaagtgcaagtccgaatgttaggactctttcacccgctgctcagaagtttttcagaaaggcaatagctaaatcatcttctactgttgatgagagccttcgtgcaagttatcgtggagcaagtcctcgtggagcaagtcctggtgctgtgactcctaagagtgtgagaagtatttcaagatttggcaaagatgggaccagctcagagacaaggtcgccttgatggtgccaatgttatggttatctgttgttgaatgctttggtgctcacataggcaacaaagttacttcttcttgtaccaattactgatatgacagattttaaatggaatgctatctatcttcgcatttgtaattttgacttccacatcttctcttttctcttagctcccaggctacgcacttcaatattacaacatcagcacaatatcctcaagtgtaaaatttggtgtttaagctttatctgtagattctctatattttagttccttttgtgtgattcatgctttttaagaggtgtcatcctcgagattgttctctcttcaatctcaggtttccctcagagtttggaattgcttggatgttaattaatcattaatgtttatgtatccttacattaagatctggagacagaaccgactgcaacaagagtttcaatattcacagcagcatgaagtagacgtagatgtcaagatctatggtctcggtccaaagagtgattcgagattcacaacagtggagacacctctagcatcaatagtttgctccctagagatacctttcagtgatgaaggtggatcaagaaaacagtgcttcttaaaccagagcaatgcaacaatggaagaatgcgaatccacaagtatcaaatccaggatctgatgaaagaaatgcttctgtcacaaaacaacctctcatacgcaacattgtaagtccaactcgaaaaactaagtggtcttggaaaatgaagagtatgaaacatggaccagaggctgtagagaaagcatcaaacttatatttatatacaatgaacatcacaagtgtatttcaaagacaacattaaggataaaccagaccagtaaagaaaccaaacaaccaaaaaagaaagaaaacttcaccataacatatgttgcttgttccatatcatttatagttagattgtagcagcaacacaggattcagctctagccttgtcagaatcttccaagactttcttagaggctttaataacaatatgattagtgatgtaatgcttgcgacaaacaggcatatagacatcagctccaccaataagctcagttctggtgtcacaattctttcttaaagtgaagaaagctttatgtccacagacctcacaccttgcagttagcttagtcacagaatcagctattggtataatgtcaagtacagccccaaaactcctcctgcacatagagagatcaattccacattttacagtcaacaaaattgttaaacattgaagtaaaatatcaaaatcacagctttggtactaggatgaagcaccttaaatagtcaccatctaggccagcaacgatcacaattttaccatcatcatcagcgactttgcagcaaaactcataaagatctccaaagaactgagcctcatcaataccaatcacatcaagctgccaatcattttaagagaaaaacacaaattcaatacagatccttcacaattaagacccgaaacaccaaatagagcatcgaatttattaccttgttataagcatctagtccgaatttctcaggaaatgacatgagatctggaagagcccagcaagggaatccaattccatcatgtgtcaccaccgaatcttttgcgtatctcgtatccttactcgatttcagcatcgcaacacttctgcttaaccaaaacacgaaattaagaaatttacggagatagatctaacaattaaaatctacggagatagaaaataaactgtaccttccgtcgctgatctctgacttgattcggcgaaggagagaggtcgatttcccagaaaacataggacccatgataacatgaacagcacctgacccacgacgttccagatcggagagaaaatctccggtgacgtcactgtcgagggttttgatcaaaaaggaagctttgagagtcgccatggcagagacttgagaagaaaagatggtttgtagatgaaaaaagggagaagggttcaatttgcttgtggttttaggtagcgatggtgaatagcttgttgaagatatatatacgcggacatccagaagttgaacaaggaagaaaattgctggagaagatttgtcaaagataagggtttgaaattttgaatgggaggttttttcaaaaaaattacatctttggagggaaacagttttttagagcgaatctttttattttacctctctcttttcataaagcggaacactataaacggaatttaaaaaaaaaaaaactgattttctattggcttattttttttaattaatttccttaatgtatagatcatatgaaatttttaaacatgtgtgtttaggctttgcaaacacattatttaagagaatgataaatatttttaaaaaatatatccacataaaatggtactggtttttggtcatatattccactaatgttttttagaattattgtttaaattagaaagtcgtaaattcgtaatattcgagaaaacaactttctcacttgggtttttatcctacaaacccatcattttgtgtgtgtgcttttgaatgtgggcttaaacccaaaaccctgaggctttttttggccctgagatgaacatgttcacaaccttcttcaagtgttccaatacatacacgttcattgctttttcgtagttgcaatttttatttaatttttcgtatgtagttgcacaccttcatgtctaaagctacaaattgttgaaatgttttttccgatcacctcaattaatgtacaatcgtagctcgttgtattcctaaaaccgaactagaatacattttcatcgccaggttattacaagttaaatcaatttgatcaaaattcaaacatagataaaatgtacaccagtaggttaaaactaaaccaaacgtacacaacaagcctaaattatccaaacaacaacaactctcagttttgctttaaaaattctgtgaataagacatccttaattgcaaatttatttttaattacttctttttaaaaaacttttagtggcaccatcctaattagtaattactttctatataattcttctttaagatacaaactaaaaattccgcaaaaagaaacatctaaacattccaatatattaatatttttttgttatgacaaaagtaaaatttccgtgtaataaatggaagggaaaacgtataaaaagtttagtattgaaaaagagaaaaaaaagaaacaaaccaattatgtaataatgagtataaatatataaatacagacatatcttcttcttcttgcacacccaaaaagcctttgtctttctatctctctaccaaaacttctttctttctctctttttctatatctctagagcgcgttactgcgcgtcgtgagtatgtttttattgacgccattgaaattgggttaaatcggtttgaatcggattgaacaaaaactgtattaataataattcttcctctacttttctctctgattgattccaatcttctttcattttcttcttcttcttcttctggggaaggggcaggttaaaattatgccatctattcaaatcgtgcctatcctcagatcttaactcttttctctacgagattcggcatctgggttttattcttcttggtgggtttttttttattcttcttcttctgatctcagatttcccctgattggtttttttttttgctaaatccgttttatgttttcccgatcaaactctcctggcagattctcggatctgttgttttctagattcaatctgaatttgattttacgtttttgtctttgtaaagatgtttccttttgatcagattttgataatccattgacatctctgattcaagcaaaagctaattaactttgatccgattcctttgtgtgtgtgtgcagagcaaaatgcaatcggataatggaaagcttttcatcggtgggatatcttgggacaccaatgaggaacgtctcaaggagtatttcagcagttttggagaagtgatcgaagctgtcatcttgaaagatcgtaccactggtcgtgctcgtggtttcggttttgttgtttttgctgatcctgctgttgctgagattgttatcaccgaaaaacataatattgatggcagattggtatgttcactgttctctgcctttcgtttttgtacaatgtaacttgttttcgaagcttccttatgcaatcaagccttcaagagttacagtttgttctcatttggttccgattaatcatttttgtgctttgattggatttttgagaagaaatgagtgatctttagttatatgagcttagtttttcatttttcaagttgtttgatc

SEQ ID NO: 50 - DNA, 38810 bp, Arabidopsis thaliana
gatcatgtcaaatttataggcaaaggacgagggcaaacctgtcaatatcgagatttgaatattatatttgataataaagtttttaatttttttttggcattaatgtgaaataatgaatgttatactgctataagtgaagaaaaaataatactgacataagtcagactcagacatctataaaagttgtttccacaatattcgtaaattttcactaaaaattagaaatattatactgtattttgttgtttctattggtgatcaactgaaggagtttgtgctggtttttcaatgtcatatgactatatgtataaaactgaaggaacaaaagttaatataagaattcgtattgaaaagttgtacaccttttctttctaacggctaaaaagttgtacatttttagaagtatctaaattttttgtcatgtcaaatttacaaagtacagatgaaatatttacaattaatagcgtttttttttgtttacatgataaagataagagtgttgttatacatgtaacttgtaagttatttgtaagaatatgttttacttgctcgagtctgaatgtgtttttatcccattaagtcaagtattttatgctttcattggcaaaaaagtcaggttcaatatatgcttatgcgagtctaaatctcgagtataacttgtttttttgataatactatatactataaaactaataaaactacgaatttgatatttttacacgtcaagatttcaaccagagttaataaagaacgtgtctggactctccaccatccggacatacacgaggcgtggagattaaacaatgcattgcgaaatgaaaaagagcaattgaatatatatttgaatattatagtggaaaagtcaaaatttggactctacctttgtcccttttgtagtagtatcctgctttacttttttatacgactgtcttatcttttgacataacaaaaacagaccttacccgttacagcgttgtaagctccaaaccagtatcattgaccttgtatgatatactttcttcaccaatccgcttctcctttcttttctttttttataaccaagaatactttatttagtcatgtgcatgttctaaacacatggttgatatcgaagctatacaattgaaatgacataatatgcgacaagtttaagacctattacaatttttttattttgttttatcaacagaaaaattatatcggaattattgaatttcagaccaccatgtgttaattaatccgatgataaatgatttttaaagaaaatagttggcaactctcgatcgtatccaattcatatcctaattttttaagcttaactataaatctcaccataacgagaacaatataacgattttaaaattggcgtgttgtattaatatacaggtatcaccatgtggaagtctagataattgtttaatattgacggaaaaatcgcaagctattttgcgtcttttgtgatacatatttaaaatatttgttgggacttggggtcaaatatttgaaacagaaagaaggaaagaatcgaactggatagtgaagaagacccacaccatgtttatggtctttattatataaaaattcgcatacaggaaaatcaattcacacaaagaagaatgacattttgttatcaagctctttcacacttaacaactaacaagctcgtatacttgtacttgttacatatagattacccaagtatcagggcatcaaagttgactacatttccgttcgtttcaataaaattctacacaagtaagctataaagtgtaaaaggtgtttcaaatagtaattagtaaaataactttattagatgtgggagaattttattttttcgtaaatggataataacaaaggagacattccattttcagcgacaaccctcacgagataagattgtgagaaaaaatttaggtcttcgaatgaaaactcttgaattttccacatcattcatatgttttctttactgttattgccaataggtccttactctgataactaatatggaaagtttttggctgacttcataatattattctttctaaaaaattcatttttctaacctttttccgtcaacaatttcctaacatctttttcaacaattaatggacctttttttgtatcattgtgtgtacatattcccataactagacatcaacacaaacatacacatgaggacaataaatgacaaaaaaaagtcagatcgaccaattttatcatccggattttgataccataatggataatcttgatacaatattgagtcgatataaaaagaaatcatactcatttataatttattattataaaatgacgtctcatatcggatttatgtgatatgatgatgatacaagtatattatatgaacggacctgttgagattttgtttgactttttttttatatcaaaaatagtcaaacatttaacacatttgtaaaaacgtcatcgtttctttcctgcgtacataatcttttaatgggcctttccaaatttgcggggcaggtatctttgtatcaaattggaagttcttaccaaacaaaaaaaaagaaaaggaaattacacataattggcccactggccccactctaatgtaacgacgccgttctatatctcatagtcattggggagagacgacgccgtacaagcaaaagacgaagccagcaccgacgcagagaagaaaaaggaaaccctaattttcattttgtctgatctttttcttcttcaaagggttttcgcttttccatcacgtcactggtaaattcctctgttcttatcatccctacaggttagagaagaagcaacgcctccttttataggtaacaaaaaagggattgtttttgccataagtgcaaaatatttagccaatcaaaagcctcaaaatttttacacttttaattaaaacggtgccgtttctctcaggaacctctttcggtcggacgagaaagccaaaaacgtagcaaaacatcgatcctccgagtccgagattcaggaattggtaatggcggctatgtcagcggttctgtctctgggtttaggaacactccgcccttcgcatcgttccttgtcctgtttcgattccctccggcaccaccagacatcttttctccgttgccaccaaagtctcatctctagaaatacgacgaggtctccgctcaacaagattcttcaggcttgccttcaatccagtgggtatatctattcttctccgcctcaattccttctaattgcaaatacctctgattcatttgatgtgatttacttcctcggtgtgcactagatttgactttataaatcataatctcgaattcaggctttatatgcttctttgtgtagcattcaatcttgtaatagattgtgttttgacactcactaattggtagttacttaaatgatgtgatcaaatgtttgactatgtctgttgtgttttattagattctgcaaatggtgatgctttggtgtcatcatccgatgaaagttctgagattgtatttatgggtaccggaaccagtgaagggattcctcgtgtcagctgcctcactaatcctttgaaaacatgttcggtacattttcgcctttgtttgttcttttattatgattcatcttcggtttcaatacaatcatcccattgagaaaaatatccattttgattctctaaggtatgcacaaaagcaacagaaccaggaaacagaaataggagacttaacaccagcattcttgttcggtacattagaccatccggaacaagtaacatcctcattgattgtggcaagtaagtgctatgagattagtaatgtagatgtcattctatttatcacctttttttttgtatgacatttaccatggagcatctcacattcatgttggttattgtatgctgactttttaactcctttggcttggcaggttcttctaccatagtgcccttcgatggtttcccaccttcgggttagttttttttccatcaaccactaaggagttgtcaaaaattgattttcataagattttttggaataccctattagattttgatgcttcttacatgacttgttattttttgttatactgtgaattctctctttatcactggttgcttctaaaaatgctgtcacactttgattgttttattgttgattctacggtcatctccataattcctagttgtgttttttcttgtcaggctaagaacacttgatgcagttgtaattactcattctcatgctgacgcaattggaggtctctgaaactgacaagttaaatcttgcccatccatcattttcttgtttcatgtttctctgtcctgtaaagtcatgtgttgactccttaattgaagtcttcttctccgttgttttgtattttgcgctccaggtcttgatgatcttcgtgattggacaaacaatgtccaacctcacattccaatttacactgctatacgtgatctcgaggtttacctgttttccaacactccaaaatatttcccaatgctatttcagtagctaaaggctctccaccatgacatgtgaatctcaggtgatgaagaagacccattattacttggttgatacaagtgtcatcatacccggagctgcagtctcagagttggagtttaaagtcatacacgaggaccagccatttgtggtaaacgatctgaaggtaacatctatctctagcttataatcatcaaaactactatgctcagtaataatcttggcgttgtcttatgcatgaattggatgtttttaactgtttcagatcaccccattacctgtatggcatggaagtaactaccgttcccttggtttccgctttggtaatgtctgctacataaggtaaacaaacacacacttccctctaccatttctgtaccagactttgttcatgaatatctgagtctttagttatcgtattgtaaaatatgcagcgatgtcagtgacataccggaagaaacctacccgctccttaaagactgtgatctcctaattatggtaatcttctcaactatctcacctatcgcgcctattgttctttcttggacaaagatagcttcttacccaagacacatatcttcttctctctaggatgctttgaggcctgaccggtcttcagcaacacactttggcctcccaagggtatgaggcttgctttcattatcctccttatattttatttcctctctcgcagtttattcccagtgatcaaagtaacgttctttcttccttccttcaggcgttagaggaagttcggaaaatcaaaccaaaaagaacccttttcaccggtacaatctgctaaactttcatattgaatatttttatctaagattgtgataaaacataaaagtgtatatatatccttttctcgctctaaatgaaggaatgatgcatttgatggaccacgagaaggtgagcgaagaactggagaaacttaggaacacagaaggcctcgatgtccaactgagctacgatggtcttcgtgtaccaatctcaatttaactcggtttattccttttttccctggtataaccggtttataattatatacataaaataaatttccttttttgtaatgacctgttatatgtgcacaaagccacctagaaaattttcaatgtaagcgttttggttataagctttggtttttcgcaaaccgggttaaataaatggctgaaatcagtctggttcgattggggaccacagaaacggtgacgtttttaatagagacagtggcaagaggaagcacagaaacagaaaacacgggaacggatgtgttcataagggcgtctgccaagtcggcgaccagattgcatggctttgttctggttacaattcaattatctcatgacacgtgtctctgtcggtccggtatggtcccctcgaccggtcgctttcacgcgtgtctattaccgaagttgacattagagtagaggattccctcgaaattgcattatcccttctcattaacaaaaataataattgagttttatgtctttcttttgaaagttcaagatttgtagctattagagtttggctgtagaactatttaacgtgtaatgaaaaactagttaaaaaataataattgaggctatgcatgttactaatgtaagagatagaaaacgacgtcggcgagagaaaaaaaaaactatatgaaaagttaggtgcgactgttaaagaaattaaactttactattatggggttaatcattaagtattgtatttaatttaattgttgaattgaaaaactagatggggtccatgtgttagctcaatcattttcataaacaaagtggccctactatttttcctcatatatgttgtataatttatgctccgctcgtgaactcgctgtgacttattgactctcctacactgttttactcacgaacctttcagactttaaattatgaaaaaatgaataattttttgttcaagaccttcatttcgtaaacgaacaatggttcttacttcttagttgaatcagatatgttctatatcataatccagtcctcattagaatcattcaaacttgttaacacattctagatttcttaatgatctagaaaatgttgtttatgtggtgtcagaatatgatatttgttactccatgcatagctgacatggagacagagacgtgtaatctttttatagacccataatttcaggacagttgaataaaaatattatacacattgccttcccagctccctagtttcatctaaattcatattttattttcatgtcagccttactgttttgcttctatttttcgacttaaaatttagaaaattctccgtatatgtgattctgaagatttaagctaaaccatatgacctagagtttgtgtgatctatacgaggcacattagttcttactatcacctaattaggttatattcaaatttcaaataaacattactacttttgataacacatttaattagattaatgggtttcttataaagttagttttaatgtgtggggtgagctggtgtttcatattgggtagaggatcggacaaatcacattaagaaaaagctaaaataattgtgggataaaacaagaacaagacaaaaggcgaaacattttatattgttctattttctttatgagaaaaaaatatcttttcagacaatccaattaactgttgatgaaaacatgctgtttatgattcagattacctttaaatgtaagaattactctaaagtacttttgtttagaaaataacttaattaggtaaatggtcttggcagtttgtatctaaatgcaaacgcaattaattagatatgacggcgggaaacgtgtagagaattttctagcagtagcaccttactaggatctgtaaatttacttgatagttgatcagtgatcacaaagctggaagtgcaatatcttaagacaagttaaatagagttttaggtaaagaagcacatagtgtgttgacaaaagagtcaactatttatatgtttatagataatattatgtttttggtcttcatcattcactatcttctcatgtcatatcaaataagaatacaaataatattaattaaattatttatgacaaaaaagtattaattaaattattctttgatatattgcctgggttttattggctcgacggcctttagaacgtcgaaaattttccacttctctatcaatcattttccgaagtaatttactttcaacttttgtagcatacaaacatcttttggtcatttcatatccatttaccattatgtgtataatcttctagtattctgtctttgggtcataaagtaagttagggcatgcagcactgacaaatgattaatccatttaaattcttttctttttttttgttaaaaaattaaattcttttcatcaatccatttaatgcaaagtctctcattttttattttaacatgaaaagcatcaaaatcgaaaagaaaaaaacaaagatacaagagaaaagttaccttttttgcgcaaaacctcaaatataatcaatgactcaatcatagcttagttctgtaaatgacagtgtaaagctgtaaaaatactaatctcaacctaaaagctagttcaatttaaatgagaaatcatataattaattaagttcactaagtttggtcggcaattattatagtggaccataaataagtatttatgtcacatatgtttttgtgtgtcacataaagtagtagttctgattcatgaagagtaagaaaaatagtgaaataatatatctactgcttatcgagaaacgtaagaaaaataaaaactatagttttaattcattgcaaagacgacctctttctgcaagctttccacagagcttgtgagaaagttatatttatctttttgccaccgttttttacgaaaactaaaatattatggatttttgtttttaatacggaaaacaaagtgtgcaggtaatgataaagaaaggacagattgctaagaagaaaatacttttttttttttttaaagagcagaaaatgccagtttttcttagcggtagggttcttttttttttgtcaattattttatttcatttttgaattttcggtttcaaatactcagagagataggaagataatataatttctcttgtccacaatctctctctttctcccctctctctctacttctaggtatattggagatttcttccatcttttgttttcttttgtagtttaatttctcaacttcttgttcatgttctgtgtagtaatttgttgctaccttttattttgttttctgtgagattatttcgtgttgatttcaaacttgaacaagaaaagtggatagatattgtctcttgggttgaagccaaagaaggaaatgataatatatacatacacacacacacacacaaaaatcaaagaaggaagttttataggattatatatatagctagagagtctcatttcttgtatgtttctgtttaatcttctcttttgtctcctttttttatcagtatatgtctgtatgtatttatatatatagatctgaatatagtttgtcgatttctaacttatttcgcctcttcttattcttttgttttttgctttaagtttttttttttgtgtgatgatgaacaaagacatgttacttcaccagcatcagcaaccacaacaagacgagaatatgtcgaatctaacatcagcttccggggatcaagcaagtgtctcttcaggaaatataactgaagcaagtggttctaattacttccctcatcatcagcaacagcaagaacaacaacaacaacagttagttgttccagattcgcagactcaaaagaagaggagaaaccaaccagggaatccaggtttgtgtgaaaagaatacaaaaactttcatgctcttggactgattcattattccaattatttgatacagtcaccttcttggaaattctgtgtcttctcccgaaaagaatattctttttaccctttttgttctctttatcatcctctattccaaaacaaagaaaaataaaaccaagactcagactaaaaagaaaaattaataacttgttaaagtatattttgggctgtggttagtatagttttggttactattaagcattaatcattaaaatgtaactttatttagtgtttcttgatttttctaacaatggttcaataattttctttttaaaatttcagacccagaatcagaagtgatagctctatcaccaaaaacactaatggcaacaaacagattcgtgtgtgaaatctgcaacaaaggttttcaaagagaccagaatctacagcttcatagaagaggtcacaatctgccatggaagctgaaacaaagatccaacaaagaagtgataaggaagaaagtgtatgtatgtccagaagcaagctgtgtccaccatgatccatctagagctctcggtgacttaaccggaatcaagaagcatttctgtagaaaacatggtgagaagaagtggaaatgtgataagtgttcaaagaaatatgctgttcaatcagattgcaaggctcattctaagacttgtggcaccaaagaatacagatgtgactgtggcactctcttttctaggtaactctattctcccaaaatcaaactctttttcgtttctctctgtttattaattgattttaagaacaaatatagtaattacattaatcgatattggtgatgaatatgagatatatgctgtggtgttgtaagaattgaagggacacatggtacaaacttttctttgttgtgttatgagtaatttcatttaatttgaaagaggacaaaaatggtagctcaaaagaatcttcatttataatatggaactagttcagggtactttcttcatttcttttcatttctcataaaaaaaaagttattatgggttatttttccttgcattaatcattcgtcttataatacacatgtgattgcaacatgctttagatggaccacatgacttttagctcctcttaatttgtaaaaagagagacttttattcttttattgattaacatgttattgatcacttcatggttttttttttctgtgtggtacaggagggatagtttcataactcatagagcattttgtgaagcattggctgaagagactgcaagagaagtagtaataccacaaaaccagaataataatcaaccaaaccctcttttgattcatcaatctgcttctcatcctcatcaccatcatcaaacacaaccaaccataaacgtctcttcttcttcatcttcctcccacaaccacaacatcatcaatagccttcacttcgacaccaacaatggtaatactaataatagtaacaacagcaacaaccatctccatacatttcccatgaagaaagagcaacaaagcaatgaccatatcatgaattaccaccatagtatcatccctccttggcttgctcctcagcctcacgcactcacatcttcaaaccctaaccctagtaatggtggaggaggaggaggaagtttgttctctcttgcttctccggctatgtcagccaccgcattgctccagaaagcagcccaaatgggctctacaaagacacctcctttaccaccaaccacggcctacgagaggtcaactcataataacaacctcacaacgacaatggcggcgatgatgacgtcaccatctggattcatcagctccaacaacaacaatcatgttttgtttcaagactacaacgcatccgggtttgataatcacggcagagaagaagcattcgacgatacatttggcgggttcttgagaacaaacgaagttacagccgccgcaggatcagagaagagtactaaaagcggtggaggagaaggtttgacgagagatttcttggggctaagaccgttaatgtctcataacgagattctaagttttgctggtcttggaagttgcataaatagctctgcttctgatcagcttcatccaaagccttggcagggttagttaggttttttgctcataatatataatatgtgtatatatatttatatatctagttttgcatctttctcttgttttgttcttcgttttataaatttatatgttgaatgctcatcaaaggagaatcacagaaattgttacgagtcgtcttattcatatttcttttttttggggggttatttgaagaaaaaacaaaaacaaaagcaaggtcatgattaatggtcaactgatcatgattattggtcaactcaaaattaatattcttcgttatatgatatcacgggaaagattggcacactagctaggtaggtcaggaggtattttaatcgactgtcaagtggcttgatgagttcataattttcatttattaggttcttttgatgaaataagtatctcgaccttaaatttttatccaagtcaaaatctttttacttttttcgaaaagccaagatttttactcaaacgtccgaagaaataatgaaatataagaaaatgactatgaaatgtggcacatgaaaagcagaggaggatatgcattggattcgatctaagggtggtgactcatcttttgcttataaacctatttcgaatattggtttttcttattggatctcatctcacgcaggcacgtaaatgggacccatcagaagatagggacacatcacgttttgcttggtggcatatatttatcagtcatggacataactttaaagatgttatattgttgatacacaggtttgcagcacttcatcaattaatattttagacattgtaagatatatatatgtcccgggattattctaaaatgaattccattaacataattatatatatatatatattatgctccagttgatcatatgtaaagtttatctggctacaacaagttataattctattatttgtaaggttttattgttttgtgtggtattcgatctctaaagaattgtaattttcacatgcaataaagtgtggaaaatgattgaaataaatgaaggtgccttcctgtttttggacgaggcggatgtgacatcaatttctgtttatttatagctaaagtaatatttatgcatttgtcatatagtgtataaataataattaaaatggaagaatttacaacaataatgaaaagaccataaaatattcattgggacacatgatcagaaaaagatggtttatgatctaaaaaagagagaggaattcaacttatagtttataatcagcatatgatcacaaatggtaggttttgttaaaactttacaaaatctggtctacttgagaaacttgcaaaaagaaggacagaagaaattgaattgcaaagaataaaagagtatcttgattctaaagatgtgtaatgtcaattcatataaccacgtctgcgaaaaaggaataatgacatctgcagttacatacatttttaggaattatagcagaataatcatataccatcatttttacgtctaaaatttacggatgtaaaaggtgtcaactacagaggacccatgaatttgtcaatatcatgatggttttggcatttgtaaggttttgctttttgtctgattttaatgaagtgatcccacaatcactattaagtatttacttgcctttttttttgcttgcttgtcaaagacaatgacatttacaaaaccttttttttttcggttcaaatacaaaaccttatgctacacaataatgcttgtaaaagttatcaaactttgtaaccattcaatgttacacatacgaaaaactggaactttattacattctacgacaaattacgtagcaaagtgatgaagatggtgacagcactaacgtaagaagaaaaaggaacaagcgaatgcactcaattaatttgtattgctcactttactccattttctacaaaatgggttgtctatcaatgggttgacctagttattccaaagttggatttcaattggttagtcctccttctaatgggttcgacatggccatttaattagaccaaatcatataagccagtttttgtcaattcaacggcccatttttgtaaacatggaaagtctgatttacaagattttgttacagttgtacttaacatacaatctaagatacggaattgaccaagtaatatatcctactatatcaatcatttcctttaattttgctttagatatttgacatgaaatttgaaaaggtttggtggagaatattcttaaatcgcaaccaacattatctgcctatttaaaatcttacaaccctattgcgacctttcacattacacctaaaagaaagaaaaaaactccatttgcagttttggttttctgaaatttagaagaatgacgacgatgtctaatctccctgcagaggttttggaagagattctctcaaggactccggttacatctctgaggacaatgcgatctacttgcaaaaagtggaacaatctctcaaaaaagaagattattcctgaagctgcaaggaagcagcaaggtttaatgttgattaaaaagaaaatctgttccttgagtttcagtctccatgaaattcacaaggatgactacgtcgttccgtgcattaatcaggtcgatattcctcgcaacatagaagtagagaaaatctttcactgtgacggcatattgttatgcgtcatagaggacaactgtagtcttttggtatggaatccatatctagggcaaacgaggaggatcgaagtaagttccgatgccgacatgaatgataggtatgctcttggttacgacaacaacaacagtagccacaaaatcttgaggattaagaaagattttaagaacagcgacggtttaggatacgaaatctacagattcgcgtcgaattcatggagtttgcttgatgaggaagtgatgaaaccagagtgggatgtatggtctgttcaacgaagctccgtgtctttgaagggaaatacgtatttcttacttcaagggaatgattatgatgaccaagaggacgaagaggaggaagatgacgaagagtacgaagatgacgacgacgtcctgccgaaagataattttttgctctgttttgattatacaacagagagatttggtccgcgtctgcttctaccgtttaaccctcatgttgaagagactgtggctttatcttgtataggagaagagcggctcgtaatgctatatcaaagcttcaagacatataagggaatagagatttgggttacagacaagattgatccgaaagcggtgtcgtggagcaagtttctgaaagtggatatcacaccactcactggttttccggttgacttttacgctgatagtttcgtcattgacgaggagaagaaagttgctgcggttttcgatatacattgtagctaccaaaaagctcacatcattggagaagatggatacctgaaatgtgtgaatatgggaagagcttcggatgttggaaatggtcagccacttgtgttctcttcttatgttccaagtttagtgaaagttcctgtcaagcaaccaaagggtaaaagaaaaggtagatcttctgaaaccaaaagcaacaagaacaaaaaaggaagaaagattaagattattggttaagtgcatttgcagtgctttattttgtttcttgcatcgtctcctctttttattcattggctttcatgtccttttgaacaagactatcttcattcggttattcattttcattcaatatatagcagaataatcatatttaaatacagttcgtcaaatgttgttgtctttctttttctaagatcgatcctaaatgtattgacatgaacaagtcttttgcaaaaacgtggcattctatcttcaaactttccgaacaagagggactaaactcctacatttacaatgagtaagtctatttttcaactcggaagaacaaaatgttggattacagtgatgtaggtatcttcaggacaaggaatcgctaagccacccattggatgatcaaaccttgactcgttctcgaagttactaattaaagcttgaaaccaaggttggttcaagtatgagattggaacctaatatatcttcttcgggctctctttgacgtacaccgcaagcaatctgtgagactgatatttttgttcgtagatcttttttttgtttgaagttttaatttcttttgttagctaattttgaagatgtatatagtaggaaaagttcaagtttttggattggtcctttttgtttgctttataaagagttgttagttttgtgaattatttacagatcaatgaatgagttaagatctctaatctatatatacatttttgcagtcattttgtgaaataaatcctgcaattggaacttatttacaatggctgtcactggcttattaaatgcaaaaattaactaccaaatcaaagcaaatcttattcaaaagaatatgcttttatttcatggcctaattatttttgccaaaatggttaaaatatttaaaaattaaataaccatttgaaagaaaactttaaattgatttaaattataaatcttttaataaaaatattattaaaaaaatagaaaaataatttcaccgaacatgattagatagtaggactagatggtaggacgtgtttataatattataatatataaactttataataattaaataaccatttgaaaaaaaacttttaaattgatttgaattaaatattttttaaactaaagtattattaaaacaaaaataacaaaataatgtctaattttactgaacggggttagtggtaggacgggtttggtcgatagtattatgagacggtataccacaagtgaaatctattagatatgtttaatttcaatgtgcaggattagatggtatgacgagttttgatcgataataatacgaaacgatatactacggatgaaatcctagatataacaactaaaatctatatatacattatcttaaacactaaacaaagcaaacaatattaataaaacaaatatttacatatacattttatataacaaattttattaaaaacctagccccgcggtataccgcgggtcaaaatctagttaatactttatggtctacagtcagactaacacaaagaccagcaagttctgttcttcattaagttgtaattagttcttaatgttgtaaataccagaacaataagtatctatcactggtcaagttgttctttgatcacaaatgacagttcttagcaaagaatatacaagtgtcgtctctcacttcatcatttaaggagacgaacaaataatgacgactttgtccaatctttcagtagatttggtgggagagatattctctagagttccattgatatctctgagtgaagtgcgatgtacttgtacaacgtggaacactttatcctggaacattttgtcggaaaattatgtttttggtaaagcagatacaagtaagcaatttctaggtttcgtagtaatgaattctaaggtttgttccctgagacttgatctccaaggaatccacaacaacgatttcgttgatccatctttaaaggaaataaatatagttgatcaatacgatatatctaatatatttcactgtgacggcttattgttatgcgtcaggtggatccaaccaagaagcaaataccataagttccacagattagacatgtatgctttcggttacgacaaacaacaacaagaaccgtaaccacaaattcttgaggaagtttttggatgatgatgaatacaacaaaagcagtaaaataaattttccttccaagttcgagatatattattttaactctgattcatggagagttcttgatgtcaatcccgactgtgatttagaaagagatgtgtctttgaagggacatacttattattatgctcgacaaaaagaggtcggagagccagtttcaaatcgtattggttttttactctgttttgattttagtgatgaagagactgtgactctatcttgtatcagagacgagcagctcgctgtgttatatcaaccctacgacttatgtttggacttgttcatggagatttagataacgactaaaattgagtccaatgcagtatcatgcatggaccaagttcttcacaatggaaaggacatcgctctctggtttttcgagtaaagagcttctttatcgacgaggagaagaaagttgctgtggtttccaaatctcgtaagtatagaccgaacgaaaactgtggatacgaaagagttaacatcattggacaaatcatttgtgaaaatcggaacagatcatatctggaaacctaaaaagtttagatattattttgatccacttgtgttctcttcttatgttccaagtttagtgcatctacgacaaatctatcaactgggcaaaaggaaagagctagagagattattaattagttccactgattacaataatttatttgtttcttcttgcatcatctccttttgaacaagattactgttagtcattttaaccaatcacctttgtagataagggatacaaagatggaataaaatccaaataaaaataattaaatcattttcagatttccttctgtattaagcatttattgccaattttgaaaagatttcttacctataaatcgtaaactaacacatttgtctagctacattgaacccaaaacaaaaaacacctaatcacagtccttggtttttctgaagtttagagaaatgacgacgacgacgacgacgacgatgtcaactcttccaatggttttggtagacgagattctctctagggttcccattacatctcttagatcactaagatcaacgtgcaaaagatgggaggctcaatcgaaaaccaatcttgtaggtggtaaagcaaccgcaaggaaaagcagttacttagggtttatcctcattggtaacaagatctgttcaatgaagctcgacctaaatggcggcgatgactttgttgacacatcagtgaatcaaataagtgcattcgatgacttcgagatatctcaactctttcactgcgacggcttattgctttgcgtctccaataaacactactacagcaacacggtcatggtatgtaacatgtacttgggggaaactaggttgattgaacactgttgcttgttggagggattcgacaacttcggctcgtatgctttcggatatgatagcagcaaaaaccgtaaccacaaaatctttagaaagaaacttgtttctggtggttatgaaatctacagtttcaaatccgattcatggaaagatcttaatgttgatctcggggaatctacagaactttgtgaactaggaagcgtgtctttgaagggaaatgcttacttttcggttataacgaaacatgaagaagaagaactttgggaaaataatttactctgttttgacttcacgacggagagttttggaaagtttctgtctctgccgtttgacaatgtgactgctgaagaagaattcggcattatggttttatcttgtgttagagatgagcatcttgctgtgttatatcaacttgacactttaggtatttggatttcgactgagatcgagcccaataaggtgtcgtggagagagtttttgcaagtagacttgtatacgctggatggttttccggatgcatttacagctgggagattcattgttgacgaggagaagcaagtcgttgtagttttcaatgaagctacagagatcgatctcaaccacggaaacgctttcatctttggaagagatggatacttcacctcttttaacgttggagatactccgccccaagacttcacttcttatgttccaagcttagcctcattgcaaatcgagaagacgggtggctaaaaggaaagcaagagatgactagattgtttcatctgcacttctttatatctctcttttgtttcagtcatttactttcatctccttttgaacaattctgctttttcatgttttttttagcctatttgggatatttgctgctgtgataacatcttgatgcgttttctgttattactttatttcttttaaatttggaagcttacaacaaaaactaaagacaaacataaagagctacttccacaatgaacaaaaggaaactgcctctcctttccacattaatccagcaaaggtatctccatcttccattcttatttcccaattgttgtcatactttcttagtaaggatttggctccatcaactgcatcttcttcaaatgcttctacaaaaaaaccagcttctctcatcctctcataccatttctcttttccttcattcatatctcctgcattcatcaacacctttgttgcctctccttccattagttttctctcttcgctattctcttctttaaatcccgagcttgttgaatccagaaacttccatacatactccagtttcttcgagaatcctgctgcaaagtccgcactactactgcattctccattgttctcacaaagaaccactccttttggccttaaacttctcactgctttcaaagtctcgcctctctcatcattgatgctatgcttcaggtgatgcagcctaaactgagcacacacgattaagttctcgtgaggtgaggtatcaatgagttgtaacttgtcaagtacactaatctgaaggttgatcttgagagaccgagcaaagcctaggagttgagaaccataattgtaacctggtggaccaacagagaaaggtatgtctgcggttagatctgatataacggttattcgaacacgaggaggaggtccttctagtctgcagctcagagcctccaacaaagtgggccattgcataccgtgagaaacaccaatatcaataatatgaagatcctttttatctttgggatcctgtgctaaaatctgcaggatagctgagtttgccatgttgttaggcaaagcaaaccaagggcttacctcgtagaacttaagcagagtcttttgaaacatcttcacttccgctgaagcaaaagtaaaaacaggccaaaaggatgatgacacagaggatgaggaaagatgatgttgcaaagcccgaagaccaaaagctgcaagccgacgattagcatcaccagaagaagaggccagttcagagagaacacaaaggtaatgttgaacccttgatgagttacttgccgtaatggccaaggcacaagggttaagcaacttctctgcccatctcccttccttgttaccatctttggagctcttctcactagacttgattgcttttctcttgctccttgccgattttttcacctgttgtgcctcgagaaacccgtcgtggctccttttcctggactgatcgtttggttgctgaatttcaggtggaagatccaaatcaatggatggagcttctgttaccacttccaggttagttgcttcacaaccaacatatgctgcactaagatcttgactatagctttgaataaaaccatgctccggatcttgagtctgatcccattcccacgtttgagacccatcaaactcgtggagcaaataagaatcatcaaatcctggtaatggggataaggacacagaatcctcaagccagcttaggacatgatctagagtctggtttggtggttctgtttcttccaacaacattgaatagatgatgaaaaaggtataatttgtgagtaggtgatatagtttttaaggtataagataaacaacagtaacaggaattgaaaacaaatggatggagaattctagatgagattcgtatatatattgaaatggcgtgtgatctgcatatataggagtgtgtcaaggactatattaattagtaactacctatggaaaatagttataagacttgagaaaataccatttgaatattacaatttgatttgaatgttgcaagtcaattactctcttcacttattgcagtttgggaccattgtactacactgaatatgttgcatatcaaacattatataatgttatatatgaatagttttatagaagatttgagagattaaattatcaacctgtactatgatgatgttgtcattagtattaaacaaaaacaaggcttagattgtggggacataatatgatgcatgcatagaatctggtgttatcttctattccttggtcaaatctcaacgataactcgtttattgtatagagaagttattacaaaagaaaactacagatttaacactttcaacaacattacattttaactccatagaacctttgaaaaactagaatggtctttgatgaagtttttttttgtctctctcttgttattggattcagtaaggaagaattacatgaacaatacttcttatttagaaggtggtggtgccttggaagcatcttgcttttgatcttgcttagaacctccactaacagcagcggttgcagccacggtcatagctgtagcagctgcaccaagcttaacacctccagctgctttcattgcagccgcaacttttgcaaatatcgccactccacctactaagatacctctcaaagcaactgtgggtttcaccgacatttttttgtctaatcctgcacattttcatatcaaaactttggtcataaagatgttacaatacatagtggaaaaaaactttctcttctgctccaaagaaactttgctaacagacaactaatttcactggtagtagtgtactaaaatctaaatcataagaaccaagaaagctctgcaacacagagagataacatctagatagcagcatatttacttcacaatacatgtcattgagatagcttggatggtttcaaatggcttttaagaacaccaagaactctcaaagcaatgtcaaagagttccgaatagctttaagtgcattcgaacattaacattgttaaactacaagttttcaaataaaaaccacaatttttttccctccacccaattgcaacaccagagctattagcctgattttgaatctaaaatcgatcctaaattaaattgcattgaaaaaattggatctttttaaccacaatcaacgaaatccattcattgaccaaagaatctagaacatgggctataactttgtagtaccaagagcgaaatacaatcaaaaatccacctacgaaactaacaatgctaggaagaagaaagcaattaagatcgtttcagaacctgagcaaaaaaaagtctttttaatctgaggaaaacaaagaggcgacagtatattcgattcaataagagtattcctttgagattcaaccaaaatcaattttcagtctaataaagtttgaaactttcgattcaggttatgtcggaaaaactcaccgtcaatgcgcttgttcctctcttggtatcggcgacaacttctctccttctcagaaaatgctaccgagtttgtaacaatcttaaacgacgccgttgacaaaatactttgctttacggcgtcgtttcaaacactaatgacactttctttcttacggcgtcgctttcgcttctccgttataaatacttgccgtttatgcgtcgtattaagcacttgaatttccaacaacattatactgtatgtaacataatttatgttactcatgaacacaagtttttgttactgatttgagataaacgaactagtgttgtgtgatgtgagctttgcatacaacaacttagttttggtttgcatctctattagttttagttttcttgttttaaaagctatttgctgatgggaatttattgatcttgtgtgttagactgtggataaacagaaacgaaagctggaagaatccgacaaggcactcgaacaaagaaggtgacatcttgttcctaagtttgtttcttcaatgttctcatggaatttgatctccttataggaacatctacgttagtcagtgttacatttttcttcttgagttacacatatagtgttacatcaaccttagtcagtgtttcgagtttattcttatatatcatgagctattgatgcatctagaaacgataccaaaatgttgcatttgtttaccaacttgtgttgttcttgggttttctggtttcagactcttgtacgatatgaagattgtctcacatcataagtcaaaggaagccagaagaaggaaagaattaacaatggtagtagtttttggtcagtttccatatctccaccaattccagagctgaaagtccacatatgtcttccccaaaacctatggaaggttccgtgtacgagaaaatcattgtgaatccctcatatcttctagtttgttttggaatttaggctgtaagtggaatctcaatcctaaacaaataaattttgttaaacttctagttattgcttttgaatctcagaaaagaattggttgcacatgaagaacaaaaagcaggtttaaaaactggtaacgcaagctcatctaaccatatacttttttatctgttcacatccatacacataatattcataagctatacatagccaattattagtaaaattccagtcgtccattctatttttcaccattagtaaagacgagaccatattcactttctatcactttctaaatataggacactagcccatgacttgaattggtcaaaatctctttctctctctcttggtctcattttctctgtcttatatcagcttgtctctcctccctcatttctctccattcccctgcatttccttcccaccaggagaaaactaaggaaccgaactcgccaaacccgtcaaacaagaaatgccctcaggcaaaccttcttctgtcttccctttacatcccaaacctacaccattaaaaccttctagcagcaccagcagcagcaacaacaacagcacaaaccaagcctgcgccgcctgcaaataccaacgcaggaaatgcgctcccgattgtcttcttgctccttatttccctcacgaccgtcaccgccaattccttaacgcgcataagctctttggagtcagcaacatcaccaagatcattaaatcccttacccctccagagaaagacgcagctatgcatacaatcatgtttcagtccgatgctcgtgccaatgatcccgttgatggatgctatggcatcataaaaaagcttcaataccagatcgaatacacaagaaacgaattggagattgttcttcagcaattggctatgttccgtgaccgtgctcatcaacatcatcatcaagaaccgcatatccagatgcaagaacaagaggatctctcgagtttttcgagttcttgtgatctaaacaacaacaattcgattccttacaattaccctctgaatcacattcaagaaccaaatcaacaacaatattgttcttccggtaataacttcagtgggttacaagaagacatgtggtgtcttcaacttcaagattcatcaacgatagtgaatatgaaggctggtttcattgatgaatgtgaagacgtaaagcctgtagaagaggtttctagcgaacgacacgagtttgagcctcatgaagctttcgttgaacaacggaaactcgacttgccttccgcacaatacatcatttcttcttagctttttttcttcttcttcgttcatacagtttttttttgtttatcagcttacattttcttgaaccgtagctttcgttttcttctttttaactttccattcggagtttttgtatcttgtttcatagtttgtcccaggattagaatgattaggcatcgaaccttcaagaatttgattgaataaaacatcttcattcttaagatatgaagataatcttcaaaaggcccctgggaatctgaaagaagagaagcaggcccatttatatgggaaagaacaatagtatttcttatataggcccatttaagttgaaaacaatcttcaaaagtcccacatcgcttagataagaaaacgaagctgagtttatatacagctagagtcgaagtagtgattgtcccttaggggacatccgataaaattggaacgatacagagaagattagcatggcccctgcgcaaggatgacacgcataaatcgagaaatggtccaaattttttttgcaaaattttccagatcgatttcttcttcctctgttcttcggcgttcaatttctggggttttctcttcgttttctgtaactgaaacctaaaatttgacctaaaaaaaatctcaaataatatgattcagtggttttgtacttttcagttagttgagttttgcagttccgatgagataaaccaataactttgcttagatctaattcattccgttacacctctgatggagatggaaggttcttaataatgatgccattttttgggtaataattttgaattagaatcaagggtataagattcataattaacatcacttaagcaaagttcgtaatatacgaccacaggatataatttttgaattcaacaaaattcattaaaaattcactgtaacaatatatatagaaccagacaaccaaatttaaatcgagaaaagtttctaactttagtagagaaaaataaaaatttgaatgtttctttttttgtagaggtcacaagatcacatgcccatgctggccatatcagggacatggtttggagtgttctcgtctgccttcacaagcactgaggcctctgttgttgtcaaaagcaaagaaacgctgcattttgtacacacacacacatgataaggagttagtttattattccacagaagcaaccaaaggttttgagtttgttaggacactctttacctagcagcatcggttaaggcggttctgatcaccttgactgggtctatgattccagctttcaccatatccacatatttacctatggcaacacgaaacaaaaacggcagacactttcagagatcgatgagatttgcgattgataatgttctcaaagacactaagtttctaacctttggctgcatcgaaaccaaaattgcaatcgtcttgctctaataacttgccaaccactaaagaaccatcgtaaccggcatttgcagctattgtaaatgcaggagcctacacaagattcacaacatcatgtcaggttttacagtttgggacatggacggaaatctttcatcaagaggaagttagagattattaaccttgagagcattctgaacaatctgaacacctcttctttgatcctcgttttcagtttgaaggttgtctaaagcctttgtcgcatataatagagccacaccaccacctatttgaaatttcctccgttaaaggcacatcatgtgagctatatcagagtaaatagagagaagatgcgaataatttctattacccggtatgatgccttcttctacagctgctcttgtggcgtttaaagcatcagtgactctgtcttttctctctccaacttcagattcacttgcccctcccacctatataggaacaaggcacatatcagctacttttcgtatgcaagagtttagaaagaccgattgatgggtgattgactaaccttgaagactgcaacaccacctgatagctttgagagtctttcttgcgttttctcttgatcaaaagtggatgtactcttttcattggctgatcttaactgtagagcatgagagtaaaaaggattgcttctactgtataaagaatattctagtgagcaagattcatgtcagagatattgtaagaaaataatcatatacctcttcacatctttcttcaattagctttttatcaccaccaccatgtaggataatagtgtcatcacgggtaacggtaacctagtttaaagaatttgtgttagatttgaatcacacaaaagcaaaaacagaaaccagttatgatttctcctgttaccttcttcgcagttccaagcaattcagggcgaattttttctagagatagcccacgctcctcagagataacctgtgcataaacaagtgagttagaaaatgaaaacgtgacacaaacataactattatgttgtttctgagaaatttctacctctgcaccagtaagaactgcaagatcatccaagcttgctttcctgttgtcaccaaaccccggagccttgatagcacataccttaagcccaccatgatgcttattgagaataagcatagctaatgcatcactctcaacatcttctgctacaataagaagtggtctactactctgcacaaccgcaaacaataagagaaagaagtgagtagttttcttgtagccaactatagaaaccgccaaaccggacttcagaacatagtattctagataatcaagggaatgctttactttcacagccgcttctaaaactttcaacaaagagttaatgtctgaaatcttcttctcatgaatgaggatgatgggattttcaagctcctgaaaaacaagcacaggtagttcaataccctttctttccttttcacacaatactaaacacgatagatttcactcacgcatttctgggtcttctcatccgtgataaaataaggagaaatgtaacctctggctagcttcattccttccactacttccagctcgttatctaaagtgttaccatcctgggtatttgaagaataacacagcgatcagacaaccatcaagtgatctattataaggcatgaaaagaaaagtaagcttacagcaacagtgataaccccttcctttccaactttctccatggctcttgcaattagttcccctatttcacgctccccatttgcagatatagtggcaacctatcaaaggaacatatgcagtagcagtaatagatcaacctttggtatagcattcacaattcctgacttatgaatatgtttctaaattcacctgtgtgatctcttctggggtgctaatcataacagctctgcttttcaaatcagagacaactgcagcaattgccatattaattccaacacgcaaatccatcacatttacacctgcagccaccgacttgcagccttcgatgagtatcgcctgagtcaaaacagtggcacaagtggtacctatataacgaaaggaaggcaagcagaaattaagactttactattatctcttcaccgtatgttttcaataaaaacttatccatgattatgaactcaaaagagaaaatattaccatctccagcaaccttgttagtggcacttgcaacctgtttgacgagttcggcaccaatgttcttagctttagcttgaaatgatatgctttttgccacggtgacaccatcctttgtgatctttggtccgccataactgctctcaattatcacatttcttccctacaccacagaattaaaaaaaaaagatattgaatttgaagactgtttcaaaaacaatccactctacattgatctaaaccttgtgagaacgaaatatatatacctttggtcccatagtgactttcacagcttctgcaacctcggatacaccctgcaacatagctgcccgagctccgatcccgaaactgatatccttggccgcatagtttctgctacttataatccgcccagaaaccttcatggtaagagagaacaccaaaagaaaatcaaaatcggaattaattagtttgatacagggtacggccaattcaagctaatcattccggaactagaagatcttctattgcatctgaaaccaataaaagcagagcaattttgcaaattaagtagcttaaggtggagattttgatgtaaaccctatttttttcattgcataaactatcaggactagtaatttgacacatttctagcaatttctctgttaccaacaagaatgcccataaacgaaatgcaatcaaactcgcaaaaagacagagagagttcacgaaactcaccagtttcctggaagtagacgagctgcaagacaatcaaacccagaaagaggaagaagaaaattaagctctgctcatcaaaaaatattgatcgagaaaaatacaagttttgaataagttcgttgaatgaaagaacgaaacgtacccaattgaagaagataactttgatagcactcgatacatttccgcttgcaaagaactagagaaggagacgcttcaagggtttagggtttttctggggtttcttaatcaaggaattaagttccaacctccaaagagtgaaacttttttcttttagaaaagctaatagtctggaactttctttgtgctctgtttctgcatctcccataattaggtttacagtttcatccgttatcttaggcccattatgaattttccaatggcccaaaaactctatgctaacatgattacactataaacttgcaatgagaacctgaaattctcttcaatcaacaaaaaccaaactgaatttcacttaatcaaaaaccggtttttcttcaagtaacattctttttatcagatacaataaccacatcactacagaactcgcaaacaaatcatgagtttttttgtttttgtctgcatcagaatcttagtctaggaacatacaagatcactttgacacctgcaagagggaaccaatgccatcggagacataaaacatatggctctcggtgaatctctctgatcaacaccaaaactgagagctacctttttgaaagggtaacgaattttaagtttctagcttcgtgggctagcacaacagcttaagcttgtatacttctttgttctatgcacttgtatcaatgggtacgttttttgctggagatgaaccagagctactgctgctgctgctttctccattggttgtaacctcggattgagctgtagagttcattgattggttgctatttgtgggtggtgcttgtccttcttccgcaagctttttgaggaggttcatgaccgttggaatgaatttggttgacaaagagagaagtccaggtagctgttgttgatcatagatgaaacattggcatttcggtgagattataattgagatcaaatgaagaacaggggcaaaagtaaaaatatggatgttggatatcgtgctcataccacgccgttttggaattctcctgaaatatttaattgcacccacaaggctttggatacaaggtatccgacaaatagaactaagagccatagaggatttctgccatgagagatgcaggcacgaagagccaaagtgagtacggaatcttgattgtatgaaaaagccgccgagtcaattcaaaagaatggacaaggagggtaccttaagagagtcataaattcattaaatccaagaacaaccagggcaaggattgcccatggaggtggcagccagttgttattccgtcggttagcttcctgaaatccaaggagactttattcagattgaaacctcaattatttttccgggtgttagctgattaaagaacagatgagaaaggagacaagaagctagaaacgacatgaccaaaaaaagatattcaaaaacgttttgtagcattgccaaattttaacatcagctcatgtgaatgagcaaacggaagatatgcttgaaagtgtggattgcaaagattacctgtgcagaaatggcctgtgtaacggtatattctgtctcgttcttaaattgcctccacagtgatttacactgcacaggtgtgatcaacgtcttttctggtgcaacctgataataacaaggtaacagtaaggatcttttatatctcaaaggtgtgagtactaaatatgagaccttttgtgttttcattatatacagtgagtaaggttttagtcaccttctcccaagtgcttgaggcaagtgaatcaattgtgctgatgctcttgctagtagcattgttgcccgtagaattaaacagagctagcgtcaatgtcttctcaatattgtcgagttcatcatccaagcgtataacagccataacagacagcagcttcaaggactgaaaaagagaacaagggtcatatcaaaatctcgagaaatttgcgattgattcaaagaataggtgctgagatattgctatatcaggtaggtctcataccgcagaacgagccatttttgtaattgctctgatgtcctcctttccagtccaaacacgtggcattgaatcagaatcatggctgaagattgtagcaaatctggatagaagtttgtttaatcagaaagctctgtaagagatggaagttatcggacaaggaaatgatgaaagacaagtaaaatggtgacacctatccttcatgcgcatcatcgctcttccagcctcttcctttgccttggtttcaacaatacctcgtgcatagttctcgagatcagcaagcattttactccgtgtttcttcgtccatttcgaaaccagataatgcgttggagagaccatagacagccaattctccttcccgtctaagtagctttcttattgctggccatgtttcatcattagccccatccagaagagcttccaccggtccagataaggctacatttagttttgactgcaatgaaaattatctattagaaatgtccagatatgagtttacacctgtttgatggtagataattcagaccaatatgtatggctttcagctgcttgagaattctattttacctcatacagagtagtcagttcagccaactttgcagtacggacagaagagatatgagcttcaatatcacgctcaagcttttcccgagttttagatgtatcccattttgcttgttcaataacagcctctgcaacataacatttcctttgagattcccattgagttcagatatcgctttcaacatgctatctatatcagaatattttcagcagtaatagtaacaatacatgataccttcacatcctttatcaaacttagatatgcatgactgagcgcaggatttcgcagatgatgaaaacccttctccagcatccaaggccttctcaaaagcattcttgaagttttcaagtgctccagccctcaaatgtccaagcacgtcttggaaagttggttgaacaagctggatagacaataagaaaatgagtgcctaatagtaggtatctggttttttacaacgttggaagtctctgaatgtttccaggcaacgcatgattgcaacaaaaacaaagtataacagtcacaagttgagtatatgcattacttgcaataacttttcttgcagctgttgcctcttggatgatctaacactttcttcaaagtatgtcgcttctgtgtcatacctattgtaatcatcagaaacacgtgaaaaaaactcctaccctcctagaatcaatatatgcataaaaaccaatagttcaataaagccagcacacaggtaaatcctgtgcagaaaaattcagcacgatatgcttactctgataagcttgcttggagaattgagctcagctttcttccaaatccggaaacaggaccagactgtacagcctcttccaactcgcgccaattctatacaataatttagacatgaatattaacgaaagggccattgaaaaggctaaaccatgaagcacagaagcagtattaaggaaattcacctcattcgcgataaaactagagaatttttcattggcaatttcctcacatcgcacagttgctaccatgacctgcatatatggagcgcataaataacaagaccagaacgaatgatgatgtacgagtgacaggagagagccttaagcaagcaaaattaccttgtgtgctggaagatccaagtctttgttgtctttgatgacttgccacatctgttttgcactaaaagcaaaagcattggcagggacaactcctcgtcgatcaccagcaagcccgccaggtgcgacagattggaagaaccgttgtctcaaattgtagacctttcatttacagaaaacattatagaaaaaacattaatatcacctacaagccatctattgagcaataaatcacataaggtgaccctggatcttctccaaaatggcaaaatgtaaagctaattgtaaacagacctgctctttgaattgctcttctttttcttcataactcgagagagcaactacttcaacctgtcacacaagaaacaactccatatcttgatcctagcaaaagaagaatgatacgaagtttttctccaaatcaagcagacttacattgaagaaatcgctaagtggagtttctttgtgggcctgaggcttgggaactgaatcccatatctgcattttaaggacaaacattaagggattgctctattagtcaaagtacataaaggctaagactgtcttctaccttttgaatgtcttccctcagcactggttctaaattttccagtggcgtctgcaattaccctggaattagaaacaaccacaataatccagagattcagaatgataaaggacagaaaacccaaatgcatacccgtgttttatctcttataacaaacatcaaagttgtcttccgcggactaaacaaccgcatcataacctgattgcatgtagaaaagcaaacagtcttgagacttcggaacagagataactcatcctgataagaacatacaggcacatacctggaacacagtctttaaaagaggtttatttgctgcttgttcccgaccaatatcatgacaccacctgcattacaaatccgagaagatataagataaagacggcaaaagaagtcctgttatctattaatatcaaagaaaacaaagtaaagaacaccacttacatgtttataagaactatgtctgagactgcaagtgcaaaaagagcactctgtttctcgaaagcagtatcatcctatccatatacaagaaaactgtgtaagtaaagctattctgcactgacacattctcttttagacaacaatttctttgtgtgagctccttaagatttatacagtgcatgaaaccatgttatgactctaatcagtacaattcaaatttcatcaaagtcattcacaattagtgcaaaagctaaataaatactaactgggcgtgagatgctaaatattaaaagaaccgaatatgaaaagggccaaggttacacacctcaccacgctctctcccatcggtaccctctaaatccatcacaacggtgcaaggctcaataccagcgcatctagcaatccaaattcccttagtcgtctgagacctgaaaacaaagaattgcagcggaaaaataaatataaattagaagctaagtattcttctgatgaagtgtatacaaaaattagaacatgccttcctctaaatgcatccatttctctaaagttggttccaaacaaatgattcaagagcgtactcttccctgcaaattcaaccagaatgacataaaatcagccaatatacaaaaaatagattccaaagaagccactttttacattcaaggatttgatacataccactactttgtggacccataatcgagacaaccgcgtatgaaagaccacattcgtccaatttaacctccttgatgaaatgatcaaccccagaaacattaaagacaccatccccatcgataagctgggtagagcaagcggcatctgcaacgtccaagcaataaagaaagtaataaaattagcactatgtacaagtaagcccaaagtgtctctgaacaaagcaagatctgaaattcagtcttcctattcaataacatcttcaaaatctaggctttaaatcttccccacaagttgcatcgagtgtctcctttaaacccagaatccttaatttttgattgattcctcgcattttcgaatcactaagataactgttaatccactagaaacctagccaaaaaatttcattgaaaccccaaatttcaacaacaattaagcaaatcgaaactcggaatcatctaatacactgatctgctactaaatagaagaaagaagaatcaatcacctaccatctaatgagcaaaagagactatcaaaattttacatcagacagatcacaatccaaatcacagagcttagaaagaaactgaaatcgaaaacgagtaacgcttggtcaaaacgaaaactgatcagatcaaagcgaaaaaacggatccacgagatcaggaacatttatgagcagagaagagatggatatataaattacccattatcgctcaacgaaacgcagatagagtgatgaatgacgaagagaatgggacagagatctctaggctcgagctcgttattgatgcaccggtgctttgacgactgcttctcctaaggtcataagagcttctctctaatttgacaaaagaaatatgccaaaaagtgttttttattccaacgaatttttacttttaaaatttatcatatttttacccaacatatatagttctttagggattattattaacaataatattttttacctaatatacatactcttactaatagaaatattgaccaaagatatgaatacattgatttaaataaaagaagaaaaaatactaatttgatggaaaaataattttcaggtaataacattcagataattttcagatatgaatacacattgatttaaataaaagaagaaaaaatactaatgttcagtaatattattatctttaacgaaggaaattatgatatactcattgcattggtagacgataaagtcattatgggtcccatgtaggaaaaatttccatggagggcaattggctggacaatactatagtgggccctacagaaaagcccaatttttagttgggatccacctcgccgtcctcttctcctttactaaagtttggacggtgtgatcggctccgatttactaacacgtggactttccaccgtccgattcaattcccgttgaccacaatttaaagatctttggtttgcttgcttatatgagctttgatttaaattaacacgaaattcatgttataataccaagattttcctaagacaaattagactcaataaacaaatcttttgtgaagaattttcttaaatcaaaagatggtcaactatgcatatatatataggtggtttcaacgtcaaatgtatataccaacacatcgcaaatacgatacaaaatatacacggggcccaaaactattaactaaaggctatatagaggcccagtttggaaaaagaacggagcaaagcgtttatgatctccagagagaccgttgtgttacagacaaaagccgttagtttcgttatgtgatgggagaacatgttgttacagttccgagcaaagacttttttcaacaacattgctcaagattctctggttactcttatcaccaaacgagttggattgggttacaggtttttgtcttcgttatgccaaccaaagaacacggctttagattccgaaggttacaagatactttttcagacagctgcaaaatcaggctccgtggtactgggaaagctcgctcatggacacatgatcaagtcctccttgaacccgtgtctgtacttgctcaacaatcttctgaacatgtattgcaagtgccgggaattgggttttgcacgccagttgttcgacagaatgcctgaacgaaacattatttcttttaattctttgatttctgggtacactcagatgggattttatgaacaggccatggaattgtttcttgaagctagagaagctaatttgaagctcgataagttcacgtatgccggtgcattgggcttttgtggagaaaggtgtgatcttgatttaggggaattgttgcacgggttggttgttgtgaatggtctatctcagcaagtgtttttgatcaatgtgttgattgacatgtatagtaagtgtggaaagcttgaccaagctatgtctttatttgatagatgcgatgaaagggatcaagtttcatggaattctttgatttccggttatgttcgggttggcgcagcggaagaaccgctaaatctgttggctaaaatgcatagagacggcctaaatctgactacgtatgctctggggagtgtgctaaaggcttgttgtattaacctgaacgaaggatttatagaaaaaggtatggcaattcactgttatacagcaaaactaggaatggagtttgatatagttgtccgtactgcattgcttgacatgtatgccaaaaacggaagtttgaaagaggcgataaagcttttcagtttgatgccttcgaagaatgtggttacgtataacgcaatgatatctgggtttctccaaatggatgaaataaccgatgaagcttctagtgaagcctttaagctcttcatggatatgcaaagacggggtttggaaccctcgccatcgacattttcagttgtgctcaaagcttgtagtgcagcgaaaaccttggaatatggaaggcagattcacgctctcatctgtaagaacaattttcagtctgatgagtttattgggagcgctctaatcgagctgtatgcgttaatgggttcaactgaagatggaatgcaatgctttgcttcaacatcaaagcaagatatcgcctcatggacatcgatgatagattgccatgtccaaaacgagcagcttgaaagcgcatttgatctgttccgacaacttttttcatcccatataagaccagaagagtatacagtttcccttatgatgagtgcttgtgctgattttgctgcattaagctcaggagagcagattcagggttatgccataaagagtggaattgatgctttcaccagtgttaagacgtcaagcatttctatgtatgcaaagtcaggtaacatgccgcttgctaatcaagtatttatcgaggtccaaaacccagacgttgcaacatactcggctatgatctcaagccttgctcaacacggttctgctaacgaagccttaaacatctttgaatcgatgaaaacccacggaattaaaccgaaccagcaagcctttctcggtgttctaatagcttgttgccacggaggattagtcacacaaggactaaagtatttccaatgcatgaagaacgattacaggattaacccaaacgagaaacatttcacttgcctcgtcgatcttttaggtcgcacgggaagattatcagatgctgagaatctgattttgagctctggttttcaagaccatccagtgacgtggagagcattactgagttcttgtagagtttacaaagacagcgtaattgggaaacgcgttgcggagagactgatggaacttgaacccgaggcctctggctcatacgtattgctccacaacatttacaacgattctggagtcaattcttcagcagaggaggtgagagaactgatgagagatcgaggggttaagaaagaaccagccttgagctggatcgtaatcggtaaccaaactcattccttcgccgtcgctgatttgtctcacccttcgagccagatgatctacacaatgttagagaccatggacaatgtagattttgtagattacactcttgttcatttttgttctgttacatgaaaatttaatgccaattttctcttgctaagattctgataaattacgaaaaatgccactgttaatttattaaaattgggcctgtggcccaaagcccatgtatcctcgtctttctcgtacattttcgaagagagaactgtgcgacgcttttcgcaatctcggagaagggaggaaaaatggcggccaaaaccctaatcaggtcaggagcttcgttgatgaatcggtttctaacgaagccgacaacgaatatcgtgcagaacaatctca

SEQ ID NO: 51 - DNA, 52232 bp, Arabidopsis thaliana
cacttaaaaactagctttaaagcatacggtttgtttcctgattatgttcctaaacttgttatgtttccacctgcaggccaatgactctggcttggcttcgtatgttgctggtcaaattgaccgtaccttgagctggaaggtaagagaatacaacaaattttcagataccacagcaaaaccaaaaacttgattcagattgctctaactttcatctacaaaaacaggatatccagtggctccaaacaatcaccaacatgccaattcttgtcaagggtgttcttacaggagaggatggtgagtttccatttgccaaacaaataatttcaacactctagtgtcatagaaatacctgacaaggtcaactattattgtccccatgcagcaaggatagcgattcaagctggagcagcagggatcattgtgtcaaatcatggagctcgccagcttgattatgtcccagcaacaatctcagcccttgaagaggtagatcattctcgactacaaacataaatctgtgttctcgataagtatttatgtacaagcacattagctttgttctcttgtgttcaggttgtcaaagcaacacaaggacgagttcctgtcttcttggatggtggtgttcgacgtggcactgatgtcttcaaggcacttgcacttggagcctctggaatatttgtaagcatcacatcatatatccattcaccagaaagttgcttaaaaacagtaaatatttaaaatgccttctcaatctcagattggaagaccagtggtttttgcactagctgctgaaggagaagccggagtcaaaaaggtgcttcaaatgttgcgtgatgagttcgagctaaccatggcactaagtgggtgccggtcactcagtgaaatcacccgtaaccacattgtcacggaatgggacactccacgccatttgcccaggttatagagaagaaaaaaaaaacagagaacagaaacaacacggcaccaaaacgtattcatattctgattgatcactttgcttctactctgctatatttatatctcgaaaaacttgtttctccctatatcggatcacaaaaacgtgcgtagagattctctgtaatgctatttggctacattttacctttccgtttattcttattgcttgtacaatagatgttgattcctacaataccaatgaatactaaaatctgttcccggaaaactagtatagtcagaaaatcttacattgcacccaacttccacaatccaaacacagttcaaatcttatattaacagcagccaaaacctcacagaaactagctaccaaaagagcacaaaagaatactataggagaactcagattaaggaaagacaggtttgtgagatttacaataccttattgaagaagaatgtaagcgaattcatccttcactttgtgctgggctaagtattgcatcgaaaagcccaaaataatttggctcacgaattcgaaactcttggatttatgcacttttctgaaaaaaaaagaaaaacgattggtttacgaattactactatttttctacgagattaagaacgataatatgtaagaaaaatctaagacacacaccatccatcagatttttgtccgtatctcctcatcaattcttcacctccagcttctcatccatatttctttctttccaatgcaaacaagttttcaactgttaaaagataaaccaaaaactcacaagccaattaatctatcagaaatatttaacttttaaccaaataaaaacgttgagatatatataatataagcgttccttaccactcacacacttcatctctccccagagctctattcccatcaaggtgtgtgagattctctgctaagacaaaccaaaaaccagattgttttgcgttcatggacatgttcctctctggagattagaatcgtagctatgactatgtctgaatttcacaagaggtagctaactcaggcctttttgctcttttgacagaaacacacttcggaagatggagatcactaacgttaccgagtatgatgcaatcgcaaagcagaagctgcctaagatggtgtacgactactatgcatctggtgcagaagaccaatggactcttcaagagaacagaaacgcttttgcaaggatcctgtgagtttttcttttcttttcgtaagacaagaaatactgtttgttattggtttttacaataggtgtgatgcataccttgggctgtttaatagctttcggcctcggattctgattgatgtgagcaagattgacatgacaaccaccgtcttggggttcaagatctcgatgcccatcatggttgctccaactgccatgcaaaagatggctcaccctgatggtaaatactgagttatgtagagactagagagtgaaaacttgttttagtatcgctagagacaaagactaaggcttgttctaacgactctgtttgaaactaatgtaggggaatatgctactgctagagctgcatctgcagctggaactatcatggtatgttcttatatcattacgaaatatatcatatagagcaagatttcttctaaccttcttggtttccggtgtttggagcttttaaatccgtggcccatgcatacccatgtctctggtttaagttattttcatccatgatgtttcagacactatcttcatgggctacttccagcgttgaagaagttgcgtctacagggccagggatccgattcttccagctctatgtaagttatctcaagagcttgttgtacatcctgaaaaccccggtcacacttgatggttcttatgttataatctttgagtaggtatacaagaacaggaatgtggttgagcagctcgtgagaagagctgagagggctgggttcaaagccattgctctcactgtagacaccccaaggctaggccgcagagagtctgatatcaagaacaggtaaagccaagtcatttgaaatatgacaagagtttaatggattttaatacgtaaacacagctagaaagtgtaacgttcttctactacagattcactttgcctccaaacctgacattgaagaactttgaaggacttgacctcggaaagatggacgaggcaagcatctatcagatactatccagtcctataatctaaatatgattctcacaaagcaagtcttaaagcacacttgctatgtttacctttcctgagtgttcctgagcttgttctgttttcacctttaggccaatgactctggcttggcttcatatgttgctggtcaaattgaccgtaccttaagctggaaggtaaacagagtagtttaacagataaacaacaaaccgagaagttagtagaaacttgattgttgactcgttgtcacttcattttcacgaacaggatgtccagtggctccagacaatcaccaagttgcccattcttgtcaaaggtgttcttacaggagaggatggtgagttaccatctgacaaacaaatggctacttcccttaagtttaatagaaaacacctaaccaggtcaactataattatcctcgtgcagcaaggatagcgattcaagctggtgcagccggaatcattgtatcaaaccatggagctcgccagcttgactatgtcccagcaaccatctcggcccttgaagaggtagatcattcaagagtacaaatgataatttgtgttgtcaacaattgtcttttgtccgacaaattcagctctgttctcctgtgttcaggttgtcaaagcgacacaaggacgaattcctgtcttcttggatggtggtgttcgacgtggcactgatgtcttcaaagcacttgcacttggagcctccgggatatttgtaagcatcatattctcgttaaccagaaagctgcttgaaaccattgaaattaacacattgttattataccatctcaatctcagattggaagaccagtggtattctcattggcagctgaaggagaggctggagttagaaaggtgcttcaaatgctacgtgatgagttcgagctgaccatggcactgagtgggtgtcggtccctaaaggaaatctcccgtaaccacattaccaccgaatgggacactccacgtccttcagccaggttatagagaggaaaataaccaacaagcagagaacagcagcaacacagaaccaaaatattggctaaacttattcatactctgattgtacttggcttctactctgctaaatatctcaagacttgtttctccctctatcagatcacaaaccaagcctagtgattctgtaatactatttggctacttctttcttaaggccattcttatttctaaattccatgtacttacattcccacagatcaatttcttgtgattcccagataatacgatgaacatatgcatagctataaaccaagtgagagtagtagatgaaaccaaacttttattattaatcaaaacacaaacgaaggagaattacattgacctattgaacaaactgaaatgtacaagagaagaaagataagcgttcattgacgtatacaagcacacaagtcctacagaaacatgagtagtactcaaatcagaaaccaagaactaaccattcaacacaaaatcttcttcttatcatttaaaacggccagatgtcagatccaccgggtttctccacaagaatccgattatactccggcctcgacgtctgccaaaaaaaaagaagcagatcaacatgagaaaaaatgcgatccggagtcgaaatcgagctgattcaaaagaacatagccacgataatcagatgaatttaccagatctttgaaaataacgtaggtaataagcatgaagagcacaaacaggatctcaaactcagctaatcggaagaaatagaacactgagtcaacaaaccgagtcagaagagagtcgtctctcctcataccgactcgattagttccagcacgtcgcccgatcatcgtcggtaaaattctccctccggctttaataacagaccaccgtcgcttctcgttagttctctcccaaatcttaccggcgagttagtttttccgttaacgaataataagttgcaagtctttttgcttttatcaataaagcattttacaaacttacgaaaatatgggccgttatttttaaaaggttaatatatatcatcagagcccaataagagaggatcaaagaaacgacaagttgttcaccgtgatatagtaaaaacagttccgtttttaataacgtcgcttccacagctgaagaaacgtttcctatctttcgaagttgcatctgaagtttgcaacttggtagcttaaaagcttagtagttgttcattgaaaggatggtgcgttagttgatttctctgtgttggattagatgattacagcattcttcacttgacttggcaaccatagttttgtttgtgaagtgatcattatggatatatggtccacactcaaatttcaaattagcgttttcaaggaccgggcctggatatttgagccgaaggtgtacattgtgtgtgggctcgctttcttcaagggctttatcactggccgggttgagtacgaattccaacaccaacaatcctgatcagaagttgtagtcccaatatgtcggccgatcgattttgtttctctctttgtttctattgaccttatcagattttccattttggtttcaaactccaagtgggtccaaaataagaagcatcgttttcatgtcgttaagtagatgagaagagaatgttaaagagagaagatatgttcttcttcttcttcttcttcttaatcagtgagtgccctatgagactgggtgtgtggtacgttgacggtcacgtggacgtgtccttctctgcccttcaaaacctctaatacgtccagaggctaatgcgcgtggctgattatgacattttatccctttcgggaatatgtcgatgatgaaagcaaattgaagttaaagttaaatcccaaaagaaaaataaagataacaaaaaatgaagattggtatgctttatccattttgtggctttcactcatcatgtgcttagttttcatatcatcatcttaagcggtccatggtgacttgcctccagacagatttttctttgtcgcgatattgtaagatatggaacctgattaatactttattgtaataacttgcgaaactatatttcaaatgtcctggataaagttttgaaacatgtcatgcttaaatatcgttcatacaaaagttttgtaacattgttttaagccaattatagatcagcatatccgcttctagatctatggattcaatgaagattacgtgcttacatttttcatttttattttgaataaccaagagattcccaatttttggtttgcaatcccctcgaagcagggcttagagtatgtcaattagtcacttcccaaacagcaaggttcgaacctgatatttcgagacgtattatctatctttggaaagtcttctaatacatcaatatagctactgaagatgagttttgtgttgtaaacgtgttcagccgaaaattcgtcacaatatctttttttttctttccttggcattctcggtcaatgaacatctaacatagattctattttctatcaattatttggtacatatttgattcacaagcagattagatcaaacgtatttttaatccaaataaatttagtttatataattaaactgctttttctctttctgcatggttcgattcgaattaggatttggtttttcgaatatagaaataatgaatccagttaaactatagttatttaggtttggttcatatcgggtttgatcggatgaacaccaagtagactcctatgaaactaaacccaaacaaacaaaattttagtatgcagcagcaacaacaacaacaaaaaaacgtacaaaaaaaataatgtactattttcctttaaaaaaaaaaaaaaaagattgtactatagaataagtatagaacaattaaatactagtacacaaatgttattaaatatcatcatatatcaaagacatgattggcctatcttaacgctgaaaggtcgacctccacacaacacaaatctcccagctgtttaatgctgttggtttctttctggggagctttacattatatatctataaagaatgtatatattcagcatcaaatattcattcacaagaatcgattattctatgaagaagatcgatatccaagtaaaattcgaatctatattattggatcgatgagactaatatatatggtagttactagttagttaggatattatatgctaaagttatggaagtataagtaatgtggcttgcattattggcattttatcattttataatatatgaggcacgattatagtggtatacatcatcttgttcgtcactctcctccaattcttcacattttaaaaccaacaatgaattttaaacttattttctatttgttgcaataatcatttatcgctttgacgcctttatccaaaacaacgatcttatgccaatgtatgaactacgaacacgtgccccagtcaagatagagtaatactttctctctttttcaataatttatcatatactttctcttattttgatcagtgacgacgattggagcagaaataaatacataaaataattcgggtttgaattaccatatacactcatttgacgagtttaaggagtcccaatttagaaataacgacgtcttactagagatattggttatgaatgaccaaaatagtttctatatatttgagaataagaggacacgaccggtttgttttgaataaaatcgaaaaatttagttatgaactctatgtatatataccgacttaatttcttatatctataccgatcccaaatatatatacacacatattttctatctcttataaacgtaaacagacacacaaaacacacatataggtaaatccaaaaacaaaaaatgcacatagtatatgtctgtgtgtgtatcctttcaatgaaccatccatttgtgtcgagttcccgatatagtaacacttgtaaatttcaataaatattagcccactagaatgctgtacaaactttaatcatttaatttcaaacagttgaaagcataagggtcccctttaatatacttgtattaaattatttttttgtatctttggacatttcaatatactttagctagcattcgatagtttgggttcgatggctgatcgtaactatcatttgctgcgtttgccacctggccatactcaattataaaaatcatattattattttatagacatataaactatacgacatgtattgtcaaagagagtatccttggacatttcgttgagctaatcatttgatgcttttttgcttatctgactataatcttaaaccaatctcgaagcaaaagagcaatgactttatagaaatccgaatttcaccctcaaaaaaaaaaaatatacgttaatagttttcaagttaaaaaagtacgttaattcgtattcattattaccgtttttcagtaaaatttcatatatagataaaaaaaaaaagtaactgtttacgggaaaaaacctcttaacgttttgagctttgtaatttctgcatgaaaaaaatctcgtaaatttttggtgtgtcgtctttttcatttttcaataacacttgtttgcataattttcattccgttgttccaaatgttttccatcatatattactaattagaggaacatacattttaaaacctggtgagcacctaacattatttggtgtggtctcttctgtttaacgaagagccaaataaagcgccgcaaaactactcaatggctagttaacacaaggatgaacaaattatgcagaaaacaaaagagagagagatcagcttttttatatatgtctataagctagtaagctacgtaacactattttaagctggctaaatgatttatttctgattttttaaaaaaaacataaatacttataagttttaatgaaaatcgtattatatattgtagtttttttgtggctctttgcagggttttttttttcaatctatctgtataatcttagtttgtgtttggcaattccgctattccattgatcacgcaatagtacttcccacatccataaagtttgcaaccaagttatttttttcacgttaattctcttaacaattgcaatttgattttcttattctttttatttagattggaccatcactatttttacactttggcatgcatgttaccaaagtctacaattctagaaaaaggtattaaagcacacaattgctacatgtgaaccttacattaccaaccacatattttcttgttagctaagaacttttaaaataaattcataaaaatatctatttttataagagaaaccaagatatcgcatttggacgtatagttctccgaatcacaacgccggattttgcggtctatattgggtaagagtaagtagtaactgctaatataaaaatggaaataatcaagtgccaaccttccactaaaggaaagtagttatgcatggattagttgggaaaaaagtcaccttctaaattgggtaaatattgaatatattccttcacagtcgcatatctcttcagtttattaacattaaaaatactgaaacgtggacggcagtcattaattgctaagattatgtataaataattcccatgcaacccaccgtatcatttcgtcagtcgtaaccaatgaagtttttttcgattaaagttttgcacccaatgaacgtccacaaccgttattagtcttttttggccaaaaaaaagtctttaataatatttcaaacgcgtttttattaaactgttattacgtaatactttcaaatacataagggatctcgatattggaagagctagtgtacgtgtattactatttgaatataataacaaaattgaaaaacaaatttaaaaaatcacaaacgacatttgaaatttccacgatacctataaaaaatatagatcatatatctaaatcgtaattaaaatatatctattaaatctttattttatttttcttataaccagaaatctcggaccaaaaattagactattcactgaaatgttaaaataaagtcagagattttacttattagtgggtttcaataatgttagaagagaacgtgaacaaacaaacaaattaataatccaccacatgaagatagatatctccaactttgccaaatatttatgtttctttttgacattttttcaaaatcatgcatgacctatgtcttaacactttttggtgtttgagatagtttcgttacatgtggaagtggaagtgaactaatgtgcttttgatccatgtatatcattaagccattaactaatgcaatattcagtttatgcttctttagctcaccattactcgatcaactaatttcctcttatcctaatcctatatttactatatacatatacacacatatatgatatatgtccaaatacgcatgcaacaaaatttattgtttgtagttaactcatttttgctccccataatcgttcgatctaaaaatagagtaagagtaatttaaaggatgttctgtatatataactgtcgtgcttaaattagtgtaatcgttaacattttggcaacccgcaagactaaagttacaaatttagatatggatcaacacaaataaaatcaagaaattgaacttgaagtctatgcaaactgttgtgtacagagaacctaaggttactcttccctaatagcttccctgattagagttgatctttgataaccaaatgtaaatcattggaaaccaattagtttggaaatgtcttaatctcaaaacaccgaaacacgctttcggacagttgactttgctttctgtgcttatatacttataatcttccaacgataaaagattaccctatcagattaagtgttgcattttaaaaataaaatgcgaaatatattttataaaaagtaacaaatgcgtgattacttatattataagaataatgccgttaatttcgtcacaattccactatttttgattggtctctccactgcgttaccacccaccactcacatatccaatgtatacggttctgcttaccaacataacaaaatgttctttaatatcggtttatgacaacgaccggttactaaatgccatttaatatctaacaggttaatttcgataggtcatattcaaattacatatttacttttttcgacgtgggttaacttaactcgttggtttctatttcgaaattgactgaaattgactttgatgattctcttccatgcaaataccaaaaattgactaactaagcttatacggcgtgtgatttggttaattattaacttttgttttcaagtccaaaagtttacttgatccttgtcttactctcattggtctattatttaaaattctataatcattgattttttaccaataaaatctcttggtgatggcgcaaaccagaaaacgtttcgaaattttattatgtattttattttttacgtcaaaacgtttggatatagaattaaaaccagggagtttaaattggaaaaaaaatgttccttaattcatgcacatatacaaacatatctttgttgtttaatattttatatacttctcattacgatgaacaataagtgaaagaataacagaaaccagctgagctcgaacggctaggctaccctacagcccaaaagctacaagctggtccctcaaaatctttcagatttctagattgaccccaaaaaaaagggaactagcaaaccgcaccccaaaagaaacaacaaacaagaaacagagcaaaaaaaaaaaaacagaggagcagattccggggacgtatatgcagagcatcccactggtaaatctcgctctctcttttccttctagaagcttcttcatcacgtatatgtattttgtgcgtatttacacataagaactcacacgacctgcttcgccaaatcatcggctccgatgaatgtaccgtgaaatccgtacggaacccttgacggaagtttaaccgttgcttcaacctctaagctaacggcgttaactatctgtaactccgatttccatgtcttctcgtcgtgaacgaaacagaggatgtatccttcgtcttcctctcctccttctccggggagaaacagaggctctcctccgtaacggttatcgccgtaaagatgtttcttaacttctccagtagtgagatcaactttagcgaatcctgagactttaggccacggctcggctaaagccaagtaagcgaatttggttttacggccgagcatgtttctgttgaccatccctgcttcgaggttgacttgttgatcttcgttggagatgatcggacggcgagttgattcaccggttttgagattcaggcggatttcagacaggacactcttgagattctcgtcagactcgttgaaaattgagtctggtggagtcatacaggaccctatcacgacgacttcatctgtttctggctcttcccaagcgttccagagatggaagcagaagcaatctggagcatcaatccacttaatgttcgatgaatcttcggcgtatttgtctaaaatcccgaatcttgcgaccttgttcttgtcgtaaaccaccggagacccaccgcggatcatctccggcagcttgaaaacgacttgctggtcaggtacgacgacgaagttctctgtaatcgcgaaatcgtgcatcatcgttggctgatcaagctgaatctcgacgtccggtgatttagttccgtccggtgagaatcggaagtattttaggtaaggctttgaaacgacgtcgtagcttaaagcgaagagttcaccggattccgggtcgactttcgggtgggcaatcattgtggattctaattgtccatcaaaatcgaaccgaccaacggtttttaaatctccattgggagtgatctgaacttggtaaggtaaatcatcctccgacatagccaataaccggccattgaaatagaccaaaccggcgttagctacaccggttccgtgtgccgggtcgactataccggctgcagctctggcgtagaatagcatgagtcgggcaataccggtgtggccgtgaagctcaccgatggctttggggaaaaccggtcgacccaattgacgttcctgaacaaaccggttagtctgagtaaaccggcaagcgtagctagctgaaccgtgttcgaatttgacggcgtgaaccataccgtctccgtcgaagaagtggtgacctgtcaccggctcgtgaagtgggttagctccgttgcgcacatacactcctttgatggaatcgggaagttttccgaccaccggaagattacgccggacgggctgttcattcaccggagcaaaatttccggcgatctgaacactaggatcagccgttttaggaagcgggtgtagcttctcgtggctgacaaggaaaccctccgccgcgtccaacgctgccgccgccgctctctggaacaaattcatctgtttagtgttggattctttggctttgggcttaacaacaatggcgggagagtttgatgattgcttagggaaatgaagagctggaggagtgtgaagcgcagatgaaacattgagcttacgtgtgacacgactggccataggtaaggagctacaataactcaagtcggagctttgagaagacgataatggcggctgagtatgattgccaccaagccatctcccagaaaccgcagccgttgccgtgaaagaagccatttttcaagtgtgttcaatcagtatttggtggttaaagtaagttcgattttgagatgtgtaaaggctctgttttttttcttcttgtagaagagaggagagaagagagaagagagagttggtttgagagcgatgaagtgttgtgaagggtttatataaaccgggaggtgggtaagaggaaaggtggatcccatcagtgtggccacgtgttgaatcagtgacagaaagagggaatggagtgagtgggttatagagggaattaaaaagggtactttgggaaaaaaaaagaaaaaaaaagggagtgtgagtaatgttattatggttcaaagttgagacttgagacctttcacacttagacaaatgcatcacttcaatctttaactccctttgtctttttttgtggcttcttctgtttctaagtttggtaacaaaagcttccaattctttggcaacttgaggatatcaaattctctaatctagtaaaatgtatactcttgagtttgagggttcgagacattatgaggcattgtttgtctagtggtgatttcttttaccgttgtaagatgaagttaagtgtattgaaattttctaaaacagttcagaattcttcgatcaatcaaatatagataaacatatgtagtttggtacgtagtttatattagtgtcaatattcgaactcaaatccagtaaatatgttagtttttttagaaatatatataaacgcatgctatcgacagaaacaaaaattgtgtatatggccatgggtccctaatatataaccacacacatttagtttcattaattacggtcatcaacttggcttatgtcgtggctcaagagcttcttgtttgcagactccaacttggcctattcatctcccacatgaaaatatcttaagacttcacattatatactcatatgtcatagtctattagtgttcaaatttagaagaatagagtaacacaataattggaattttttttggcttgtcctattgcttgagtcatgagtttatgtccgtacaattagatttatgttatacttataatttagagggtgatctccgaccttttttttagggtatagaatctatcaattattcggacgcaagaactctaatacttcgcgatctcatctaatcattatgtaatttaataagtctgaaatagctaacgcaattaaccatacgaaatacttgtgcctgtgtcaatatatacctgaattaaacaaaacattgaacactaaatagtagtacctctttcagttgtctattatcctagaaaccagtttcccaaaaatattcataacttgaagaagtgaacaaaatccttaattgaacactaataccctacgcacgcaatttatctacaaaagtcggtgtgttacatcattaacgtgcgctctctactctaagatattaactttgaattgtctggtgataatgttttttcacttggattttagttgacgagatctatagagatgttcgaccactcctttttctatttggacaacactctcaacagggattcttacatttatgttttatacttttgttatcggattattcttacatttacgtttatattaacttactcaaatacttgttggcaacaaatactcaattaccgacataatttttaaatcatcgtcacttttggatatgtatttgttttcaaaatatgttgtttatgtcaccatgcaaagctttgaatttatgatttacgtggaatatgataattgtaaaagtataagcacaataggttaatttttctattgatcatcatatatagtctatgagctcgagtacgaatccggagtttcttttcttactatattatatataatgaaattactagaatgagaagagtcttgcgactattgtacacatatttaattaacgtaacaaacttcgcgtattatatagtgaagaaatacacatcacgtattattttctagaaactccgtctaataatttaatacaaaagaaacatataaaaatcggattggaagaatccctacaccaaaccaactttgtatgagcatatgatatggcctcgtgtaatgtaaacaaaatcttgcacattataggtgtttttgtacatttataaaattaaatggataaaatattagaaaattgataaaataataagaaactaacacgtaaaaagataagtaaaaggacattagggtcgatattgtctcactattctccgattggaccattgtgtcgtctaacttttttcttttcttttcttgtttgggttagagaagtgaaatcaaattggtttggtaagtcgttagtgaagaggacacgttttggagatagcccgcgtctttgcctcataacagagttctcaaatataacacgtggcattcttctctttttcactattcttccctccatcacgattgctttaattttttttctctttttatcttcgccttttttcttatcgttctttttcatcttttttttttcatttttttctcaacaaatgaaaatcttatttactgtttttttaaaaaaaatgaatgctaaaatgtattcaactcaaaacaccatcatgtttacatcatttgcaaacttgggtggaaaattgtaaatggaattcaaatctaaaaagagagtagaaagagtttgaagggaaatagggaaccccgttatattatttcacaaaaaatactggataactataatttcgtataggtaacttaaataaataataaaaattctgatttacagtcaaatctaacctttcggttgtgcatgtatccatattttcagagttttccttttatctcgtaattaatgcaaataaataaatcacatacatttggtttattggactcaaaaatgatatgagcaataatattagaaagcctttcacacaaaaaattagaaggtaacgaatcatattcaaatcttacagtaatgccaccactttatattcttcaataggttagttattatcttaaaccgtcaaagttaggtataaacttttaattcttcttcaattatatatatatatatatatatatatatatatatgtattctttttctggcaaccactaattatatataattatgtcctaagaatcgatctaaatggtaacacacgtttcttcgataactcggtttagcgataagctcttttggacttcacacgatcttttatattctaacaacaattgtctacgcatcctaatatgaagacattcctacctaattttaaaaaaactattcacacgctcacactcttaaatttgaatatgagttctaacatcaaagacactagtataaaccattaacatattacaagatccagttaaatctaaacattataattacaatatttatgatttaacagataatagatatacttatttcagtttaaataaaaataaaatatttttaataaaaaattaagatgtaagaaaaacatataaacacgcgtgtaggattattcaccggccaaataaaaacatgaatttcaaagtagagaacagtattagttaaagagtaaaaagtaacaaaagtttaaatgtcaaattatcatctgagatctcatgcagatacgtgacattttttttactataattagaaagaaaaaacggaatgataattgttaacagagtggaaatggggcaccgggcaataagaaattaaccataagattaacctttaaaaaaaaaaggaccataagataactttttgttaaattaaattatgcattcttcgactaaggaacgtataggcaaaatgatcagtaattttctgctattaaattttaattaatatttctcttcaattttcatccaaaaaagagtaaatatagttatacaaaaatgatcttaacatataatgttgcttgaagaaaagtaactaaaaactaatttatatagtctcaactaaaaagttgtctaagtgggatttgttttgtctcgtttgattagagtcatcaatgactcaataaagcccccatgaaaagtggatggggaaattaaaaattaggaataataacatataaataaaaataacggttgattcgatcatccttacgatttttaatttatagataaaaattccaatcatgcttgtgatcttaaccatcctttctttctttatagttttataaagatacgaaaaaatttatatcataagttatcgccacgtcagttttatcgacacctcattcataatggaaggtgtatatatctctcaaatatttattagtgtgtatacgcatactatgtatttatgtatcatgtatgcaatatataacatgatctcgaaaaaggtaactaccgaagttgtgtttaacggacgaactcgtggctcacgggacaccctcgtcaataattgtatattaggaagaatctacgagtttttttttcctttgacggcaagatctacgagtttatttcttaaataatacagtatataataagaagttatgttgttgtctttaatccctttctgttgactcgtttgttgcaactttttacctatgatggtatgcagaggttcttaaccatgatcgaatcatatgtatatatatcagcatgtttaaccctgttacccaaagtactagtaaagggaactacatacaatacatttcaagatcgttttcactacaaattaagaagaatacgaacattattaggtgctctattaagataaatagggacattatattatgaaactttttgatagtatacgtcttgaggttggatcaataatgcaacacttggaacatcttatcctccttagaatggaatattgtcagaaccctaatcgattagacgtggttccatggtttctattttttggtgggtcaaaggtctactcgttcacgtcacatgtcacattaataattgtttcctccaattatatatccgatataacaattctgcgtataattgagctattgttcttgtaaaatttaacccgacgctatgtgcctatgtggcactatacgactcaatatttaattgctaatgtattgatttgctatattactattctatatattcatttacacaaaacatttgttgtaagaatatcaaacatgtcttaattaataacggtttctaatatttaacgatgtatgtttggaagcatcattttctttcattaaaagtgtcgttttgacacactaattttaaatagatactaaatgctagtagttttaaatttaaagtttttttgaagttcacctttttttttgttcaactttttacgtttacctaaaagtaaaatatagttttcgttgtaaaagtcacgtttaagtataaaatttattttttgaaaaaataataatctaaaaacagtaattttgtgaaacaagaaaaaacaacacatacatttaacggtaaattatttgccgaacggattttgggtccataagatttataatttgattagttgttctttgaacatattgactcgcgaacctccacaaaatacagttgccggtcaaagagtcaaacttccatgttattgatacgtggacacttaagattggaggacaccaacccgacaaaagatttcgtctccatgtgttacgcacgctcatgtcagaccatataacactaagatgtccaaacgcagccaatttcagttcaagtttattttgtatccattttttaaatagcttgtatttctctttatagtgttacgaacgtataatcattcacatagcattacagaatcatatatattgatcagatttgaaaatagttgatttttgaatggaatttggtttttgcaattcattcaaaaagatattataatttcggaaaagtatttacatctgaaataagagaaactctaaaataataaagaaataagactaagattgattttgaattgaataattaaaaaatttatatacttaaagatgtattttgcttgatatttgtttttcgtaatcaagaaattttggattgaaattcataatcttttaaaatcaaagacccgacgagattaatattataatttatgttgcaatattctatttgaaatctaaaaataaataaattgttggataatggtgattcgacgggtgctctcggatacatatacatttgatctcttatgtagtctatgaaaattaaagataataaagtcataactaatatttaactaatattacatgttgtgatttcgagtattaagaaattacggacttttggtattcaaaaaaataaaatatatatttaattgtttcatatgcaaaattcatgtctcgctgctcgtgtatatattttttttctttttgttaaatgctcgtgtatatcttgtttatacattttttctttgtcacgaggataacaaatcttttaatagttgaaactgaaaggtgttgactcctattttgcctaaattcttcctttctattttaatgtttcagatgtgcgctgatgcaaaaggaattaacgcgtatacacatataagtgtgcgtgtattcaaattagtataaatcttgttcttgtttttttctgtcatatatagtttgtcacagaatttgttttcctttgcaaactatggtcctaaataaatgcaaattatgtgataaacgtaatacgaagtgaaatacgtaaaataactacgcataactaattatggatatccgctgaccatgagttgggtatattctaagtggctaagaatattttatatagttactttaatatatttttgtttggctggggttattattcccatgttattggacaaaatgatgataaaaaaaaaggctgcacctgatatatatatatatatatatattaaaaagtagctccaatctaaaattaaccaaaaataaaaacaaccgtgagtttatgataatgggcccacattattgtgctgtgtgtgggaccatccaagtgctcctgagtcacttgactttttgttagccttgcgccgaccggccaatcagcgttcagatataccattcacatacatgtgcgtaagaccatatctctctctctatatataatctatatatataatacaattagttacatgtgtgtttatcatatgtttaattagatgaatgctcgagtgttttaaaaaagttttatgaatggttgagaattaaaaatggtgaagataaagagggatttatttataacagttagtttagtacccacaaaatgctattaaattttcgaaacgtaaagtaaagatacataaaatgcatatcataaattaaaaataatgtaaaactgaatgtataagctttcaatattataaaaattgtagaaatattatttctaactatccaaaacgttttacgtcaccaaaaaaattgtttgcatcgatcacaatttttaagcgtcagtctttctctataatgattgataattcacaaaactttcattcaatttttatctgaacaagtgttatctagacaactctaactatatctatctaaatttggtcacaatcggtgtcgcatattttttgttttggaagttcttaatcaaaatagatcgaaaactagctatatatgccttacgattttttttccatatgtttatatatgtgaatataaataattggagccaatatgtgtgggtatgagtatgacgacattggaagtttgaccatgacctacttggaggagagacaagcacgagaaaaaggggagcagagttaaggacatgtttggcaggtgtcaatatcaagcttctgttactactaagagttgcagagaaaacgccacaatttggcccccactccaaacgctgccttattttatcgtgcgcatgttttttttcttcgaaatgcattctcaagtgtgaagaacaaactcaaattgaacgctgacattactatcgtcaacataatttctttgatttctcgttataatgcgtacaagtgatcattaaagatgtgtgtgccgttgaaatggtaaagatagctttaatccgcacaatgcttgttcttgacaaaaaaaatgttttaacttttaagttttcttttgtaaattatatgttaagaaaaggaaaaaaaatgttaggggaataatagaaaattattattttctttattaaaaatgtatacagataaataaatatgatgtaagaaaagataaatgtatatgtgcccgaatagtgcctagagtaggtatgcgaatatgcttattatcccatatgttcattatgcttctgtttattcatatgcattgattttgtcgttgattaacttccacgtaatagaatttctagaaagacctttttagaaaaagtaaatggcttaatcagtcaaaaggaaagtaaaaaagggcttttcaatgaaattaccaaaagaaggcttttctaatcctcatttaatttgtttagtctttacatttaactaactttgctatatgaggagacgatatttattttcctccatcagccagtaaagttggtcaaagttcaacgtatttatatacatcactaattctaagatcaaaatcaaagtattacgtctcactaatatcttaattagtttttttttaattcgtaggtatcgataataatcgtcgtcattatcttctccggatgagatatactagtcaaacaaaaaaaagttatcaaaaaaagattctagtcaaacaatttccttttttcgtttgttcgaaatgatttccaaaattaatgagctcgactatatcatatcatatggatgtctcgttctctataataatcgacacacatcacaacattctaaattagttttatcaaaaaaataaaattctaaaaatagtaagctcgacgtaccagaatttgtttgttacaagaaaatacaagtgtaaatttataaatgacaagcacaattgcacaaatcaccttatcaacaacattgtgacacgtctcatattttataacactaatggtcttattaataatattgcaactcatgtaaataaacaaatgtttttttctgtgtgtcaaatcaggccaaacagtttgctccatccgatgtggctatctatatgatttaaatcaagtattttgatacatcttaatttaattattttttatatattagtcttttcttctctttttgccaacatattaaatattagtcataacaaggaattagtggaaaaatacaacaattttttaaaattaattcaataaaatccatagaataacggttgacagtaataaatttggaggaatatacattaaaagttactggttcaaaaattaagtatgcattgtataactacagtttcttaccgttgcatgcaattattaaatacgaccaacgaactaaacgactgcaagcactggaaacaaaaaaacacactgaatttttgttttctttctaaaagcaaacttctgatgtcggcaaacgatcactaaaatgctattatatataatcactgaatatcatttgcctgattggctaatttgatgtcagttaaaatcactaaatcaactctaattaaaaaaaaaaatcccaccgtcgaatagttgtcgttccaaagatatgtgtttgcgtggtgagctatcgcacccgaaaccgcgttcacgttcatgagacacacagtttctggagtgggatttattaatattagttcctttttattattatttaacttaagcgaacacaaatacctaactattatttgtttgaattacattcttaacactacctgtaggcaaaaagggcagtgttttgtaccacacggaatttgtgcagtactagtagatgtcactaataacaataatttataataatagcaacattaacgttaagatacatacttccactgctaactcgttttttctttttatttttaatttcttaaagttattcttaacgctctagatgagagtaatggaggtgatgacaattcccagatgagtatataaaattataagagatgtgacaaaaataagatctttcttcttgaagagcttagttgtcgttcgtttattcgtacctaaccaagagtgacttatatagttagtatgtaatattctctttgttgacctaatattgtatttagcaaagccttatctttgtaagctttttcatttttctattttgatttttgtaatctatggttcggtgtacttgatcacacttttcgggataatcaaagactgcttttgatatgatacggatttaatcacattttgaaataaattaattaaaaaggttcaattgataaagcttagcctactatgtataaacaattgggagggccgggtttatgtttctgatataaacttttaaagttaatccacttttaacacaatattatgtatcccgtactgtttgacatgaaaaggacaaaaattcatacatttatctaaaactaaaataaatttggtaattgtagccatatgtagctaaatcttaattcttcttcaatagcaccaaagaagttaaacaatgttttttttttttttggaactttcttctctttttatattcttcgttttatggggtgggctttaatttaggtcctaattgcactgatgagttgcatcttcagtgcccctacatctttcaatgtagcttcaaacaagcgaataaatatctagaccattgtttatcactttattcacatcaaaagacatgtgtgttgtttctatttgaatcacaacaaaactttctgtgttagatattttggcataactattatattatatatctcctgatacttttatagtcctacggttaagatcttgaaatcgctcagacgtcgaccattttccagtgcagttgtctgtttatatatgttttagtttgttgtgaaataacacttctcttatatttaaatcctaataatcaaccaattattgtagaaggaaattcatatcttagactcgtttatttgtatttatatcagaaacattgtggtggtggaagcataagtatttttgactggatcaatattaatataattatatatcatgacaatttaaaccctttaattaggcttagttttgtttttaaaataaaatgaaaaaaaaaaatttggttcgataaacattttgcatttttgaatatatgagttgccttatcatccattcctaaatattggtgataaatatggtaagacatgcttttcttgacaaaatagttatgtgtataaaagcataattttattttcaacattagtttattgttgtgtctactgaaagattcttttaggtgaaagatatatcaaacaattttcatcattatagacattaaaacatttaataagaacaaaaaaaaatcaaaagcagttgtgatttgtgagaactttatatttttaggaagagaaagctaaggaagaatgaagactcctttaaagattctgcatagccatatcaaaagcaaacgaaacaaaaaaacaaacgattaaagggaaaaaaatatcataaaaggtgaaagcatatgaaatatctttaaagatggggtcaaagtcaaacttactaaataagcatgcaaacaaaattttatagaggtcaattgatcctcgtctgagagtttcgacaaacaagagtaattagaattctaattaacttaacgaagccgtatgtggttttactatagtctcgaatgcaaatgcacgttcagctaacgaaccattacagttttttttatttttttttattttaagaaagggttataaccattatagttttaattgatattgaaaactgaaatttgtactggatacttgattaattgtttcaatatagatgattgactttattctatatatgttttatataattgtgataaacgaacataacctccacattgtttcgacttttctcatggagagagaggacaaaataaggtatgattaaagaaggtgtgtaaaataaaagatagagacactcactacctcactttttcattgattcatgcactcctttcattttaatagctctcttccaatcaaatttctttttctgtcccactctctccatatctcttcttcttattttagttattttcatattttcgttttattcgaccgtcttgtccaatcagtgcatgtcgttgaatatctatttactttaagattccatattaaatgaaaaaagagaagaataaaggtctctatcaaattctataatctatctacttaattaatcatggattggcggagagaataattcttttctctttttttttttcttttttttttgttacatgtgggtttatacaccaaatagcgaattacttccgataaacagcttcaatcgtaagcttaaccgaaaaaaataaaataaattaaaatctataatatactattttggtatatatagacaatattaagtaaaatgaaagtgtattatcgtagatcttttttttggtcaaagtattatcgttgatgtaccaaaaaagagagtgtataatcgtagatttcagacaagtaaacgtcactaaagcatggaaaaaccgaaagtagacaaaagaagaaaaaaggcattttatgtatttgtgatacttattgatgtatatatcattactgttctttgaagaaaagaaaataacaattatcatcgaacagtaaataaaaaacagagtaaagatggggttctccaacggctcaaaactgccgccaaaatgtacgataccgttattaaaaagacacgtcacttccgacagaaaaagacacgtaggagaaaacgtgtccgtctcaccaagaaaattgaccaacacgtggcttggcgtgattttgtgattttgtgcttttgagtctttggaacgcgtttccataacggtcatcaaaacgctttaaccgaccgcacttaagttgaaacttctaattgctttaattattttgctaacgcaatcctacaatttacgacctctttatattccagtgttatacatgtggcactaattaaacaaaattatcaaaacttattttgtaaattggtcatttaaatttgataagaaatgtaagtgctattatcttcaaaattgcttagtgttgcattgcatacgaaaacattttctagaagtattacaaatttaaaaaaatgtgaagtattatttttttgggtagtattatttttttgggtcattttcagtttttattagttaacaggattgattttttttaataaataatggtatttcttcttctttctaacttctcgatgttaataactataatcatatatatggttatataaacattcttacgggttttacgtattaagtatgttattaatttgaagtgaattgatcgaagatacacatttaatcaaatacaatctggtagttttccatgcaattcgttaaaaacacacacatgtaatcaatgaaaaagataggtcacgttgatacatttccgtttattttcttgtgaaacgtatatagtttgtctcacctacgtaccatttgtggtcaattcttctttcactataaaaagacgttttcatagtatataaatgttcaaggaagtttcttagaatttgttttcgaagaaaaatagaaaaaggaactcaattccaattttgttagctcgaaacctcgaataaaaatttggtacgttggttgatttggtatcttcgagaagtcttccgataaatcgagaatgtgttcatatttttttttttttaaagaacggtgggaaatgattgtatacgtaacataattacacgtgaatgaaaccaatcagtgattaaaaaaaatcatttatgttagaaaccaaagaagctttttgtttggttgacttctggtatttagtgtagttaagggatgtaggcccatgaaagttaggcctaaatattagaacccaatataaatggtctcttattcgattagtgatgttgagtttttgggaaataatgatgggcctaaatggccaatgtgttgtgggacgattgtttggactttttgagtgactttgcatgtgttcataacttaaaataaaaattgcattcccatacctctttaagaattcaaacttctaaaggcctttaactcgtacaataatttaacgtgagacggtcataattcagttaagaacggattgcgaggcttggccaaaccctaaaggtgttggcctgctcatgaaatgcaacattagttggatcttacgagaccgtacgtgggaaaccaagttccatggacaatgttcacgttttgaggccaatttactagtttacagtttacactgggcaattgaataacagtaaacgaaaacaaaaacaaaaacaatcgtatcactaattactagaatttgtcgagtagggattgaatgtttatatatatgagatattaatacaacggccaacacgtgtgtatctgaaagtgtacatactaacatttatggtagaaaggaattcgtgtcatcaagtcaagtaaaaccttttttgtccgttgtgtaacctacacaacgatatattcaaacaaaacatatgacacatataatcgtatgtgtcatgtttatacatatacaatatgaaaagcaaagagaacgacacattagttgtttttagttacgtttggtcttaaaattaacaagtccctcgttaaacatcagccgtgtgataattaacaagcatccatcgttaaacacttccaatataacattttttgtcgtgaaagttgattttgttcaagtcttcttcgataggagttactcatttaaagaaaatagcatctcttgtatgtaaatttgatcactccttccaatggtccagactccagaacaaaggaaactgtattcacaacgaataaatagataaagggatccagaaaatcatgtaatgcatgatacattattagaaatatatatagaataactgagtaaaaaaatatatatatatatatatatatatatatatagaataaatgagtgacaactgacatcacattagtattctctgtatatataagataatttatatttagatgaaaatgtactcaatcgagaaaaatgtaataaacgaaactaattagttgacaaaaagggaaaatcatcaaagataaaagtttaactacataaacattataaattcactttctaccaaaaaataataattataaatttactttattccagtttcgacgaggagtgtggattctgttgttgaataagcagatatttgattcgccgagattttagattacaatattcaaataatttcgaaaatactggagaggaacgagattaacgataattagaggaaaaaagaagacaaaatcctaacaaacgcaaaactttatgcagcagtagcagcaggcagcggacttattagttatttaacgagtctatgactcaaaagacaaatacgaaacaataaattgaaaacaaactataagaaaaataagaagaagagtttaacaaaaatgaaaagaaaagcaaaagagaagaatataaccacaacgtggaataaaataatagcatggtcgatattgtcactttatatgattccttatacgataacatatgaagtagattttttacttagacacagattgcatcgaaatttgaaaatcgtatcaatataaaatcatcaagtgtgcagtattttcgatatctctgctaaaaatatcatatttactagtagaataaatttgctatagaaccaatagatacacaataagttaagtaggaaaatcgtaaataagtgacaaatcattttgttttcacggtttaatgaaaaagtcatccgcaatcatacatgtattaattaaacaatgtgtcattggataaaatgagataaaaccaaataaaatctaaaaaatgttattttatccaaagattattttgcaaggaaaacttgatagggagtagtatttttagtgagtgtaagctatttattaattccattatttagggtctacgtaaactatgaggcattcgtgcaaacaataaaaagatagcgggactcaaatgtaaattaattatgacactcacaacaagaataattctcattttttttttttttcagtcttatgaatgaaagttagcgtcttagcgaagtagaaaaggccaaaatagagagcggccaaaacggaagcaaaaaaaacctcatcattcttcatctcctctcttctcttctcttattcatgctcaccgccataaccacaccaccacacataagctttcttctgtaatctcaaactcttttatgggctaattattacattttcactatatacgtctacgagaacgagatcaagcacttgctaattattttgttgaagttcttgaatggttttccttcagtgtgtcacatttttggatttagctgaattgttttgatcataaggagaaaactttctcttccttgtttttttttttggtctaaattttctctgttttttttttatccaatggctacggtcactgagatgcccactgatgttgttgttgtcgacgatgttaaggaagttagtaccaaaagcgaaaagatcatcgatgagggaattgagaagagctcgatcacggattctaaaaccgaaactgaatctcggcttgatatgcacaagcttgtggctatgttcaagaaactgaatcctttggccaaggagtttttcccttcttactacgatccgaagaagaacaatcaggtagctaaggctaaccaatttctgccggctgacgattttgagaccaccaagaagcaatctggtgaagaatttgatcttgatgccaagaaggatgacaatacccgcaaggtaaaaatggatttgatgattccaatgtgagttttgttgtaaatctttaaactttgactaaggggttgttgtgtttattggtgtttgtgattatagagaagaaactatagccaagggagaaggaggttaactggaagaatttctaaggctcaaagagaggatagtattagaagaacagtttatgtttctgacattgaccagagtgttagttttgtttttagtcttttaaggttttgggaagaattcgagttaatattcattaatgtaacataattctgctttgcgatttaggtgactgaggagggtcttgctggcttgtttagtaactgtggacaagtaagatgatccttaaaatctttaaatgttggttatatctttctatttcatgtgttttggacaatgtgttaaatttagactagtttttgagtccgtgccaaaggttctgttgaaaaaatgttactttggtggtatagttgtgtgtgtgaagtaacgttaagttcttcttcttttgtgaaggttgttgactgtagaatttgtggcgatccacattcggttcttcgatttgcgtttgttgagtttgctgatgaccgtaagtttggctgctggaatctttaaatgctttaacaaaaatgtgcatgtcacttttttaacccctatagtatactattcattcacatagtaagtttgtttctacagagggcgcacatgaagctttaagccttggtggaacaatgctcgggttctacccggtgagggtcttaccctcaaaaactgccatcctaccagtgaatcccacatttcttccaagggtaaatgctcaaatgttcctctgaagttccactaatcaattttggttttaagttttgagttttttcaatcttactttgacatcttctatgttgtggttaattcagtcagaagatgaaagggagatgtgcacaaggacaatctattgcaccaacatcgacaagaaagtaaatgctgaacaatctaatctatatatattaatttctaaatatctcctggtttaagattttttctacaattgcaggtttctcaagctgatgtgagaaacttctttgaatctgcatgtggtgaggtaactcgtctgaggcttcttggcgatcaattgcattcaactcgcatagcttttgttgaatttgctctggtgagctcttttctccatggatgtgacacaatgtcttggcattgttttcacctaaaaactcaaaaacatatattttgtttttctcttcgaaacaggcagatagtgcacttagcgcgctcaattgcagcggaatggtcgttggatcacaaccgataaggtaaacttccatcaatacaatgtcttaaaatctttctctgaatatgtccaattgttaaacacttggctctgtttccttttcagggtaagtccatcaaagacaccagtgaggccaagaatcactcgaccaccatcgacaaactagaaagaggcccaactagctcagaagagagatttcattttcttcagcaatttttttcccccattatctctacgttttagaacagttatctccagttatgttagttagctggaaacactatgatcctgcttctgaatttggagttcttgttaggctttgtctttcgagtttcgattgcgatacttccatctctttcatcatctttctctcttaagggatttttgaagcatttgcttttgaaagttctttgccttacatcttttatattgttcaaggttagatcaacagtggagatctctgagagaagagctctgtgaaatttacaatgtcgtgtacatcaagtaaggtctctaatgtgtacatattacaaataaataaacaatctttttcatcaagagaagatctcgccatcgatttccacgtatggaatgttcaaaaccttgaagaactctgtttccacttcagcaaaagtctcagtcaacaaagaacatgagcttattctcagacaagacaaaggaggaagatcttcatctatcgatatctgtagcttatcacagccgctgatctccatcgtctcaatagcttttgtatcatgaaacccttttcgattcagagtcttgaggttctcgaaacgactaatccgcagagaaaaaacactttttggcaataacccttcctcaggaaacgattcaatgtcttcgtttcctccatcaatctcgagatttcgaagattctccaaatctctcaatccccattcgattctcggtgtaagcttgtcgcaaaggctgatgcaaagtgttcgaagattacttgggaaccctccaccaggaatcgtctcgatttctgggcatttgattataaacagtgacaagagagaagtgagtccaaacaatttctcaggtaaagcttgaagctttttgcagtttgagagtaacattgaagaaagtttcggtgttggaaggcctccttgtgggaaagtttccagatttgggcaatccctaatctcaagagactcgagtgcgatacgatcgtctccgagtcctgcgtgaatcgagaaagttttgaagctttcacaatccctaattgagaggcttctcagcttcggaaacaatgatagagggaaattgacgagattgctgcagctacttccgatgaaaaggtactcgagctgtgagtaacttcgtgttggttgcaaactctctgtgaaatttagtttcttgcagtctcttatgtataaggttttcaatgtggttggagggtggcttccagggaaagattctagagaatgacaagcaatgatgagtagttcatggaggtttggatagctttctgttaagttctccggtaaggaagtgagtccgtcgcagctgtcgatgtggagtgactgcagattctgaggaagctccatgaggtgagatatgtctgtcacttttaaatattccatgtctgtttcatcatcatcatattgtgacggctttattgcttcacttgaccgtggactcggaacagatgacttaatcccatattgatggtactggtagctactacttccaggaagaatagaaccttcatttttgggatctggaacaagtgatgttcttgacatatacggacttaacgtgctaggtatatccgagatatatcctgagtatcttgccgagatcacagcaggttcttcaaattgttgtggtaagcttccaagttgagtttcatattggtcgaaatcttctgtttgacggtcctttggtaaagatgacaagcttgatgttgaagttacttcattgtcatcattactttgactacttgaagcaaaacctggctgagcactggtacttgcatctgattttggattccctgtaggggaagacagttcccttctgctcatagagggaatgctggctggactttctggaatatttgtcagactccttctgaaggaattttctcctccagaaactgctcttaggggacaatcagagatggtgacttcagtggatgaagggagtccttctggaaacttttttcttaagctggggcatctttgtattatgagtttttggaggcaaggaaagatcccatcttctagttccggacaaatccattcgtcccatcttggcatgccatagaactttagaatttgcaaggattgaaacggtacacctctagagttgttctcaccgaagaagaagtctagaccaaccttctgcagaatattaaatttttcaatgctgagatacttgagtgaaggcaactgccccactggaggcagtgatatgcagaggttgcagctactgagagtgacggacgtaataccgaagaatgaagaatcacccaaccacttaggaaatgctccaccctgataagattcaatgcagaacgttttcaagtgtggatggggttctagcatccttaggacctctttctggtcacatgccaatgcattaaaactaccagggacgaagccagaacctttgacagtccacttcaggattaacccgtcaaggaatggctttcttttcaaaccagcatcttttgcttctgaggcaaacgccacattttgtagctcagagatgcgaagtgtccctcggagatgagaaagttctttgagctcatgcagcccggcaccactcagccttcctataacaaaatttgataacttctgcaagcttcgcagcttttttattccgggtggcatctctactaaaggagtgccaacgaggtcaaggaggcgcaaattgataagttcggcaatgctttttggcaggcttgtgaggtcacgacaatttgacaacaatagtgtctgcagattacagagagtacacacaaactctgggagctcttttattttggtgcttgacagatctagataccgtaaaagcttcaaaccttttaacgatttaggcaagttggttatctgataatgagacaagctaagaattcgtaggccactcaatgcattgagcaaaggattcaaaactttttctgttagttggagagattcaagacttgttggcgagttgaaaggaagaatggttctcagaaactcagctccacagatggacctaaaagccacagaagcatcacattggcttctagaaaatgaaaaatgtcgagttgtgcttggtatctccggaatgttgtcatcttccagtctgaaacaaaaatctcctgaaacagcttttgccaaatcattcataagatcatgcatcacaaagctcgtcatggtgatatccaatctctgaaaaaaagattgagcaactaaatcaccaaggtaatcatttccaatatcttccaatcttctgctgctccttggttggtataagaggtctattgccatccataggagtactaattcctccctatcgaaaacatgacccttggggaatatcgagcagagggcaaagcatcgcttaagttgaggaggaagagagtcatagcttagtttaagaactggaaggatactgttggtgtagcttgaaaaattctttgatacagcataccagtcgtcaggatttggctttgaacggagatgagatgcaatggctcgtgcagctaatggcaagcccttgcactgttctgcaatccttttgccaattccttctagttcttggttgatagaaccgactgatatatttccaaaagcgaatctagagatcagctcccaacattcttcattagtcatcaacttcatttggtagattttttcagcctttgctactgtggagacaatttcacttcgtgtggttagaacaatcttgcttccttcctctgcatcagtaaaggcgacctggaaactctcccattctgaatcactttcagaccaaaaatcatccagaacaagtaaaaatctcttccccgagagtgttttcttcagctgaatttgaagtgaaggtagatcctcagtattaactgcacttgaagtgatatcctgcagaactgcttttgtaaccgtaaagacattaaagtttatcccagcagagatccacattttaacctcaaaatgttcggtcaccctgtagtcattaaaaactatctctgtcaaggtagtctttccaacccctggcataccaactacggagataacagctggtttcccaatgcttatttcatcatcagaaagcagcaaattgactaacgctagcttatcttccactcgcccgaccaatctgccttgtggaagatcatcaggtcttgaccgtgatgcttgcctccattgtggttctcgagtctcgctatattctttcaatccaataacttcaatgtgtttcacatgatgttccagtagtctaactactttttccatctttggttctatctttttctgaatggcttctcgaccagccatgagattctggaatagtcctcctaagcctcctgcttcagctactactcttcttctcaaagcttctgtttgcaactcatcaaggatatcctctgcctggaagaaagcatctttgattcctgtaagccaatgtttaacttcccgaacatgttctgctctctgatcagcatccgcaagcaccgggtttgcagtcaccaaagcaaccttcaatctcttcagcaatgcactggaggactttcctttacatagttcgaccaattcttgagaagtattaatccgttcaaccatcacgtttgcacaacttgataaataggagttcgccatgttttccctcgtaacttgttggagccaaggagatgcaacaagtcacacaggaaaaacccaatccaattattggaataagcaagcagaaaatggttttttgacttgctgttctttatgcaatttgtcagctggcctgcagcaaatgatgataatgtcaagtttcttgagattctcttcttccatttgattatgatattcataagtttgcagacatttttcctaaaactactatttacattttctaaaagtgtaattacattgttttttgcagtgaccatggagcattcaacgagtcacatttaagaaaaagtagacaaactaagggggaagtaaggtgaatctgacctgtttttattttatttttctgctctgttttatgtttactctatctcgcttgtgttgtcttcttccttacccctgtttcacacatttgttaaaagaagaatttttctttcttcttcgtcttccttgtcctcttattatgttctgcgttgtgtctaaactttagaacctttgtgcagcatttagatcagacgaggaagccaaaaagggtttggctgcataatattgcgatcttctatgttcctaagaaggtccaggggaagaaatggtcctgccaatctctcggttcgaccaataagtaccacatgacgtgagttttcttatatatcacaccatcctttttttcttttctatcttctctaaattatctatattatctgtaaaaaagatttgacagatggtgttgaattcaccacaattctgcattccaatgaaaaaagaaattttgaattagaattatgtttccctatttacaaggtttgttgatttgttccttaaatttacgtctaatctgggctccagaaagacattgtagacccttcacgccttgaccaataggagacaatttttgttttaaagatcttaactatatactaaagaagactccaaaatgtacctccgttgatttaacatatggttttgcatttttgtgttaccttgtaagattgaatttgtctccgttggtagaccaagacaatgtaagacttttcatgccagctcacgatggaatcaatctagaatttaatattttgtttgtttgttgaagatgaacctttgttaatttgaagtcgtcttttgcatattatttaatcttccatctgtacctaatcagaattttcagactatatttttttcaagtcaaattgaacattcctctggtagttttaatccaagtaaatgattatgactaattcataagtttcgtcctttacaagatatcatcaagttttctccatggaaaatgcaggcaacttccaatcattttcggagtagtttcagttggtgattgtggaatacatttcggtggcatggttcatggtgtgttttgtcaagtcaacgtagtaaaagaacttcattcccttaagtaaggttagtttctctgaacttttccgaccaaactgttttgaccacttgctttgtaatttcttagttattggaatgtttgattatacgagtgtattgctttggcgaattgagccctgtggatcaaattatttgaggatgataacactgaagaaatagatagcctgctgtgaagttgttcttgattttgtctttgtctcttgcttgttttgtttttccagaaggctttgtgtgtggaaagacagacgacatgaccggcataggagagatgttccttgcagcttttttacaagctctcttccagacgctggtgtctgaacctttcaggagcttcttcaagaggcgagaactgaatgagaatttactcgagaggctcagcactgcgttgttgacaataactgctgttctgatagatgcagaggagaagcagattacaaatccggtggtggaaaaatgggttaacgagctgagagatgttgtttaccatgctgaagatgctcttgatgatattgctacagaagctctgcgtctcaacataggagctgaatcttcttcctccaacaggctgagacagcttcgtggcagaatgtccctgggagattttcttgatgggaacagtgaacatttggagacccggcttgagaaggtcacaattaggctcgagcgtttagcctcacaaagaaatatcctgggtttgaaagagcttactgcaatgatacccaaacaaaggttgccaacaacatctcttgtggatgaatctgaagtgtttggtagagacgatgataaagatgagataatgagattcttgattccagagaatgggaaagacaacggtattaccgttgtagctattgttggaattggaggggttggaaaaaccacactttcacaactcctttacaatgatcaacatgttcggagttattttggaacaaaagtctgggctcatgtctcagaggagtttgacgtttttaagatcaccaaaaaggtttatgaatctgttacttcccggccttgtgaattcactgacctggatgtacttcaagtcaaattgaaggagagattaacaggaacaggcttaccgtttctgcttgttctagatgatctgtggaatgaaaattttgcggattgggatcttctacgccaaccttttatacatgctgctcaagggagccagattcttgtgacaacacgaagccaacgtgttgcatccataatgtgtgccgtccatgtacacaaccttcagccattatctgatggagattgctggtcgttgtttatgaaaactgtatttggtaatcaagaaccgtgcctaaatcgagaaattggagatcttgctgaaaggatagtgcacaaatgccgcggtctgcctttggctgtgaaaacacttggtggcgttctacggtttgaaggaaaagtcatagaatgggagagagttctaagcagccggatttgggatcttccagctgataagagcaatctacttccagttttacgtgtaagctattactaccttccagctcacttgaaacgatgttttgcctattgctcgatatttcccaaagggcatgcatttgagaaggacaaggtagttcttttgtggatggcagaaggtttcttgcaacagacgagaagcagtaagaatctagaagagctcgggaatgagtacttttctgaattagaatcaaggtcacttcttcaaaagaccaaaacaagatatataatgcatgattttatcaatgagctggctcagtttgcttcaggagagttcagctcgaagtttgaagatggatgcaaacttcaggtttcagaaaggaccagatatttatcgtacctacgagataattatgcagagcctatggagtttgaggctctacgtgaggtcaagtttctcagaacttttctaccactcagcctcacaaattcttctcggtcatgctgcttagatcaaatggtcagtgagaagttacttccaacgctcacccgcttgcgtgttttgtctttatcacattacaagatcgcgaggctgccgccagattttttcaagaacattagccatgctcggtttttggatctctctcgcactgaactcgagaaacttccgaaatccctttgttatatgtacaacctccagacacttcttctctcctactgttcaagtctgaaggagctgcctacagatattagcaacctcatcaatttgcggtatcttgatctgattgggacgaagctaagacaaatgccgcggagatttggtagattgaagagtctccagactcttacaacatttttcgtgagtgctagtgacgggtcaaggatttctgaacttggagggcttcatgaccttcatggaaaacttaaaatagttgagctacaacgagttgtggatgttgctgatgctgcagaagcaaatttaaacagcaagaaacatctgagggagatagattttgtctggagaactggatctagtagctcagagaacaacacaaatcctcacaggacgcaaaacgaagctgaagtgtttgagaagttacgcccacatcgtcatattgagaaacttgccattgagagatacaaaggaagaaggtttccagattggttgagtgatccttcgttctctagaattgtgtgtatacgcctcagagaatgtcaatactgtacctccttgccatctcttggtcaactaccatgtctcaaagaacttcacatttcaggaatggtcgggcttcaaagcataggtcgcaagttctacttcagcgatcaacaactgcgtgatcaagaccaacagccgtttagatcacttgaaacactgcgatttgataacctgccagattggcaagagtggttagacgtaagggtcacaagaggagacttgttcccttctctcaagaaacttttcatactgagatgtccagagctaaccgggactctacctacctttcttccttctctgatctcacttcacatctataaatgtggcctcttagatttccagccagatcaccacgaatacagttacaggaaccttcaaacgctaagcataaaaagcagctgtgacactctcgttaagtttcctttaaaccatttcgccaatctcgacaagcttgaagtcgatcagtgcacatccttgtactctcttgagctctcaaatgagcatttgcgtggtccgaatgccctaaggaacctgagaatcaatgactgtcagaacctgcagcttcttccgaaactaaacgctctgcctcaaaacttacaggtcacgatcacgaactgcaggtatctcagacagccaatggaacagcagcctcaatatcatcatcctcagtttcatcttccaagatcaaacgtgtcaggctcaccgaagtctcatggttcacacagatcatatgattcacgttcatcttcaagatatgactaaacctgattcggtcgcatcaatcaaatacgtttttctttgttccatttctatgtagctttttctttcccgttgtgtgatatatgtgtacaacttttctaagttttgtcagtaatcttttcctcagtaacagggattttccaactaaaatataaagctttgctcattctcatcaaatatagaaaatatcagggtgcaatttgtaataaacaaaagattgatctaaaacggcccaaatgggtgtagccttattcatagccaagcaaacatctttttctcatttttcgggctctccgattggtggactctctctaattagtaaaggcaatcaacaaaaaacaattttgataaaatgccaaaaccttaaaaacccatatttttagtatgccgataaaactaaataaagagcaatgatgtcaatgaaacaattggttgatatatcatatgcttcacttaagaagagaatatttcttataatcacaccaaaattgaaattttaaccccaaaaaaaacatacccaaattggatgagataatatttataaaattcctaaaaaaagcataaacacatattaccttataaagaaagttttagagaaaaaaaaaactcaatacaaggcagtcaatgacaaatctatgaaaatctttgattttcttttttgtttgtaaatattgataaacatatttttgctaaatccactattttttaaaaatctcaactttttaagtcagtaaatctacacatatcaataactttttttttttggttttaatgttaaaaaaaaagaaataactttgataagctttctgtattatttttgaggaaatagaacaaaggaaggaactgttctaattttgattttcatgaaactcccacatgtcatcttctaaaattaaaataatttagttttgattttaaaattacaatttaattatttctttgaaatattttaaaataataatactttcttgttaagatactcgttttggtatgtaaggatggagttggcgtcaatagtttgattcaagtaaattggtaagaaactaagaaaatgtcggatttggttattgcactcgtagccttcgccgttctttttgtggtgtttatcatcttaagctgcatcatgggcggcgaaaaagatgttcattctccaccgccgcttccacgaccagggcaactccggatgcctgtctatagaaccaaagataaagatttaggaggcgatggcaccgccatatcagtggctggaaccgatatctatggtggttcaggtgttggttctggcggtcatggaggtagaggcatcatcaccagcgatacaaagcttccttctccaccgccaccttcaccactcccaccacgaccagtgcagcggccgaaatcagtgtctagaacaaaagatcgagaattgatagacactggcaccgccatgttagtggcttcatcccttcttactagtggttccgctagtagttgtagtggtggtggcagtcatgggcatggttgtggcggtgggggaggaggtggtggtggtggtttaggtggcggcggttgcggaggcggcggttgtggagggtgataagctcttctctcgttaaaaagtgcgaataattactgaatatgtttcatgaagttaatatgttttacattttttaaccattttcattttctattgcaacttttgatttaaaataataaaatacacaaaaaaatagaattgtataaaaatacaaaacatcttaatacgtgaacaagtgaataattagagtaacggtgaattaacagagaacaaaggactactttttttttttttttaatttcacaacatccccgaatagacctagaatattggtgtgtgttccacgtcattatgaaaggggtattaattgggtggaggtacaaggatgtcataaagttttcgatttttcctttgggatcacagtatccatcaacttccgtgtagaacacgtcgaagatacgtgcaatgttgtggcatcgcagaaaaacttggcgcggcaaatgatcatgtgtgttcatgaactcctccataaccactttgtagttgtctttattcattttacgcaactcttgggatgcttcttccttggtgactccatgttgtttcatgtagaagtcgagcccattagccacctctcctctgcttatctcagtctgcaaacatcatttattcatgaggacaaacaagatgagaaaacacacacacacacacaagatgagaaaacacacacgcacacaagatgagatacctttaatttgaggtgtacctcgtaggttcctacgtcatttactagacggaacatcaaagtcagagttttgatgattaggggtttagaattgagccagtcaaaagtttccttctcattgatatcttccaaccaataaagctgtacgctgcaaaatcatccatcccgcctgacttatatccaacctccatgtcctcatcaaaagttggtacgtgacccgtccgtgcacatacaagtatttaatcttaaagtgttttcacaaatatcaaagaggaattggatggatgaacaaagaagtgatgacttctttaagcattccgaaataaggatctgtgaattcatctctctccttgtaaaaatgatggatgggtcgtgaaacgttgaggcatcgcaccagaatcggacgtggcacagcggttgtcgtcaagtactcctccattattattttgtaataattactataaatcttgttcatctctccaatcgcctcttctttggaaacaccatgttgcttcatgtaacaattcagccctttagccacttctcctctgctcatctcttgctgctcatccattacacttagttacgttaatgtgtaagacaaaaccggttgatgatgtgatcgcttattgtcatgcttttgtatgtatcaattacctcaaaggtgtttatgtcgttcttaatacgaaacacaccattcagagcttccatcattttaggtctggatttgtaccactcgcacgtttgattctcatcacaatcttccatcgcgataaagctataggctgcaaaatgatccattgacgtctgcataccaaactccatgtactcctcaaaggttggcacgtgacttgcgcgtgcccatttcgagatagccaagtatgctttccccaacttcttgatctatatgcaaagcactcagtttttcgtaaagatacaaacttgactatagttattgctaccccagtgtggaggactcacctcatctaccgctacttgcacaatgcgtgaccttccctgtggcctcatttcttgttcaatctcttctaaagtttcaaatacacctcgaaagacgatttttacataacttggtagcttttctatgtccccaagatcccacctggacaagaaaatttgcatgtcattttacctatttttaaatttaatcatggaaataggagttaggagtgaaaaacaacacctttggaaagaatcaacgaggcttgtaacttcaggaagagtaccatatgcatcacatgtatcattaaaaacagtcacaatcatggtaattttagtgactataattctccctagtgaataccgtggctcaaaatacaatgcgagtgccccaaagtagacctctacaattctgtccctgatgtaaggcagcttagatgcaagatctagctccttccaccatctgcaattaatgaacataaacattttaaataaagcaagacatacaaatataaagattgacgacatgaactaacacaacctacttggtcagatcttttagctcttggatataatgtagctggcaatagttgaagttgagttttgcaaacttgagcagcgtctcgtcatgatcttcttcttgttcgtagaaagagatatattctcttgcgactaatatctccaagttatgatatcgagctctatatagtgcgttttgtatatgtttagagagatggggactagcagttgctgtgtgattacttgtcaacgactctaagcgataccgagtgaagctcaatgcttcgtccataatatcttcagatggtgtcccgagatgtgctgcttcgtacaactgtagcattcctctaatatcctcagctagactttccttgaacctcccatcttcacctttgaatctattgaatgcatctacagtgaagtcgaaagccaaattatatatgtgtatacatatatgtgaatcaaggtcaccaatactcttacagcaaggcatatagtaaccgcgtagtctgaaaacctcaaacatggtggagattgtttccaaatcattttccttggctattatatcgtccaaattcccaaaagcttggccaagaatctcatcaatctcaatctcgaaatgatatgcgattccgaggttcattagcaaatggatgagacggatcctctcattgtcgctgtttttggaagacttgagcatgtctctcacttttggcttcatcgtcacttcaatctctcttgagaaatcatcaaattcctacaattattaaatatacaatgcaatttataaaaaaaatcgttcatgttgtctgaaccaacaattattggggtcatcttgtgcttcttatatctatctacttacagcgacatggaggggaacagaaaggaagtgatctccccaaagagtgggagaaaagtgtgccaagggacgactactttcaagattatcattactctcagtagccctaacgcagaccaagtggtgttgttttgccggtttcaaggaaagagtgtgcttgtgaagccaacgccgaggaaaaagagaggggtttgttgtggggcagagaggggcgttatgaagaccaaaactcgttcttgttgcttccatattgttgatgtaaaaaaaaagatacaggcgaaataatatttagaggtactctgttttgaatgttcgatatctgttccaaaatttgctctgttttattatgaaaccctagacgtggacgtttttaatggctgatttgaataaaaacaatataagttaactatacgaatcgtatatatatttttattttttttgaaccgggaaacattgcgagaaaaaatgttagacgatgatttaatttgataatttcatggggaatcgaagcattaaatttcttcacgaggtaaacagtgtttatcaaagtagtattgttgtattaaaaccctagaagctgccttccgctggcgtttgaaatggatgatttgtttttactttatttttgttttcttgggctgggcacatatgtgaacattaaaaatttaaaagcaatcactggaaaatcttagacaatcatttaatatgattgaattaattgagaatccaaacaatcaatgttcaatctctatctctctagcagaacttcgaggagtttattatgggttgtatcttacttgggaaaagaagattatgcgtttagaagtggaggtggattcggaggtagtagttgggtttttaacgacagggattgaggaaattgaggaaactaatccgctgtccatccttgtacgcttgtgtcatggctttcttagaaaggactcgatagtccgagtgtctcatgtgtatcggaaggctaaccggcttacagatgggttgactaaccatgcattctctttgcttttgggctttcacgcgtttgcttcagtacctgtagaagtagtttcgattttgcgggaagacgtcgatggagttttacgctcacgactagtccctttgtaatttagtttctgtatatttcaataaaccctggagtttctcccggtcactcaccaaaaaaaaaatctctctctctctctctctttctcaatggcattaaattccttccaagttacgacatagcagtgtttgtaagtacagtatcatgttctgcaacaaaaaaccatttccggtcgactgtgattttggtccgtctacatatgaaggctggtcttaataaggagaggcacactttgaacataactttttgggtccgaaattcgttcgtgctactacttcaataacaaaaacaaatatagtggcaggagtcgtaccctgttttagttgaaatcttccgcacacttgttctaaattatctgaatccttacactatgatttagttcccatgagaaacccttattgatatttgtttaaacatgacattaagattcactatgagagagatgatcacaacatatatggttcacaacttcacaagaaaaaaagatcagagatcgaactaaatgtacttgttaggagatcatatgcattgaagatctgataagtccatgaaaagtatcagtcgtttctgcaagaaatgtagctagcaagagctaccagaggcgccgccttgtcagactcaaaccctagaagctgctcctcggcttctctgctcagtttctccgcaacttccctggatctctccaaacctatcagccttggatacgtcagctttccagccattacgtcttttcctgcagtctttcccaattcctctgtagattttgttacgtcaagaatatcatcaacaacctgaaacaatagtccaatacacctagcatactttctaagcttttcgatctcttcctctgttccacctcccattatggcacctataaccgctgctgcctccaacaacgccgccgttttgtggaggtggatgaactctagacgctccaatccaacgtcgtgtggattcaatctttcgctgcttaggtcaaccacttgccctgccactaacccttttgtccctatggcccttgccagctcaaccactgcccggatcatcctctcggaagcgaccaacccactcgacacaaccgtcatgtgctcaaacgccaaagcaagaagcgcatcaccggccaaaaccgccatgtcttctccaaataccttgttagatcaaacactgatttaacactagttcaacattatctctgagcctttatatgatttaataacataccttgtgattggtgggcttgcctctacggaggtcggcattgtccatgcacggaagatcgtcatgaatgagagagcttgtgtggatcatctcgaccgcgcaagcagctgacatggcagtagcctcgtcgcctcccacaagctcgcagacagcaatgcagagcagaggcctcacacgttttccgcccgctagcaatgagtaccgcacggcttcctggaccgtgaggggttctcggagcggtacagatcgaaacgtcgagagccgcatttacagattcggctttgcggatcatatacaacttgaaatcaaaagcagagttgtgatcattgctttttccctgtggtggaatcatgtctctgccaccttgtgaggtgagggcagaagagggagacaaacctgtgcgttttttgagactcttgacggaagatatggagttgtctcttcttcctctggattggatgaagagggagaatgagctgagatgaacagtagtagccatggccgatccaagagtaattgtgtttgccaattaatagcatgtggagctcttaataggtttattggatttggaaatagtatgaattaaaaatgcattatcttccaacaaagtagtatgaattacgggatgaataaacaaggttataatatttaaatacaacatggttataagttttacgagtttacctttgtccaatcctttagtccatgactcatgagattgtgaactataaaatatgcaacatggctataactcaacatgtggcaatcaatacttgcgaatttcgatactgtctaaaatattttcctatagaatattaataaactaaatttaattggaaaagtgattacattcaacatctattagttttgattaaacgataacgataaattatgaggtgaatttgctataacaactaaattggtgaatataacttgcagaaaagacatggtggcatttttggtttcaggaagtcacaaaacaaccattctttctactttcataagaaattttgtttttttgtagaaattatctgccttggcgtagcagtgaacaaacagagaacctgcaaaaggctacacaacatcaccaaatagacctagataggaaaaacggagtcataatatttcttcttagagattattaaaaaagaaaaacaaaataagaagaagcaaggattaacttagaaaattggtgtgtgttgcacgtcattatgaaaggggtatagggtggacgaacaaggaggtcataaagtgttcagttttgcctttgggttcactgtatccatcaccctctatgtacatcacatcgacgaggcgtacaaagttgaggcatcgcagcagaacctggcgcggcacatggtcatgtgtgttcatgaattgctccataaccatttttttgttgtcgctgtacattttaagcaactcttggcttgcttcttccttggtgactccatattgtttcatgtaacaatttatcccattggccagctctcctctgctcatctcagtctgcaaacatcatttattcatgaggactacaagaagaggaaaacaaaaatcacaagaaccaaagatatcctttttagtttgaggtgtacctcgtaggatcctacgtcatttcctaaacggaatactaaatgcagtttttggatgattaggggagtggtattaagccaatctttttttttttaataaaatgtcaaattatattcaaaaagaaaaataactttttacatcagcttaatcttatgtgagttgaattatttgttttgataagaaattacaatttgagagcttaacagaaagagcagagagagtctagagccttgtcgagaaccagacttgtaatccgttctcgtagcggcggtctcctgtcgagattatgatggagagttgattgcgaatctgtttgtccatccaagtaatgagattggctgacgttctaggctcctcaccatggcgtcgatcatttctctccttccaaaccgtgtgtactgtgagttggaagatataacgtgacaaaaagctccgaattcgatcagtttgagtctctgagatgtaattcactattgtctgccaatctgttgagaatcgatgttgtaaaacattctttgcaattgcagtccaaatcgctgaggcataactacacgagaagaacaagtggtctcgtgtttcaatagatgtggagcagaatgtacacttcacatcagagccattattccaaagctgcattcgatctcccgttgataacctattacgcaaagcaagccaagtacagaactgatatttcggagtagagtgactgaaccatacccctttataccaagccacctcgtttgattttttacgaacctgattccatgtgtctttggtggaaaagcttgtcttaaaaacgtcccccttacctctccataaagctgcatcttcccgaagcaaaatgcgtgtctgatatttctggtttaaggctgcctcaatatcatttagctgttctgttcgatgtttccttctccttctattactccaagcctcggccactgttttgttccggcttattccaaggtctatttgccccctctgtcctgttacatccatcaaatggcccattcccgaccagttatcaaaccagaacgaagtccgagctccattattcacctctactctgctaaacggcttcgctgtttctctatacttcaacatttttttccacatccaagatcctaagcttgagttgggctttagagaccaaaaagactcttgtttaagcagattcatttttgaccatttgacccacaatgaatcatcattcgaggttactctccatatcaactttaaaacactcaccacattcgcctctgttaaagaccgcagaccaagtcctccttgttttggtttgcaaatgtcatcccatgatacctttgcctttcgacgatttagctctggtcctgaccacaaaaatgctgaacaaatactgtttatctcttttaggcatgcacttggtaatcgaaatgcactcatccaaaagttcattgtactccataaaacagaacttataagatttaaacgacctgcaaaagagagataacgtgaggtccacgttccaattcgattgcgtatctgctcaaaaaggggggagaggtcttctttggtgagtcgtttggttactagtgggagaccgagatatctaaccgggagctgagccaaaccaaatgggtagcgactgatcatcatgtgacgattgtgatcagagactccagctgtgtacaatgttgttttctccatattgatttttaaccctgaacgtttagcaaataggttcataacttcgacaatgccatctactgaacggactttaccatcagtaagtatcatgaggtcatcggcaaaacagagatgagtgagtccaaggtttttgcatttcgggtgaaaaccaaaccgtttcgctcccgctgcctgatctaacatctttgagagaacttccatactgatgacaaacaaatatggagatagcgcgcatccttgtcggattcctcttgcacttctgaaataacctgctaactcaccattgacctgaactgaaaaagatgctgtagtaatgcaacgagatatctagtgaataaactctccagggaaattcatagcagataaagcattgataaggaaggaccattgaagagaatcgaaagctttcgagatatcaattttcatggcacaacgtgttgaaacgttactcttatgataatccttgaccaattccgttgctagaagtacattttcaatgagaagtctatcttttacaaacgccgactgattccccgagatgaactttggtaaaatcctcttcagcctatttgcaattatcttagaaatcactttgtataggacattacaacatgagataggtcggtagtcccgcatctccttggattctttcttctttggaatgagcgctaaaatagtagagttcaccccttttggcagaaaacctttagcaaaaaaagattg

SEQ ID NO: 52 - DNA, 22199 bp, Arabidopsis thaliana
cttatgacccttcattagtcttgagatcccttgattacaatcgtcaaacacctggttagtatagtgttactaactactactcggtccctctttttacgtattgttgcattgaaacaactttatgtataatgcagcaaggaagatgagatttggtgcaaccaaagagaatgagactccagacttaatgaaaaatccgtatcaagccattgttgctgcgagggactcactgagacaccgggaggaagcgcagaatatgagagccgagatgaagaagttggatgatgaaacgaatgatttgacaagaaagaacaatgaagatcggcttactattcaggagctagagaatgagctggttaagcgaagaagaagggctgaaaagtgcaggagattggcagaatctcaatgctcttacaggaatacactcgagaagatgatccgtgatgctatgcaccagtaagagattttctctgtaaaagaattgcattttaatatcttttaaatgtttagtgttgtttaatcttgtttgtttgtgtgtttgtaggagtgttgtgtataaagaacaagtgaggttaaaccaggctgcgagtagtgcgcttatggcaagattagaggcgcaaaaagcgatttgtgatggttcagagaaagaacttcacaagaagtttaaagaaagagaggagctggagaatctagtgaagcctgagttagagaaagcaaggaaaagatcaagacttttgctgaatgatgaagatgacttgttgctagacgatagagacaggaacttatctctgtatcttccaggaacaagtgaagagacgtcgtcacataaggagttaagggtacattttgaagaagagcataaagcagcagcttctgaggctgaaattaagaagcattgtgaaatagaggaggaggaagaggaacagaagactccagaggtatctgagaagtctcttgttgcgttggaagatgataaaccggttgaagaaaagccagatgtagaagaggggaagagaagcaacagaagcttcagagcattccatgttttcaaggcacctgagaatgaggaagatgaggaaagcaggagagagcgagggaaaggaaacgttgagaaatggcttcatattttactggagaacaacagcaaaagcgatccacacgatcttcaaacagagaaaagcaagaagattgatgaaatgatagagaaactggaccacaagttcccttttcttgaaaaggttgatgaagaagaagtggatttgaagttgcaggctaaggaggcaaacaacaacacaagcaaggttgatgaagaagaggtggacttgcagttgcaggctaaggagacaaacaacaacacaagcaaggtggaaataagaactgaaagttctcgtagaagcagaatgagttttgatttaaagaacacaccagagaagagtggcagagacaaagtggtgaagagatcagagagtgctagaaccttcacaaggattccatcatctccatcactcatctttggaatgaaaaagggaatagactgcatcaggaagaagccagtggtttcaggaaacgacgatgagaatgagtatcttgtcaagaacaacttcatcaagtcttctcttcaaacaatcaaacgagctgtcaaattctagagccccaatacactcccactcccacatctctacatatatatatatatatgcatttgtttagtgtttgtgatcaatatggttttattcattgttgtgcataaaaagacttccccattgtttgctcctccatgtgtaataacagcttgttgtgttgttttcattaattcaagattaagacatagattttctccaccttgaaggtgttgttcttcctttgacaagccttgtcttcatattaccaggagtccgtggctcaaatccttcaccattgtcaccagattcttcctcgcccttttcaacactaacacttcctctaattgacggtactaacccgagcctcttccaccggaaaaaacctttactcccaccactactcttcttctccataagcctctccagctggaaatgcatagcgccacactgactctgcagcctcaccacatcctcccgtagccttcttatctctgcttgttgaacattcatctcacgtttagacaaacaccgcgctgcagaacctccctcgaggtaatgtgaaccagaagcgtttgttggactcctcgtagtgctgcttatcgagctactattacagtcaatgtgacgacttagctttgtctgctcagtgaacaacactccaatgattgctctcaccggtaaacgatcattctgagccgcgtgaagagctgcttccggtgataactttctgctatcaataagtctacaaagttccttcctttcttgcttcaacacctgaggatgtgcctgcaatagaatccaaatcttgaattcagtcttaattttctatctcaacttcaaagtttcaagctttatttataccttgagatatgtatcaatggctcggtacaagccatcctctgtagtacgagcatggctaggaagagctgtgattaaggaaataaactccggtaaagctaaaccaccgtcaacggcagcttcagcgaggtaggagtcaacaagcttggccactttaacaagagccgcagcggttttaacaccttcactatccaatccagaaaacttgttcacgagacgcgtcacaagctcaatgtcaagcaaagtaccagacgtgtagctgaaggaaggtatcataagctccttgagagaagcttggtcgagctgccacgatactctggtttcaagctccgttaaataattcggattagctccgaccattttcgctgtcctgaggagacggaggaggaaattgcaaggaacagagtctttctccggtgggaggattccgattagtgtttcgacgaaaaaccgtttcttcattacagatgcagtgacgctctctggctgtgtgtcattgtggttgttcttggattctaaggaggtggaggaaataatggcggagacattgccggagagatcagggagccattttgaagcgtaatgagcgatgatggaaccgataaggtctggtctgattcctttggatttgatgccggtgattgttttgacgaaatagttcatgtcttggatacaagattcgtcgaagtaagtgtagtactccatatcaccgacgaaggtttcttggcgattgccgtagatggtgacgggttccggcgaaagtgttttcttcatttgtttcgagtttttttcttcacagtgagctctcgatgtgtagtgtagtagaagatgattttctatagaagagagcaaagtgaagtgatggtctttttatttaaagtttggttttatggttttttgctcgaaaagctcatcacagaacataatcatgacttccacagaatttcaaaaagttttgcgatttttagaaactaacgaacgaattagttagatttcattttcgtgaaaaattgataaacataatatttattgatacattgtagctgcctaatagtgaccgacaatcaaatcgtaacattttttctgatttaaaattgaaaaaaaaatatttcgttcagatagaattattgactattaaaaaaaaaaaaaatgactacatgaaaaagtattttattatattttcggattcaaatttatataggttccatgcaaaaaaaataaaatatatgtatgctaaaacatcgtttgattaaaaagaaattaaaaattgagggttactagaatgatatgaatatgcaaagatgtattgaagattatccattatgtagcatagattttactctgtattatgaattcagctgaataagaatatatgtataatgatctaaatatgtgctacggttttgattagagataatcctaatgtgagaggattgagaggttgtggaggaagatagggataagagaaggatgaagacaatttcccttgatttgccttgtatattaaaaacaattatagagatattttaccttatatatatgacaaagagaatgaaattaatgcatagacttgtcattgtcttactctgagatgctaaatggcatttgtattctagtgttaaccaattaattactatatacagtgaacgatttttagttacattcttagttttgattctgactgtaaactaaactccatcattatggtttaatttggttttggtcgtctaagataagaattacctaaaaaggatcatttcgtttgacacattttcaaacagtaactgttttgtatagattttttcataaatcataacacacgaagtacattcacgaacgactacaattttgaccgtggaaagagactaactagataagcttctatgcatttagctaaaaaaaaccaatatttcgaagaagacaaataaatcatagtctctctgtttcgatattttgtaatatccttctctccatgtgatttgtaaataagacgacaatgaatggtcccgttttagaatatcatgaccatatgccggttgtattatcacaattcacaaccatacgtacatgccaaaaataagattctctcttccttttcttttttattcccattgcacattcattatcacatcacatcacgagtgcgaaatcataccaaccggtttagcccattaaaggcccatttacagatatgggtttggctgttctttgttttttttttttactttccttgacataaagttatattcactcatcttttatgtaaatcaagagctaaataactccaacctctagacaaggctggtttttcttcttctctccagaggtttcagaacaaagcttataccttttgggcacacatttgaaagcactgaaaaccgttcatggttttggaatttgtcaccaaaattttctgccttgagacatttgaaggatgcaagcacatttgattatgttggcttttgatggtaatgaaaagtatacctttgttcagaagaagagcctctattttcttaaaagaagattggagttcttgaatgcacaagccattatgtaattagaagccagaaaaggtgtaagaacagaaaaaatagccacaatacaaatatataaacactaggcatttaccatcagaaattgcgaatatgttaactctatacttggaaagattatccagatatcagacagacaatacatgtgtatactcttccacactgtttcctctatattcttccaagtttttgtttagtgttttacctttacaatgtcaagtcttatttcttatgtttgtagcccagagcctgaaccagaatctaataaagataccaaaagtagccagaactatttgccggttggtggccacttcgtggtgcttgctggagaggaagcacaaaactcttcccctagtaaaacaatccattggtcttttgcattttcaggaagataaacaatgatgacaaagagagcgttaaggggaaatactagttggaactgagactgtagtagaacgattgtgcacagatgaacaaagtctaaggataaaacaagcagcagtcatataaagcttaacaagtgtttgatgtcttttgatgtagtgaacatcttatgtttaaagtatatgtacacagacactaacatcattattggatcaaccaaaggttttctcactgctatagcacatgtaaacgaatccatcatcatctttgtaagattcgtagaccgagtccatcagagcagctgcagagaaaaggaaacacagaagacatcaaacaaactattcctagaaaaagcctagaagcaaaacccaattgaagcagaaactcaccagtttgagggagagtgttgttgacaaacacgaataaggctttaccaggagacaaatgtaacctagcactcaatatgtagatgaattggccaactgacatatctcttggaaccagaaacctaacattcaaagacaactctcagatcatattgaaaccacttattcaaatcaaaagtgataactttgaaactaaatcagctatttaactcctaaaaatgtgtatgaatctttgaagttataggataaattagctttcagtaaagcataaattgaaccaaagatgattttggtaatcaaacaagtcataagctaggcaagacgagatcatcaaaatcttaagatgagaaatttttacttctttttctcgatggcaggcagatccgttttgcaatacttctcagcaattacctacaaaattatccaattctcagaaaaatttccaggtttagaagttcattgtcattgaacataaacaaacaaaatcatcttctcgggtacatcggataattgaagagatcggaggaatcaatttgaaaaggaattagaattgagctggatatatacttactggaatccgagtagggtacttagcgattatctcccgcgactccgcgagcctttcatctgcagataagagataaggttattgattactttcgtttttaatcaaccagagaacaattagagaacggtgatcgatcttgagatagaaacgaacccaacgtgtattgttccttgaacgatttcatcttcttcgaccgcccggagatttcttcgtcgtgtgtgtttttgtctccgtctctcaaaagcaagcggcgaagtcaaaaggaataattgagaaaatagaaatttaaactagagattaattatttgacgtatcgttaaggtaacaacaaagcggggatagctcagttgggagagcgtcagactgaagatctgaaggtcgcgtgttcgatccacgctcaccgcatttttgtatttttcaattctcttataatctgctgggtcccacgtcattggatatacccaacccggttcatgtcggctctgatgtgtttatttatttacggttcaacttctcggtttcgtcttccaatttctactagtctagtttttgcttcggttcgataattttttccacgtacctctagtccagttcaattttattccagtttatgtcacttacaaaaaaccacaggaacacaaactcaaaaatgagaaactttggaagaaaaacgaatcctctgtttattatttcctagcttggaagcaaccagaacaaacacttaacagctcaatacataagatgattatcgttatatgtcaagtaaaacagacactggacactttttaaacggattaacctgagccagtttcgcagctagactcttgttcgggaacacattgtctgccttcatcctctcaatcatcccgtaagcaggagttttggcgttgatataagccaggagcacggtttcatactgcataagctgagctgcatagcttgcccttttcattttcatgaataccttctctgtgttatgaacatcgcctctttttgcatattcttcaagaatcgccatgtaagtagtgaacataggtctcatcttattatcctttgtagctctgttcaatatcaactcagcttttccaacttctcctgctttgatgtatagcttcacaagcgcgtgccatgtcgacggcccaatcgcaatccctgcatttcccattcttttaaccagatctctgccttttgctagcatcttgttctctgtgtatatctccatgagggcaaaatatggcatcatagggaaaattttgtatttctccacaagtctctcaaacactgcctctgcttcttcgacttccttcagctttccccatgctttaatggcagaaatgcaattatcgtatctcggattttgatcaacaaacctactcagtcttctcacattgtcactgtctcctatgtctgcataaagtgggagtaatgaccggcacacccatggagtttgttgcaaacctttcccttctatctccttcataaggtcttgtgctctttctttaagccccgctcttatgtagtacttagccagaatagactgcagttcaggatctagttcgatgccttcttccttaattgtctccacgatcttctccattccagttatgtctccggctaaacctttactattgattaaaaaatgataggtagcacgactcggcttgatgttttctctctccattagcaacaaaacatcacttatcttctttctatcatgcatactgtagaggagaagcagctggttgcaagcaaacacacttgttggaaattttagctctttcattttgttgaaaatgtcttcagctttatttacatgatgcttaagtacacaatttgccagcagggttctgtatactacttctcccctagaagattctggaatatctttcaaaaagatttcagctttttgtaaactatgtaccttggccaccaaatccaactgagaagcataatttgcctctgtgaactcaaactgcgtattagctcccaaccactcccacaactgcaaatgccaaagcccaagcaaagacatacacattaagagggtgatagagacagaacaataaaagatttggcaaagtgtaaaatgagaacatatttacctgcaaacacatagcataggatttgcgtttacgcagattgtgtatagcaagagtaacctcagcttgactcaaatcttttccttctttgacccatttttcaagaacatgtttcactgatttataagcaacaatggattcgtacagctcagattgacctcttttcttagttggtttcccaccatctttcgaatgcttctcttcaatttcaagatcatcattgtcactaccaagttcaggctcgaacaaagaatcatcatcaacaactccctctggtacatccccagaaacaggaaccgcctcctctgattcagacagctcctcttccctaactacctcatctcctttatctttagcatcagctatagaagaaagcttgtggatgccaaagaaccgtgaaaacacatctcttgcggaataaagtctgactaaaccttgaggtttgctataaatcaatccaaatgatttaaagacccgttctttatcaccaccacttgatacttctaatttactgaccgcaccaaacgaagaaggtgcaaagttatatctttgactcctaaatgacacaatcaagtaaaaaataaaactttcaattcaaataaatcataacaaaccccataagagaagatctaatttgcttgctgctaaaccacacacaagagctctaaaaattgaaaaaaaaaaccaaaatttataaattagaaagctttttacctttggagaatcctcgaaagcgaatacataacttccttcaatcaattgaggttaggatcctgaaaagcaacacaacacaaataagagtcgacagtgatagtatcaacaatcattttaacaagccgtaagaatcttctagtagaataaacacaaaagacagagaaaattcggtgaatttcagaatctgaaatggaagctgctgaaacgctaaacccagaaatggagacgtatgagagaattacgatttcgagggattttttcgccggagccggagaacagtgatccctaattactttcagggtttaatgtctctgctagggtttatacgtgccaaggggaccaaattctcagcggctcctcttggttgaagagtaatctcatatactctttttataaaaatttgtttttgattttttttattccgtaaacgaagtaaattactcagaaaaccctaagaatattgcttaattacaacccaaccagggcaaatggatcctaaaataatccaagtccactgttttcgggtcaaatccaaataaaaccctaattcccctaattctctgcggtaaaatcgattcacatctcttttcctttgtttcttctttatttcttcactgtaaaatccagtaaaatcattctcaattctcgtcaacgacaacaatataactgttcgtcgatcttggtatatctacaggaaactaagaaattggggtaagtgatttaactgttcgtcgatttgattcgagttgtttcagattgggttttgtgatcgaaattgattgaagagtagtgctaatccaaatgattttgtttgtaggtttggagaaatggctcgaacaaagaacgcatgtgtgccgttggcggtggcgtccgcggcggaggtggtggtttcacagacaatcaatgacgaagtagtagtagcgtcggctgttgaagtggattctgaagcaacaaattcaatctctaacgacgatagagcggtatgaactttaaactttacacaattagaaaagtataactatgtatgaatttggtatatctttgttgatattgtaacttagaaattttaaaaagtatatctatgtataaattagtatatctatgcataaattgagtatatctattttgaatctaacttagaaattttcgaaactaaaaactaggtatatctatgttcgaatataacttacatattttagagactaaacaatatatctatgtataaattaggtatatctatgctgatttctacctttaaattatatgaaactaaaaagtatatctatatttaaactaggtatatctatgttcgaatataacttagatattttagagactaaaaggtatatctattttcaaattaggtatatctatgctgatttctaccattaaattatacgaaactaaaatgtatatctatattgaaactaggtatatctaaacttgaatttaacttataaattttcaaaactaaaatgtatatctatgtataaactaggtatatctatattcgaatctaacttataaattttcaaaactaaaaggtatatctatgtataatctaggtatatctatgttgattgcaggattctgatgaggaaactgaagctcttcaacctcttaaaatgtacttcggtccgagtgagtatacaaagccattcaagattacagcaaagtgttatcttcataaggcagtcggattattggagactcatcttaaagagtctgagttgaagtggtttttggagcacccacaattcaaacacttcttccacatgcataaggatccaaatcataaggtgatgggtatgtggctgttatttcttcgtacaacatgtttagataagaagaaggaagtatggtttattgtcaatggcgtaccgatccggtattctctcgaagaatttgcacttatgtcaggattatactgccataattatcccaaacccttggacagcttgggctgtaccacttttgctggcaagatgtttggactcggagcaacagttcagtatcttgatgtggagaataagttattgtctatgaaaaaaccttctgatgctcgtctgagggtagctgtactatattttttatgtagtgtaatcgttggaaagggtaagacaggaccaaacgcaccaaatgtggagaagttcttccttagggctgtggctgatctagagttgtgcaaaacatttccgtggggaagatttgcatttgaaaaaaatgtgaaagacattttctatctgatgaaaaagtgcaatggagtagttggtccacaaaaggtgtttcctagttttgttatgcctttggaggtatgtcatttcattatgcatttatgaattgttttaagaaagttaaactgtgtacaactgtgtttttattagcagttatacttattagtttttgaaaaatcttgtattgtttttatgtagtatctagcatttgaggcgatcccagttctcagggaaaatttctgcgaagatattgaatccgcagatcctcagtgtccccggatgtgtaaaatgaagtttaaatcaagcactatgaaagggtttccaatgtcagatgtgtatgacaaactcggtacaactaaggttagtgatgacatatttattagttatctatcatgtatcatgtatgttctatcatgtatgctatattaattactttcttatcatgcacaggacattcagagtatcttggctccaactcctgatgagaagctacttttggaaagaattatggataaagagtgtggagtgaatgatgtcgatgatctaatagctgatggttggaagaaacgtctagttgatgaggagaggactatatgttttgaaccgttgttcaatgaagatgtagcacaccggagctttgtggctaataaagctccgtctactgtggtaaaagctccaagaaaagccgcagtggaaaagaaaggcaagggaaaggctgctgcagctctgactagtccaagtgatgaaggtttgactagtccaagtgatgaaggtttgactgaggttgtaaacgaaatgaagaatttgatggagaatggatttaagtccatgaacaagaggatgaaagatttcagtaagaagtatgaagagcaagataaaagactgaaactgttggaagctgcaatcaaatcaattcaatcaggcattagaactgaagacgcttgtggttcaaaggagattgatgataaagaaaacgagctggaggaagggagtgatgcagagactgagatagacaaagaggtggctcaaggtgataaggagagagaggttggagaaacagagactgagatagacaaagaggtggttcaatgtgacagtgataaggaggtggctgaaagtgagattggggtggctgaaagtgagaaggacaaagaggtgcctcaagatgatgagatggatggaggtaaggtggctgagagtgatggagagatggatggagagaaggacaaagaggtgcctgaagatgatgagatggatggagagaaggagaaagaggtggctgagccaagtgagattgggatgcctgaaagtgagaaggacatagaggtggctgatagtgagaaggagaaagaggtgcctcaagatgctaaggtggctgagccaagtaagaagcgaggaaaggcacatgaggatggagatgatcctagtgaagaggtagttaaaaagcctaaggtggtcaagaagctggcagagtcgaggacggatgctaagccggtgtatcggagtcctacaatgacgaggtataggaggaaaaagacaaagaagaatgtttaagcaatttcaactcttggtttgttttaagtataactatgttggttgttgaaaacttggtacatctgttcgaacttggtacttggtttttttttgtatttctccttaagcttttgaaaacttggtacaactgttgaacatgtttattagggtttttgttttattttggtatatctacttatgttttgtaacactaggtataattatatgtttttgtaattgataagaaaagaattttaaccgaaataactagattcaacacaacacttagtctttataattagattcatatccattcatcacatcaaattcaacacttagtcttcataattaaacattacaacacttacgcttgaatttctacgacaaacacaacatgccaacaattgccatggttattaaacatccagaactaaaaatgattatcatattaaagtccttcccctttttgttcttttccatcggatctctttccatcctctcttggttcctttccatcttcatcactcttacttcttcttcaagaacaccgagttgaaattccaattgttcaatctcatgtgtaaaagcctcatctacccacttaaacacatgattgtcgttcataagctacattttgaaattgtaaaaattgttaaatcacatgtatatctatgtataaactaggtatatctattaggtatatctattaggtatttctattaggtaaatctaggtattttagtgactagtcaaattaggtttatctataccttttttctgcagctaaaccacaccggtaataacgacggtacggatttggatttgatcttgaaatcctctcaacgatttcatcgccacaccaacactgctttggaattccaggaaccattggtcttggtcgggaaacggaggttccacacgagttcgatgctcctgagaggtggctcataattccctgagttttggatttagaaattctagaatatttaatagataaaccaggttgtacaatatgaatcttcaaactccgaaatcgaaaattgtcaattgcatatcagaaatctataagtgaaacgtgaattgaatgaaaaatgtacccagaaaaacgaaatgcttaccaaataattccactcttctctctttttctctcttcttctctcttctgagtcttctctcttcttgtcttttcttcttctttttcgatttgattttctgattttaattcataatagggttttaaaaaaattctgcgaattgggggaaacgaaaattttgggtgaaaattttttgatagtgtgaaaagtaatgtgaacacgtttcttatagtgtgaaaaagaattaaccgtgggacccgcgtacgagttgttcggaacaaaaaaggtggggcccgcaaactctttgcacacagatattccaagttaacaggttgtacctgtgtatacacagtttgacttttgggggttttataattttattagatatacttaattttaaactaaacaaatttagttataccaaagagttttgatgttttataaacattccacatattttcataggaaaatatgtctgaaaaattcaattttgtgtgttttgcaatgttatgatgataataattataaagtcatcttcaaagtgtaaggtgtttcttgtataacaaatgaatttggtaacgactaattttttgaagtttcattaaattatgattttatcaatcagtagttttaatactcaacataagtggtataatttgtataagaaataacattacatcaaattttgttgcaaattaagcacatttgttacatttgtgatagttgtacctttacaaaaccaagtttaaacaagttttacaaaaccagagagtacaaaaaacacgaatttagagacatacatagttctaccatttaaaaattaagtttaaccgagttttacaaaatctgaaagtacttaaaaacatgaatttagagacatacatagttctaccattagagaataaagtttaaccgagttttacaaaatctgaaaatatttaaaaacacgagtacattaatttccgcttgtgttttggctaacactttcgtggtttggaaaaaaccagctctccaagtttctgcctttcacacgcttattcttggggcgacgttctccaactgatgggtgtctagtttcttgaactcttccctttttaacaacatgaaccggaggatatgcaaacaattcttggatttcacttggaataacccactctgacttatgcggcaccggataaatggttctaacatatgccataacccacatctcaacaaagtaatattttgtgatcaaatcatataaacttttgacctcctcggatctatctttctgtttcaagtgagtcatcacagccgctattgagtgtacacaaggatacttgtccaagtcaaaacaacgacaataacaacttttattcctcaagtccaccacataggtcttaccatcgcgaccaatgacactatattgaagctcgtaggtgttaagctctatcaccggtaatttttgtgcaacttcacatgtttcatgtatctcgttctccacaaaaggaacaagtctatgtgcatttgatccacttaaggcttccttcctattattgcagctccattccgcaaatttcccaataattgcatctatcataggtaatagcgcataccctctcacatccctaaacacaccattcatagactcaaccgcattactagtgtcaatgttgtactttactcccggaaaatgacatcttgcccatttttccaaatcagtgttttcatcaagataggtggctaccttagggtgccttcttctaaactctgcatattcatgttcaaactcagacactgaacaaatggatgcaattcttctgaacgttttagcaaccccttctttgttgtatgcaactttcgttctcacattctgtgacaaatgatacacacagtttccatggtgagagctcgggtacacctcagccactgccttgatgaggctagaatttctgtcagacataaagaccaattccgtactgtctggtataacagttttgagagtttcgaaaaaccacttccaagtaacatctttttcgccatcagctacagcaaacgctaagggataatggtgatgattcgggtcttgagctgtggcaaaaatgagcacacctttatatatagtcttcaaaaatgttgcatccacaataatcacttttctcatgactttaaatccttcaatggcagcccccaaagcgacaaataggtacttgaaccttttttcttcatctaataccacactagtctttgtgccaggattcaccttctctaacatatacaaatattgataaaccatcttgaaactctcctcgggacaagcacgaatatcactaacagctagtttttttcccctaatagcagtcgagtatgacacagttgtaccatgttttccctgaacaaggccaatgagacttttaggagttggggtcttgtactgacctggataatcttcatgcagtacggttgcaactaaacgtggtgtacctctccttttaatgcctgtagcagtattcgaccgtacacatgtatgtaacttcctatatgttcgaaccgagaagcgagttgaatccttagccttcgaaaatcgtatgtaccattcacacccttcttcagcacattttaccacataccgcttcttattcgagttgagtaatgttagtccaaaacaattcctatttgctcctgtctctactaaatatttcacatcatcgctattttcaaattcttgacctattactagatcaagaccatcatcccatggacctttaaacttagaatgttggctgtcacgtggttcctcaacatattcacgaataccatcattctccttagtcatactcagattactatcaacaccattatccacatctctaagaggctccaaaggctctaaaggctccaatgtctccaaaggctcagcaagttgttctcctagtggctcatttgcgtaaagagttatagcaccaacattagctctatcatcattatctagaccaccgaaattctcctcttcataattcacaccaactgaactctttctttgtactctcgattgttgctcgtttacgtcaaccatttccaactcattaccgacttctacatgcaagacacttctacttttctcttcatccaacgtggttagataaacatatacatcatcatcatccctaatatataaatatgtaggaggtttaacacccgttggaatgtaactcaatttccgcttcatcgtagattcatctatctttatctttgtgcatatcttatccactaaccacgaataagtaatctcctccattgatgatgtcctaaacaatataccatacaaaccaactactcttggattccattgatatgcttctccggtttttgaataatatccatcataatcaaaatatatgattatgcccattatcctgaaaaaaacaaaaaaaaaacgttagctatacctagattttcctgttctagcaaattgtacttcaaacagctataccacgctcattttcagaaataccagttatactattgaaacagctataccacgctcattttcagaaataccagttataccataaatagtacttcaaacagctataccacgctcattttcagaaataccagttataccataaatagtgcttcacacagctataccacgtttcttaggtatacctagattattctgttctagcaaagattttcggaccaaaaacagtaatctgcctaagattaactacgaatcaaccattacagtacattaaaatgtcttaatagacccagaatatatagttgccaacataatgtcccttaatttccaacaccaatttcaaatctatcaaatctaattgaaatctacaaaattcaaacacaacaacacaatacttgatgaattaagatgtccaaagtataagaaaagaatggtaaagctcactgtgaataacagaagcaaaacgacgacgaacttggtcgattggattcaacgtcgaaggattcgacgatagttgcagtcgtcgatttggattttgtgagggaggaaaagaaattctgggaatttctgataggttaatattttgtgaattaaatggtattggtttggagacttaaccgtaattagttggtttggttcgtccgtccggttccggtttgttgggtaagggtaaacaaggatttttaaaattcattaagagtataggagtatgttagattatatgagagtatttagattcattttaggagagtagagagtatatgagatcatcgtccgtgccaaggaaatagtactctttttttcccaaacacgtgtgaggtggtttaaagggtataattgtcaatttcaaaataagaggtttatttggtgcgaatctcaaacgtccaaaatgtttgaaatcatataaccatgggttgtattgtaactatagcttaccatccaaatcataaaaacaataaatgatgtgtacatttttccaacagcgatcatgcttatttctatgaaaaatgattttgacattatttgaattgatctttatacaaataaataaagttttctactagtttaaaaaaaaatataaataaacaaatgaattatgaatttatgattacgtctctctataatcatatttgttcttttttaatcattgaaagctaaacttatggggaatgaatgatctgaaatgacagcttcctaatttttacagctacggtaatatagggtaatgggtcaagtaaatgtaacgtgttaaagattaaaaagtaaaagacgtgcgtcaaagaaacagagacgtcaagattagtttaaaacttactaattacagtagttaattcggaattaagctaagtccagaaaattccatgaagcagcatccatcgtcagcatcttcaagtcacactttttcttattttcgcaaaaaccttcaaaaacccgttccggtctgttttctcctctcgaaaccctcgatcgttgccgcgaaacagctccggtgacctaaaatcgttcgacgaaacggtttctcttcctccttgtcgttttcacttttcacgtcgttcattgcatctataggtcttcgtttgttctgcattgtacggattctcttccgatcgacgattcagcttccggtatagcttctcctctcttccatggtctttaaatcgtcgtttctgtttgatttttagtaacgttgagctgcttttgttttatcggaagcaacgtccgtacaggtttgcatttttgtagcttaacggtgagtgttttccggtatatttgttggattttctgatcaacgtttgctaaaaaacaccgtgttttatacagattatctttggtatttcgaattaactgttacatctgttgcttttgtgtggagcttatgaacagtaagcgattattttcaggtatttgagtctctgaagtttaggtggcttgattttgtgggtaaagtttcatatacagtgatgacattttgttgttgcttcgtaaaatggctttgttatacagtaatgacttcaatttctgacaagtttatacttgtgaatggtggcaactgtttaggttagtagatgaaatgttgccttgtgttcttttgtggggttgtttttgacaatcttctgtataggttttggatgctttagtgaaccttatactttcctagttagggagtacttcaatcatgtgcttgcaaagtttccttttgaggttgaagacgccttaggtttaaaacttatatccatgatcttacactctctaggactactttggttgtatcttattatgtttatcttgttgtctcttttacagtttgggatatctcagcaggataacttctctatgttgcaatcgaatagtgctggtggagaagacaaccctgattttaagtggggtgctaagagaggggtgggacggaaagataataaagtccggttctatgaatcatttacccttgagggcatcgagtaccggctttttgactgtgcttacttttacgtacatggtcaatctgagacttcaatcgggaagcttgtcacatttaccagacatcaacaggtgagaagaaagtcaaggtcatttggtttttcgacctatcgacatccagcgcttcttgggagagtatgagccacaatgggatgagttgtttctggcttgtggtgatgaaaaaggggtttccaatatcaatgatgtggtaagtttgctggcttttcatctccttctctcctgcttactgaatcgaaatagtaatctgaattgatgatatgtttactatagatgtaatatgagtttgggtttcctgtgttgttggtccaggagaccatcatggggaaatgcaatgttgtatgcacatctgatgaccgaagaaacccacgaccaggaaccaaggagctgcggagagctaaatatatcttctcccgcacttttgatacaagactcagaattatatcagaagactttgcagatgctatagccggaattggaggtttggattagaacaaatgactatactttattgttcaacccctaacactcttcgagtatggatctaatgaagctaattttagtttctactggctctaatattgcagtggataaactcttcaacatgagaagagataaacagcctgtaaaacgtctaaactcaagcgcagctgccattactagggcttctccagttaaatcttttcgtccagatttgggatcaacaaagttaggtaaacatgataacagagatgcaaagctgatgagtagaacaagctcgttaaagaaaggttgatcctttttcctatctgttcaggccacttatttcctatatacttgtgaaatggacaaaccagattgacacttacttttattttgcaagtcacttttctggaggaccgtgctgatcatgtacatgtgaaaaggaaccctcctgtcaatactgaaaccactacaagaggtcagataccgatactcaaaacaagagcatttggggagttatatgcttcaggttcatcagtgaatgctaagccttctaaaaagagaaagcttatactcaacacgccagaaacagatgattcagatgatcaaggccctcaatcaggagagaagaaattaattaaaaatcctcctcttgtagaaaaggctccaagtcagaacatcgtacgtaccatctctatccttcttctttcggtggattagctgagagaaatgtaaagatttacagcacaaaagtagtgtattatttctttgcttgagcatagcaaaaagattattcacactgttgattagatagtattaacttatgacatttccaaattattttctccttttgtctgccttacaggagaaaaaaagctggtacaagaaactggtaagttctttgacgcttctaagaagaatctgaaaacatttcattccaatagccattttttcatgctatttggctttcatcacacgaaatcagaccaagggaatattactgtttatagaaactatgaaataattaagataaagttggttaaacgatttgtcctggttcaaaagaaagtctaaaatcactagtttcttcatttaacattactattcctttttccagccttttgaggacgaactaaagccggctatagaaaaaggtagggtgctcttaattgagaacctggaaccatcatacacatcgctggaggtagaggtatgtgttagtgattctacaacattctctggatcttattttatgttgttgtcaatgcaatgccatctacatatgttgatcaaagacacgtggaattagcaatcattctaaaaaccctgtaaaatataactctcctcgccgtttcctttttgttctgttcagtttctttttaggcaagcattcaaagaaggagttgatgctaagatgatcccttcaagtcccatgtctagcccacatagtggtatatgtatattcttacaccttcctgtttgctatttgttagctcataatgttaggaaaaaaaaaaaaactgtcaatatatcaaattaaactgcatttatctaaacaggcagggctcttgtgatttttggaaccacaaaggcagctgattctgctatgtcgcggttaaatgaagattgtctgatgttatctggccagaggttacttactactcttttatattctacttctcacgtatatgttaacttcatcaaatccttctttcttttactatctaatatgat

SEQ ID NO: 53 - DNA, 43500 bp, Arabidopsis thaliana
catttgatgcgaagctattagatataattgtttttgatgtcctaccagtttctaatggaaatgatggtgtggatatatcactagcagtagaactgaaggatcataatcctttgcggcatgcattcaaggtcagcaattactgtcctacttatcttttaatcaattatatgtgtgcttactccatctaaataagctttcttgatcatctttttatacaatcctccttgtttgataatctacgatgttgttcttttatgcttcattgcttcttagagaaattaaaataaattgtccaagttatatatccgaattttatttctattacgcatggacactaatgcgccgtggagaactgataaccaagaaaattagaatattccttttgttgtaaattaaaatgggagcctactgaatccttcttttattagctaaaagttgaatcatcctcatttttcttgcccctcttctgctgcacaaatatttctggggttatatgtcaagaaagctatggataatccatgtatataacttttgttaaaatatcccaggtaacatctggaaaccggagtataagaataagggcaaagaatagtgcaaaagttaaagattgggtggcttctattaacgatgctgctcttagacctcctgagggttggtgccatccccatcgctttggctcatatgctccgccgaggggtttgacggatgacggaagtcaagcccagtggtttgtagatggtggagcagcttttgcagccattgctgcagcgattgaaaatgctaaatctgaggtctaccacttttcattactgggtgtggagactgatgatgtgttgaatgttatatattttcaactgatctgatttgccttatagattttcatctgtggctggtgggtgtgcccagaactctatcttaggcgtccttttgacccgcatacttcatccagacttgataacttgttggagaataaagctaagcaaggagttcaggtacttactacagaacatgcatgtacttaatagctattatcttctgttgtgaagcatgtctgtagtctgcaatggagatctgacttgtcaggtttggtggattactatctttcaactttttcatttttattactttctttttcagatatacatccttatctacaaggaggttgctcttgctttaaagatcaacagtgtatatagcaaacgcaggcttcttggcattcatgagaatgtgcgggtacttcgttatcctgatcatttctcaagtggtgtctacctctggtatgatatggtggacagttctaatatatcactctaatatgtcacaatgctctttctagtttatctttctgagtttgatattagataaactgttaaaaaactcctatctgaccacaaaaataagcgggaaggacattgattattacctctgcgtgtctttctaggtctcaccatgaaaaactcgtcatcgtcgataatcaggtttgctttatcggagggctagacttgtgttttggccgatatgacacgtttgaacataaagttggagataacccttctgtgacatggcctggaaaggactattacaaccccaggtaagaatttccttctttatgcgaataaagagttgatttttagatgtaataaaaactaagaacttatgtgtcacttgctagttatttttagctgtgatgaaatcaaattttgtattaaatacaaaccaggatgtccattagtcatttcacctttccgaattcaaccctctgattttttggtttgaacgtacttaaaattttccagagagtctgaacccaatacttgggaggatgctctgaaagatgaattagagcgtaaaaagcatccacggatgccttggcatgatgtgcattgtgctttatggggaccaccttgccgtgatgtggctaggcactttgttcaacgctggaactatgctaaggttcacccatacttctttaactttcttctatctgtttgtttttcctgttattaccgtaacataaccattgtgtttttcagagaaacaaagcaccatatgaggattcaattccgcttcttatgcctcaacatcacatggttataccccactacatgggaaggcaagaggagtcagacattgaaagcaagaaagaggaagacagtattagagggattagaagagatgattcattttcttctagatcatctttgcaggacattccattacttttgcctcacgaaccagttgatcaggatggttcgagtggggggcataaagaaaatggaacaaacaacagaaatggtcctttctctttccggaaatcaaaaattgaaccagttgatggagatactcctatgaggggctttgtagatgatcgtaatgggctagatcttccagtagcaaagcgtggttctaatgcaatagattcagagtggtgggaaacacaagatcatgattatcaggttgggtcgccagatgagactgggcaagtcggtccgagaacttcatgccgctgtcaggtgggtgttatgaaagtttatatataccaattatatgtggaatttcaaatctgaatagagctgatgctattatgtacgatcctattctgtttcatgcttggcttcagcatacaagctttaaaattttattgtgatcataataataagaatttcccttcaacatttagcactgattagaactattttcagattatacgaagtgtcagtcagtggtctgccggtacaagccaagttgaagagagtatccattctgcttaccgttctctcattgacaaagctgaacattttatctacattgaggtatttgctataacatgtgtttgtcgtggaatctcggttttgcatgagttcaatttgatagaccaagtaattagagcatcatttagcgtttcattgaaacgacctgacatcttttctccctgaattatgcataatgcaatttgcatcacattacattcaacttgggagaaatatggaacattctgctaaatgtgctggtaatttgagctgtcagtcaaataatgtatacatgtattggtttccgtactttgatttggcacctctctgattccctcttagccttggtgagctttgctggagatcctgcagctttccttggtcaccttttatctggcctacacaaaagtttaatttatctggtgaaagaaactaatcccctattgaacgtggacaaactaagcattaagtaatagtcctatacccttgctcctgcaaaatccaccttgcaaatcattcatactttatatttcagataatacaagtaacttagttcttgaaactgtagtagttgccaggttcacattgtctttatttttctgacttctgtttgcatgttgtgcctccagaatcagtttttcatatcaggcctttctggagatgacacagtaaagaaccgtgtcttagaagcattgtacaagaggattttgcgtgcccataacgagaagaaaattttcagggttgttgttgttatacctctcctccccggtttccaggttagtttcggctagaaaagtgtattctgtttaaaaagatttgctcctgcaatgcaactttttaaaccaacgtatgtgtctggcagggaggtattgacgacagtggtgcagcatctgttagagccataatgcattggcagtatcgaaccatatacagaggacataactcaatattgactaatctttacaatactattggcgtaaaggctcatgattatatttccttctatggccttagggcatatggtaaactttctgaggatggacctgtcgccactagtcaggtaacaactcaatcatccagggtttagatttgtgcattgctgcctttttttttgtgatcacggaatcatataggatgccctgttatacatgtgcttgaatgcagtggtagtgagtattaaaaatgtgaatgctatttttttctctcaatgcaggtgtatgttcacagtaaaatcatgatagttgatgaccgtgctgcattgattggatctgccaatattaacgaccggagtttgcttggctcaagagattctgaggtcatattttactcacgtactttcttgtgctaagcaatgatttccaaaagcctatttcatacttgaaactaaggtgaagatcataatagaaaacaaaaagagtaaaaaaaattatttcctctgttgaaggaaaaagattttcgttgcctcagcacgttatatcagagtttatagttaggaataaattcatttaaagtatgttgaacaagtttttttatataactgtgtatgctgaacataaaaaagcataaaatgcttctgtatgctttatatcagattggagtactaatcgaagacacagagttagtagattctcgcatggcaggaaaaccatggaaggctggaaaattttcttcaagtcttaggctctctttgtggtccgaacaccttggacttcgtactggagaggtttgtgtcatattctctataatgttcttacgaagtggtctaagatatttcagtatataggcagatttaacacttgaaaagccatggaaattattcttttacttagacttaatgatgaaagatgatctgaaccacgccggcatgaactttcaatcaatggttatgactgaagaggatcttaagactataaatgtgctttgattactaaaatgtgatctttctttgtagatcgaccagattattgatcccgtctctgattcaacctacaaggagatatggatggcaaccgcaaaggttggaaacgtgattacagagagaaatttatattttcacttaccagatataaccagtgagcttatttatcccaacgcagacaaacacaatgatataccaggatgtcttctcttgtgtgcccaatgatctcatccattcaaggtacaattccggtctatcttttctttcttcacctttggccactatcattattccttttgaaacgaaaagattccggattatgattaatccatggcattggatcgtaaaatctcttgaatatatacgcagaatggccttcagacaaagcctatcgtattggaaagagaagctgggacacacaacgatcgatttgggaatagcaccagagaagctggagtcttaccacaatggagacatcaagagaagcgatccaatggacagactaaaggcgataaaaggacatctcgtctctttccctttagatttcatgtgcaaagaagatctaagaccggtcttcaatgagagtgaatactacgcctcccctcaagtcttccattgagatcattacatcaattcttgactgctggcttattcagtgacagctctctacacgaagaatacttcattgctacctttaaccattttcatctcatatgtttatgagaaagaattaaagatgtttgtatagcgatatgatatgtgcaaacagaggaggaaactgagaagggaagccattttgctagtttttggtttctctcttccgaggtaaagtaaaaaaagaaaagaaacaggtcattttctaagtcaaatattggcttactatctataacagtgaatgtgtcaccccacacagacacatatgatttgtaattatgcgaaaaaagactgaataatataatgtcggtgtcgagatccacgaggtgccatgtgaatatgaaaatatgatgtgacaatgagtttgggtcttatctttgtttgtctctgagtcaaacaactccatctttaccacttgcatctcctttgttgtgtcgtattttgttcacaacctgtttgtatctatttatctcaagtctcaactgacaacaaaaaaacttaaatgaaaagtaatacatagcatgtggaggatttggtgatcaaatattaatccacacatgcaatatacgaaaagttaactttttgttcggttctgaaagtaatgaaaccaaaagcaagagaaaaatcagtttagttaggagttctatttaacaaatttcaacattaatctttttcagaaaaagattaaaatcaaagaaagcaaaacggacagagttttgtaacttggttcgggtacatgtttacatgatcttatttcatagtttcccaagtaagaaatagatttggtttgctagttacatttgcgaccatgcatttagcatattccatctagtgaaaattaattaatattatctatttctattttttatcttttatttcactatcttatttctaccacccacccaagctagaccgccatcttaactaataattaatcaaacttaagagtcgtaagcactgatatctatggattacctaagaaatctatagtggacatgtataaaatctaacatatgcactagggacatccatatcttaggcacatatgtatggttaaagacaattaaaaaaaacaaccttacacgtaaataccttatacacacgtaaaatttgcatacgagccaatgtctttcttgtatatgtatgtattgatatttttttctctttttcattctttgttaagggaaatatatacttatcttatatgacccctaaacggctaaacgatataaaaacaacgttaaaaatcttattatggtgcatggcttgcttataattgtttagctatttttaggttattagtagtcgcagcataaaaacggtatgtcaacaaatttcatggtagatctagattacgacctcaaaactcgtttatacaaagtatacaacgtttctacaatttatattaattagttttttgtgagtatgcatatatatcgtaactatgtcgggttttatattattacatttaaaatgataggaacttatcatttgacaaggtgtaacaaaaataataattataaagatgagagttgtttcggatcaaaggcacttaccattagcttttagattcgagagcctctcacagccacacctttttttggactagtccttattgtttaacaaaccccacatgatatccttttatatttacaccactttcgttaatttattaactttcttccacatccacatttaaatttgatctagacattttcttatattaaactatatacatctctatcctaatgaggtattaactagctatagtttattcatttgtcggtcttaagctttattatttgtcatggcaagaaaaagaaaactttgattggttattcattgtggttgttgtaacgcttttttttgtttgtgttatttgaccccaaacataaataattcttcattttcttgcgcgttttatgattgcgttgaaataacatcttcactcgccaaacactccagtaatacccatttttccaacatatacacttctaatcatacccacaaacatacacacgttttaatctgcagcttcaaggatatgttgccttctttaattgaatcttatttaccaatggagaatacgtatacatttccttagactaaaaaaatatataaacccttttgttaattataacattcaagtattcaactataacttcttaaataaaaaaattcgtcaactttattcataacatatatacgtgtccttgtcgacatgcaaaaagaatgtatatgtgcatttgtacgtgtatatatgtattaaaataaaaggcttagaatagtcgaaggagagaaagcgaaagatgatgatgagtcatagagacaattcaccagcttataagtagtaaatccaccaaaaggaaaatatattcaacagagaaactccgatcaagaatattcatatcagagaagaaaaagtaaattcctattaaacttctgattctcttttttctttttgttctgcttttcatttgctttttggatatctttttacagtagttataacttataaatgaagttcgtaaatatattgtaggatcataagagaatcaaagaatggtgcttttaccagcgtttttggacggattagcgagaactgtatcgacgaagaaaggtaaaaaactatcggaagatgaagatggagggagagagatcgcaaaatcgatgattaaagattcgaagaagaactcgacgttgctcggtacttcaggctttgttagctccgaaagttctaagaggtttacctctatttgttctaatagaggtgagaaaggaatcaaccaagatcgtgcaattgtttgggaggtacactttatataaatactagctatatgttaggtaattcgtctttccatgaaacgtattatgatatctacaaattattgacgaacttatatgttagaaatggaatcatcacatgcatgtagttactaattaattgtgtttataagatttgttgtgaaatttaaactgtttttatgtatttatattacataatatatagggatttgggtgccaagaagacataacattttgtgggatgtttgatggacatggaccatggggacatgtgatagccaaaagagtaaaaaaatcatttccatcttctctgctttgccaatggcaacaaactcttgcctccttatcatcctcgccggaatgttcctctccgtttgatctttggaagcaagcttgcctgaaaacattctccatcatcgatcttgatctcaagatcagtccttccattgattcttactgtagcggctgcaccgctctcaccgctgttttgcaggtaacatacatacatatgttcataatagtactgaacacctttagcaaaaaacaaaaatacataagttcttgtaaccatattataacttttcattttatggtgtatagataatattttgtgagtatttataatgtttcatttgaaagatgctaaatgataaagtttgattttgtctttttaagggtgatcatctcgttatagcaaatgcgggtgactcacgagcagtaatagcaacaacttctgatgatggaaacggtttagtcccggttcagctctcggtagactttaaaccaaacattcccggtagagttctagaagcctttccatattttacagttacttttactcagatgaaatgacgaattaacaattggtatgtgataatttccggttaaaacagaggaagcagaacggataaaacaatcggatggacgattgttctgcctagacgatgaaccgggagtgtaccgggtgggtatgcctaatggaggatcactcggtttagctgtttcaagagcgtttggagattactgccttaaagacttcggtttagtctctgaaccggaagtaacataccgaaagataaccgacaaggaccagtttctaatcttggccaccgatggggtgatatatcaaacttactcagcatttaaatcaaaatcaagattgataaatcatataattgtgtaatgaactaatgatgtatgtatgtatatgtagatgtgggatgtgatgacgaataatgaggcagtggagatagtaagaggagttaaagagagaagaaagagcgcaaagagattggtagagagagctgtgacgctttggcgtaggaagagaagaagcatcgccatggatgatatttctgttctctgtctcttctttcgtccttcttagtttaactcttctttaacctctctattacttatatacatttatcaatgtattttgggcgtcattgaacaacaaaaatgtgatacatatacatttttacatagaataatagatgttgtgaggagtgattgagaatggagagataggtgagtaaagagttttataatggttttgtttgtaagtacgacatgtaatggttcatatattgatcaaagtttggaccttgatcttgattatgatttctatagaagacaaatttctaaaatctcaattctaaaaactaaactatatgctggtcctgaataaatccaatcaaaatcataactcaagacttgaataaacaattttaaaagaaaaaactatttcatatataatatccaacattgatgagttttgtgacaaggattagttttcagttttgtcataaagaggatttgcttctaccctttatagtgacaaaaggacaaaatttgccataatattcgcaattctgaaagccaagtgaggccgttgcatcattcaggtttcttggttgctgagatcttcagagtaccttcattcaccaacacctgaagctctgttttagccatctcacgaacttgaacatcttcagtctctacgaaagcagatagtatctttgaactgccaaaaaaaaaaaaaaaaattaacgcagcagaacaagatttcaaggcttgacgaaaaacacctgcttgtttgcagataaatggatgtatgagaggactcattagactaactaaccagtgtccttgtgcccacgaccgacattttccagacaaggccttcttaaagagaatggacgcgaaaccagggcgattcaagacaagccttcttatggtccgacttgagtgaaagttttccaggatgtgttctgaatccttctcagattcttggggtttcggttctgctgctacagagctaatagcttcgtacagctcacacagcttctcgctcagagatgggcagagaataccatcagagcctccgattgcaacctgatacaaaacaaacgtgaaaatgatgaaatctagagattagcttgatgaaatctagagattagttgagaggaagaagatcatgacaacacaaaagaaaagaaaactggaaattagcattttgttatcaaaatatatgattcatctggggtagagattgaatttcaagaaatattgaatgaaagtagcatctgttatgaaaggtggataagagtatacgactatctaccctaacaaatgtcatgtggaaaattggtatctacaagttacagaaatcaaaacatttttacaacaggactaaaaccaacaaacgatgtgagaccacaaattacctcatacatgacctcattgccaaattttgactggaggaattcctcggcgttctccacacacacatcaataagcctctgtagaaaaatcaagaatgatccatgagagttaatacaactaaagttgcaacattgtatcagaaaacaatcaagaaactgaaatctgagtcaccacgtcacacaaacctcagcaaggccactgttgacaagcaactcctgtcttctcacaagggggtcttttttaccacccatagctgtgacgttttcttcatgatcagaatgttcagctactgtatcttcttgttcatccttcgtctcctcaccaatttcgttaccatctgtgtcctttgttttagaggatgtctctgacttatcctaaaattgaaaggaaaagattgacaggttttatatccagtagaaatccataagaatgaataattctagcattttaattaaaaagatagttggcgatatctatcatcataccattgagcagagtgatggaacagaaagatcaagagcggccaaatcatcatggcttaaataacgtgaggaatttggatgcagtagctgcaatagcggtctcctaccattctgaatacacaattttttgaagtaaacgttaaaagaagaaaatagaaaggcctaaaaacaaaggaacaaaattatgtacaaaatggaaccaacaaaaggttagatgtcatcagatcaaagaaacgataaggtaaagtttcatctcagaaaaatttcataaagaaggaacacaaaccttgtccataacaagatcctttagggtggcctcaagctcacgaacaattatctgtttatggttgaacaagattcagaagaatcagaacataagcatataaattcaaacaattttttatttggctcagtgaaactaccttggtcacgagctttgtgtcatcaactattgaaaaaatacatgcaagcacctgagaacacatggtagacaagggttaacatctgaaagacgaatacaaaccggtagtgaagtactataagttgtaaattcaaaaggaaataattaaatgcctccttaccatacttccaaactgatcaaaagccatctttttaacatgctctttcattgctttgataatcttctttctctcctgcaaaagaatacgatttagaaagagcagaagttcaacttataagttttctattgaaatctctacaatcagtcctttgctctaaaggtcttacaagaatgttttgctatttacattcaaatcacgatttacatatacaaccattagaaaggaaagaaaaacttagcaaatgaaagcttatgagatatacaaatgaaacccaccataattctgaggggtaatcccttgtattatcagttaacgagtaaaagaaaaaggatacctacttaaaaagttcaagaatgtgtaccttagcgcttccatgtttgatagaaagcatggcaagcctagaaccatcacgggtatgaaccatacgcaaaagaagggagcctgtcagtagctgaagcacatctgcagcagaagtctacaaaaaaaaaaaaaaaaaaaaatccatttagcataaaacaagaagaatgtaatgcaaaacaaatttgtaatcccaaaccctcacataaattatacatatatataccttatcagctattgtcaggtattcaatcagcaatttgtgtgtgatagtgtggtcgacaattcccttctcaagtatcggttggataatggcagtcatgtgtcggttaacagcgcctttttgcagtcccagcttagcaatgatgtccaccaccctgaatcacattctgtaactcttaatatatgttcaactcatgacagtgaagagtgatatcgagtttgtaatcaccatcgcaaataacaacaatgaaagctaagataagggattcctagttctcaagtatcaaaaaaaaaaagatacaagagacctggctgctctatttcctatactttaagagtaagacaggaagataaatgaaggtttacgttttttcgttagatgtggtcaagcccttgaataactgaagctcagtagaatacaattctgcaaggagttcttgtttttgtgctgcacttcccagatggtatgcatgctccacaacttgaggaagattataaaaaaaacaaagagaaagtgagcttcaaaagaaacaaaaaatgctatatatgttgaaacatcactatgttacatcagtagtccacataccaagagatccgaacacatgacggagaagaggagcaacatgtcccctgaggctggatatacaagctgccagctgctgcttagatgctacacaaatataaactcaaattagcagtttgtataaagctaactgtatatacaagttgaagttagagcatacctccatccaacatcttctgtataaagtgaacagcatatttgttagaagcaaggttaagaaactgtggctggagttccgtgaagagaacatctttctcagcttgtgagcaaaacttcacacaagtctacgtaacaagaagaaaataacaaaccaattacatatcttgttagaaatttgacagccttattaacaaaactcaaagatgcaaaaacatacctgaagtacacgagatgaaacatgtgagactgcaatctctggaaccttccccttcatcttccttatagcttcagaaatcagcctaacaaatagtttcaaaaccaagtttaatcaaacaaatacaatatataacctttttaaatcaaagattgacaatttattgtataaactaactttgatcgatcctccttgccgatattacggcgtctcatcttctcccatagagatacaagctcctgataagagttatccctatgttacaataactagaagacgaaaaaaactaaagccagaaaatttcaattcacaaagcagcatacttgctcaagattgtaatgaggctttctcttcttcttcctagcttctgttagctcctgcaaacccaaatcaaagcacatgaagaatcagaaactaaagtataattcatcagacatatagattcaaaatccaaaaatgttttaccttagcctgtacacgacgctccttcttcgatagattagtactctgctccttatcacctgcagatttgggtttaccaaatttaggtttcacatgttgttgttgttctccagacactagctttggcttctttgattttagagaatcgaatttggcagagctatcggtgtccttcctcttggttgatttctgaggtttcagacctttggaagacattgttgttgacaaacaaaagttgaactgtgatggtggtgtgtgtaagagataggcaagggttttacagtttctagggtttttgaggaagaagagagacggcgatacagttttgtttggcggaatttggacaccaagtaccaattaccaaaattaaggcttttttctttgaaattacatctttgccattggcacaactggattagtccgctctgtttttttccggtttaacttgtggaaatttcattggttaatttaaccatctctgatttgtatttcataatgttgttgattcttgtgaagcaaaatccattctgatgaagaatctctatttgcacccaatagtcaaagaccaacaatggtcgacatgtatacaaattaataaccaaagatgacaaaagaaaagagtaaatacatatagattaggcattgtaaatggactaattaatcaaatatggtttgttgtctcttgcaagttgctaaaattgcactgaacttggaacataagagaacacaaatggataaccatttctgtctctagatcctcccagttccacttctttgaaatatccatcatctccaatgaaatatcctaagttgcgagaacgcgtctctttgtctttatccaaaaccactacaaccttattcttcttgtcaatgaagaaactcacatggtgaaaactaaaccgataatgagggaatgttatcatgttaacctctaagaactttatccatgacaccgcattgagctcaatcttattactaacccatatctccatcatcattgtaaaccaggggtgatataacagcacaagctgctcttctctagcactcaagagactcacactctcctttgtagaatagtcaaaaggcagagtaagtcgcggtccaaatctctctgttgtaaaatcaaaacaaatcaagaaactaacccatgcttcttgtcctccttcatagatcacatactttctagcaaaccagtaagtatttcccttaagagacacgccttgtttaaaatattgcatatccccttcaggagtggaatcaacaatattcttccatgaatcagagtgaaagttgtaaatttcagtctcataaactgggtgaaaatcgactaatgatgtcaccacaattttcaagattttgtgtcgaaagacaagagttgttcttcatctcgtacccgagagcgtagctgttccatctcttgtaagaaatcctatgttcgatacactttgtttgcccacgataagggttccaaaccacaagcttataatttttttcgttggtgatgcataaaaataaaccgtgacagatatggacttgagatatacctattcgatctgaatcatctaggctgataagtttacatttaaactctatagatggatcaacattgttttgaatgccatggagattgacgctcattagataaactttgtattccgtcattattaccacctgaaactcactttcccttgctgctgcgtttgcttgaccaacgtgcttctttgtaaagctctcgtctttggatataatgttccattttttgcaagtagatcgcactgttctcagagatgtcaccggaactctagagagcacctcctctaccaaatccctaggaagatctgaaatcgccattgttgaatatgttatatgtcatactacaaatcaagttacctttagcagtgaaacaaaaaaaataaaactcttttcttttctctgcctagctagggcacacccggtggtatgcaacagaaaatttatattttctgagttaacttaagatatagattttattatgtttgatatcttgaatttccttgaattgcttttttaatttaaataatttgacatatgattttcaatagtggactttttttagcgaatctcattaattgatcatacgatgggtcctattagtgaccattatttagaaaatgaatgcacaggaacaacatgttgttcctctttttttcaccatcattagtattttttttccaaattgtaatatgtagaccccacaatattcctaatcattctttattttttgaggaatggtagaagaaaatttttccttcccaaatttgatgaggaacaaacaggaaaaaaaattaaatatttattaaataaaaattaaatttatgttcgttttatatttaatatttaatttgaaaaataatttatttattttttaatttttgttactatttattctatgttttggttatcatttacagtaacatttgttctatttttcctttatatccattccttttcattcctattttatcattttttcttttcctgtttgttcttttttagtcatgttcttcttcattccttgtattcatttataggtcaccaatcggacccgatatgttgatttaaagagagtggacatatcaattctggtagctggtaaaaagcatctatttcctttgctttcaagctcatgtgttacacaaacatgttataaagtcatttttttgtttttcatatgcaaagagaacaacaattgtatcatggacaatacagaacttctttattttcatctaaatagcaatgctaaagagagcttctaaggaaaaaagtgtctaagatgtattcggctgtttcaaaaaaatattggaagagccaacgagagattacatactaagtgaataataatggtctgacatacaaattaatgatcaaaccattattatgtcaagagcgaggcaaccatattcgattaattagttcgcactgctctaagagatgctaacgggaccctagagagcacttcctcttccaaatctcggggaagatcggacatcgccattgttgaatctctcatctccaagttaggtcaaagcttctacaactcttttcgtaccttccggctatatatgtaacagcaattgaagacacaactcactgggctaaacctgggcttcagttatcaagtcggcctcttaatgtgggaccaatacattttttgtatttgatcgtatagcaaaaacaaatgattagcaccatgtggaaacattagagagtttgtgtaattaaatttcaagtttcttttctgtcttgttatatacataaaaatggttacagtaaccttgttttttctagttatcctcatatgctccaaaaacataggagaaaacataatcatgaactttttgaccaatagtattgttaggacttgaattctcttagatttgttaattgatgatgaattctcttagatgtttataacactatgaaaatcattacttaaaaaaaaaaaaactaagatgatccatcagtcacactttaaatgttttttaaaatatgttcatatgttttgtttatggcattgcgtacataatttaattagactaattataatatcgatcaaacaaagaattattggctggatttggtcgcagccattagcagtcgctctcaactaatattattacgagaatctctagctgagcaagtatctcgtatttctcacgctctgacgaaaacttctacgagatagacgcagatatcgagaccacgtcattccccctaacaaggcaacaacatgtggcggacgccagtaaaactctgctcaattcacttcaattccatttttcgaatccgcgtgacgtaacccacctaagggtttataatccactactttgcacccccacctaaaaatgcatcacaagcgcgacaagtgtcaatacaattcagatacggagaatactctgagatcccacatctgctttcggtgggctcacccgcatcagataaaaaccctaagctaagggatcagaccaaacagtttaaccaaacgaggttatcaacttatacgacaacgaaagcacttatcaatgataagttagttaacttatcaaactacagtctgtgtgacaaaacgcatcgaagaaagtggagaacaagtcgtacttttttctttatctttttccttttttattaaatgaaaaaatataaatagaaattttgtagcatctctggggtcagctttttcttaatgttcgctttgcgacgcgaggaaatgcaaccttgaaaccctagaaaactcattctcaactacgactaaatcgatttcgcaaactttgacctacccttctttcacgataaacccagatcgcttaaattccttgaatttcttcttctgagagttttaggaaaaaatgtcgtctttgagcagagagttagttttcttaattctccagttcttagatgaggagaagttcaaggaatctgttcacaagtaagtttgtgctttgtcgtttttgtgtgcttgtttggtttctctgcgtaattttgggtataatttggaattggttgatgtgtaggctagagcaagaatctggcttcttctttaacattaagtactttgaagagaaagctcttgctggagagtgggatgaagtggagaagtatctttctggtttcactaaagtcgatgataatcgttactctatgaaaatcttctttgagattaggaagcaaaagtatctcgaagctctagatcggtaatgatttctcttcttgtttggtcggatatttagactagtgttgttgatttgatacatttgtgtgtttttattacagaaatgacagagcaaaagctgttgagatattagccaaagacttgaaagttttcgctacatttaacgaggagctttacaaggagattactcagctgcttactctggagaattttaggtttctttttttttttactttgccattgatattattgaagttttggtaggtggttacgataatgttgaagagtgtgtttttttcttagggaaaatgagcaactgtcgaaatatggtgatactaaatctgcaaggtctataatgtatactgagttgaagaaattgattgaggcgaatcctctgtttcgagagaagctagccttccccagtttcaaagcttctcgcctgcgaactttgatcaatcaaaggtgaactaggaggagtcataattctttcctttttttatagagattagttaaagtgtatgacaagtgtgtttgggacattgcagcttaaactggcagcatcagctatgtaaaaatccaaggcctaatcctgacatcaagacattgttcttggatcactcttgctcaccatcaaacggtgctcgtgcactcactcctgtcaatcttccagttgctgctgttgcaagaccttcaaactttgttcctcttggagtgcatggtggagtaggatcacttacttaacttccacccattctattatataacttaatgttcatattttgagggttgatgaaacaactgtatctgtgcagccctttcaatctaatcctgctccggctcctaatgccaatgctttagctggatggatggcaaacccaaatccttcttcatcagttccatctggtgttgtcgctgcttccccatttcctatgcagccaagtcaaggtataatttatgtcacaacttacaagtgtctggatattatggtatctttcgtttttttttcttacttgtgatattagagtttttaggaaatgaattttaagacctgaagttctattgctgtatttcgtctcaacagttaatgagctgaaacaccctcgggcaccgtctaactctctaggattaatggattatcaaagtgctgatcacgagcaactcatgaaacgcttacggtctgcacaaacatccaacgaggtaattgccttcaggttttccttgtttttgaaacgcttagtgcttacctagcaaacaaaactcttgttgcttttggaatgtgcgctttgatgttgagtagatggctctacttttcaaatcacaggtcacatatcctgctcattctcatccccctgcgtcacttgatgacctccctagaaatgtagtgagtacaattcgccaagggtcggtggtgataagcatggattttcacccttctcatcacactttgctcgctggttagtccattgctaccatgaaaagcttagtagagttgagatttttatttggctcttgttataatatgtctgttactcgtagttggttgttcaagcggcgaagtcaccttgtgggaagttggatccagagaaaaggttgtcacagaacctttcaagatatggaatatggcggcttgttctgtgatcttccaggtttctctcttcttccatcgtttttacttattttcttgataaagataaattatctagaaacatactttaacactaagctaatccagccttgagtgatttatgttctgttctgttctatcctatactttaaaactaagctaataaactatgattttgttgtgcgggcattttctcgccagggttctatagtcaaagagccatcgatatccgtcactcgtgtagcatggagcccagatggaaacttgcttggtatggtagatggagattgttctcctaaaaacgttttaaagatatatagttgtaatttcaagtagacacgaagtttgaactttgtaacattttccatgtacaggggtttcttttactaaacatctgatccatgtatatgcttaccaaggctcagacctacgtcaacacctcgaggtatgtttaattgtcttttcgtacttagtttcttgcctttgcatctgcaccaaacttaatcgatcatctgtttctgtggattagattgatgctcatgtaggctgtgtgaatgacttggcgttcgcccacccaaataagcaaatgtgtgttgtgacttgtggggatgacaaattgattaaggtacgttaggattatgatgactctgaactcagttttattatcccgtgtctaattatgatatttcctaggtgtgggatttgagtgggaagaagctcttcacctttgaagggcacgaggcaccagtttattccatttgccctcaccagaaggaaaatattcaggtgcaggcatctcttgtttaaaaagacctgaaaaactttccctttcgctgtcttgtaatttatttttctctttttttactatgcagtttatattctcaaccgctcttgatggaaagatcaaggcgtggctctatgataatgttggttctcgggttgattatgacgcaccgggacagtggtgtacaacaatgctctacagtgctgatggaagcaggtacatcattgttatttgaaaagctctggagttgtataacaaaattatgtctctgccataaattgaaatcttctgaacaaaatataggctcatatcattatcaagtaaatatctgctatgatttcagactattttcttgtgggacgagtaaagaaggagactctttcctcgtcgagtggaatgagagtgaaggtgccctaaagaggacatatttaggctttaggaagaaatcagctggagttgttcagtttgatacaacccgtaaccgtttcttggctgttggtgaagacaatcaaataaaattctggaacatggacaatacaaatcttttgacagttgttgaggctgaaggtggacttccggtatgacattcttgcccaaaatactcctcttggctacttgtatataaaatcttttgtattctcgagcctgttactttactgatgctatgtaccgtttatttcagaatctaccccgattgagattcaacaaggatgggaatcttcttgcagttactacagcagataatggattcaagatccttgcaaatactgatggtctcagaaccttaagagcatttgaagcgcggtcttttgaagcatctaaagcatccattgatatgaaggtcttggaataattactctttatgttatccatgaaatatttttattactcatgccttatgtccagtttaactcgagtgtcaataccggtgattcaggtatccacctccgcaatggcttcaagcatcagccccgctattggtaaaattgaacacatggacgcaggctctcctgcaaggccaaccccaattcctgtatgatttaaattttagtatatctttttcaatatatatatatatattttttcctatttcaataagaatccttatatgtggtctctgttggtgttatgcagaatggaattgaggcaatgtcaagaactatggaaaagccaagaaacttggactctgttgataagtctaaacctttagagctcacagaaattgttgatccgactcagtgccgacaagtgacaatgccagatagcaaggactctgttagcaaggtttgttaccgtcttagcttgaaattgcccatcaattgttctgtttcattaataattatcttgaaataatcttttgctgctatgtcaatccttaaggttgctcggcttctttacacaaattctggcgttggtgttttggctcttggatcaaatggtgttcaaagactatggaagtggatccgcaatgagcaaaatccaactgggaaggtgattcgttgtacctttcaaattttacactcatgtggtttgttgatatatgtgagttgttgagtcacttgtttgaagctctcttgcataagtgtctgaaattttgtccttttattgtgaaggcaactgctagtgtaactccacagcattggcagccaaacagcggtctcctaatggcaaatgatgttcccgagaatcctgaagggagtgttccgtgtatagcactttccaagaatgactcatacgtaatgtcagcttgtggtggaaaggtttcgttattcaatatgatgactttcaaagtaagcagcttaatccaactttttctgttctcgggagcatctcctaaatactgatacctcaggagctaatgaaactatttgagtaatatgcgaagctaaatgcatttttccctttcgtgcaggtaatgacaactttcatgccaccgccaccagcttcaactttcttggcatttcatcctcaagataataatattattgcaatcgggatggaggactcgagtatacatatttacaacgtcagggtagatgaggtatagtacatttgttctattctgcggtctactggtttttactggtgtaactgctgattcatctcttaaatgaatttgtaatgtaatctcttttaatctataggtgaaaacaaagttgaaaggtcaccagaagcacataactggtctagcattctctaccgcgctcaatattcttgtctcttctggtgccgatgctcaggtaagacaaaattcatgtttcttagatgctattggagcttttcgtgtccatgttggcttgtaacttaacagactcgttaactctctttattacagctcttcttctggaccgctgactcgtgggagaaaaagaaatcttcagcgatacagctaccacctggcaaagcaccagtaggcgacacacgagtccaattccacaacgaccaaatccagttattggtttcacatgagacacagctcgccatttacgatgcttcgaagatggaatgcattcataaggtatcgtaaaaaatctttgtatttacttggagatcttgaatgattataagaaaccttaaattctcattccttgtgcagtgggtgccccaagaagctctctcttcgcccataacctctgcatcttactcatgcaacagccaactggtttacgcgtcattcgctgatggaaacattgcagtctttgatgctgaatccttgagactcagatgccgcattgccccatcagcctacatgcctcaacctacaccaaacaggtaccgtattttacaaacttcatataaagtttatatcatccatctgaccattgtgattttttgggactgattatgctttctttttcttctgtgatagtgcaccgattttcccacaggtgatcacagctcatccacaagaaccgaatcaattagcggttggactgtctgatggttcggttaaagtgattgagccatcagaactttctagaagatggggtgttggcgtcgcagctggttcagataaagcagggactgaaaatggacggccgtctagttcatcagcggctaacaactcaagttcggatcagattcaaaggtaaaaatagtttatgtcagttaagttagttgacatatctcttgttattttggattgtaaagttgtgatagcttgtgctgtttttgtaaatgagattctcaaattaaatcagtaggcgcaataacagtttattttatatttttcggcgttttaacagttttaagatggctatactcttgaatgtagtagctcttaaatctatggatttgtcaaaaatttgcgatttacgcgtttatatttcggccgtctgatttgtccaacatattcatatttcgtttgtggccaatgttgaaatgagtttcatctaaatatcccctaaactaaattataataatgacatgagctagttgatcaaagatttaggagattaaaccgttctttaaaaaataaaaagaagtgacgtacactagttttacaattgatggtttataactcttataataatgtcaaaatctgatttgacaaacaaaatttggaaaaagccagacgtaattaagaagaagccattagttttctctgtttcttctggttccttcgttgatcacgccgacctgaaagatggacaacgcaagatcataaacatctgtttaaggaaggacacatcagtgaaagcaagttatcaataagatcagacttatataaatatatacctatcttctcttcctttcttttctttttcaagctcgctatatcgcgcctcttctctgcactctgacctttcattttcagcatctgaacaaagcgacaacatcattcatcagatatggtcatgcaaactggtaatatagttcacaccgtctcagcaactaagaaagattgaattttaaaggaaagattatccaaaaaaaacacccaacacatatttccaatcatggtgatgggtcatcaaggtcaagctgaataggtgatttgaaataatattggggtacaggagagagtcgaaaactaagtacctcgttaccaccagcacgaagggcttgaagaggttcgatgcagttctggttaatgacaacaagttttcttctctttatatctccaccaatttgcatttgtgcttgtttttgcttctttaactctacaaactgattctgcataagagtcgacacaccaacctgggacaaaagatattgataagtctcctgtgcagcagcaccttctgtttggaagagagctagaatggctaaagatttttttttttaaatgcaagatatggaggctgtgaccaaaaaaaagaaagatgagaggaacaaaatttaccccagcaaagtaacggcctgaaaatttcttgggctgcatcggatgtgataagagcgtgctaagttcctgcggattgaaccagacatcaacatataattcgtaatacgattttcttaagggaaagtaatatttcatgattcaggagaactttttttctgagtagcagtgaaaaacctccttcagcttattaagtcgtgctgaggtcgcttttctctgcctgacattgtccactctttcctcttcactttcttcatcgtccaattcgagttccattgattcagcatgttttttaagccaggtcctgtctgcattctcctggatagcagacaccaacgacaaagttgaaagttaagtacgcaataagatttaaaaaccatccagctgagggcagtgagtgtgaaactactacgaagaccaccagctaaaaatttcacataggccagggttaactatatccaaagcatggtaatagaaacatggccttccagcatatttctttccaaaaatttcacacccacaacaaaaaccatagaatacaagtacactcagtatactgaaggaagaaatacccgcgagcctttccgctcaatctcatatatttgacgtgctagatataatcgcttcctcacagctggcatataagagttatccaaagggaatatctttacgctttcctgtaagcacaaacaaaggaacattcagcatgaaagtggccaaacgtaagtaaaaatacctactttagcattacccaaatcagtgtttttctttatgataaactaacttttgaggatatcaaagctttggtttgggagtgtaaatatatataccatagagaatgacttgcataacgtgtaaaacttggacgtctcatttggctcaatcaaagctatactgcatccatctgcgaatgctctagcagtcctcccacatctatgtacatacacctatatggataaaaggctcagagcttgtaaaattgttatcaatcaaaaactagaaaacttagagacggttgaagcttacttctgccgaatgtggaagtttgtagtgaataatagttcggacattcttaatatcaataccccttgctacaagatctgttgctatgagtattccattttcgctcgcacggaaacggtcgattgactgtgacatataaagagtgaggaaaggaaaatatgctaagtaacactagtaagcaaatacgtgtgtttccgaaacccccttgaactcaggacacaacaaaatattgtagcaaaaggagtcatgatgacaaataactaagcaatagaaagttcaaccttcaaccgagctcgctgcttcatttctgagaagagtgtgcaaacatcaagtccaagaatctttaaaagcccagagatatgccgcaaatcagtcactgatgtgcagaaaacaattgtccgcccttgtccatggacgctcaaaatataatacaagtatgcgtctttttccttctcttcgcacctgtagtttgttataagataaatatactaagaacaccgagatagaccaaaagaataagtagcatcaaagatttctggatgttttgcaagcaaataatgagtagaagcatggtgtcctccaagcaatgaaagcttacttattacccagtcaaattaaaagcttcggagggatataggttaaatagtacttacttaataaaagattcttcaatctttggtgccaaaatagatgtagttgtcagatcaatgatggcaacattatctctcattccagctcgttcagataaaacctcaatagaattcacttcaccagatgatgattgctttgactttgaggagccacgctttagctttttacggaaatccgaagacagcgctatggtggctgagaaaacaaaagtttgtcttttcttcttcgggacgtttaaaactgtgtcattactcttcacagtttgcgttttcccttcatttggtttatctgtcactggaagcaagtcgagtatagactgcagctccctgaaatgacctctttcaaccatgcgatcagcctcgtccaacacaaagaacgacaaggaatgcagctgccaaagatgattagaaaacgacagaacaatttagtgtctaagaatagctatataacagtaataacaattttacacgtgccttaattagcagacatactcaacttcaggaaaatggtattagattacaaactgattactgcatctacgcataaatccaataactacatcaaaatctgttaatgtaaaagcaagataccggactaatggaagcacatgattctttttactctccgtttatgcattgcatacctctacaagatgcttttctccagcggacataagttcccataaccttcctggagttgcaacaactatttcaggtttctcttttaaacgtctttcctgcttctctgaaaacatcccaccaacaataggaacgaccttgacgctaagattcttggcagcattctcaagatgctccgtcacctggaataagggaaaagttggaattgtatctcagaacttcctcatgacccacccacaagtcaacaaagaagcatgtcagaaggaaaaaaaaaaaaaagaagcaatgtgataatagtcaaggatacctgaagagcaagttccctagttggagtgatgattagagctcgtaaatagccatctgcagcatatttctgtgcttcttctccctttaatgcatacaatttaccaaccttttcccgctcgtctaagaggcgttgcagtatgggcaacccaaaagcaagtgtctttccagatcctgtctctgcagcaccaataacatcctgcggtccaaatatgagccatctatcaataaaatatactttcttgatagaaacaaaagctggtcatcctacctttccctgatatgctgcaacgttaaaacaagccttctggatttttgttggctccttgaaatcgaggcggtatatggacttcatgagtagtggatggagtctcatcgaactccatgcactaaattctggaggaatctcttcttcctcaacttgctcctctactgtgtcatctccatcacagctaactgctacaaaaaattatctaccattataatttgacttcttgacaagaatttggtgatagaataacaaacctcaaagatagacataaactagtgcattaaagggaacttacggtaacaagagataaataatatttagtgaaagaatgtatagtttgtaatattcagtagttttcagctcatgtgaaaatggtcgaacagaagaagtccaattcctaaacttaagaagataagcagatttttcttttctttcagctggtctaaaatgaagctaattcgatagaactgggtgttatccttgccaaatctatccaccacagagttttagtgtctgagaccagtgagagaccattaatagactaaggcattcctcgccagatcttaatatccctaagaaaattttcatgtacgactacgagtgatgattacctcttttgagccaaaaactattaaggaaaagagtatacgaaatactaaccagcagaagcgtcctgattctttgcggcctcattaatcttcttctgcttcttcttcttcttctcttttttcttctccttattcctcttagctttcttctcttttttcttacgagtctcctcgtcatcttcgtcatcctcatcatcccttccttctccatcttcttcagcttcttctccttcaatcatctcatccactgtctcgttggtatcatcatcatcttctggagattgttttctctctgttatttcactttcaatggtagggagagttagatggtaatcagcttcatcaatctcctcaagtgatagaaaacctgcccaaacaaagtataaagtttcagactttcagtgaactaacaaggcaaagcaattgaatccagacactaatttgagataaatgataatttgagttacctaaaaaaaaaacatgaattgcataaatttcaacaaaaatcaggcacccacaataatagttcacagaggaaacaaaaattcaaaaaattaaaaaacaaaaccaaaacttttacctccgtcgagctggcctgagcctgaaaatagagtggagaaggattcgccttcgtcgtcttctccaatgggtatagaagagctccaaggaagtgaatctatacgttcgaaatcctcctctcgctttctcttatggcttctcttgttcctcttcttcatcaaggaagattctttatcgcctgtaaccatgttagctgttgatttgagctaaaaaaatacccacaacgtttaatggaagctttgagaatctatctcctcgactcgagtcgttgttggctgagagatggaatatctcaagagaagttgaaaacttgcataaaccctaaatcagaacgaaaccatgtagtataattaaaccggttacggttttgatccggttaatctgaattaatacagaccgagtgatttgcctcgtaccgacacgagttacgtggaaggttaggatttaggggtttagattttagaagatgaacacgtcaaagtgacgttgataactgatactaatttgggccttttcttgtgaagcccattagctttctatccgcaaaatcgcaatattattttgatttttcaatcttttctagtttagacgttttctgttattatattctagctttatatttttttgcctgcataatgaatttgagtaaattatttatacatcgatattattgcaagcttttagctgtcattattgctaaagtgacgactgaatagcacattagcatgcaattgggagcattgattattgattagtgctaattaaaaaagcagttgaactcgtttgactctcagtacattcgatagaaacaaacataaaaaaaaaaaaaaaaaaaaacaaacaaacacagtaattagcgtggggctgaccgtaatttatggctcgtgaaaaagaatcatagattcttctcgcatggctagtatgtgttttcaacatgagcaagtaacattttatataggccaagtattatattatagatttatagtaaactagattttaacccgcgtatatcgcgggacgatttattttttaaaagtaatatatattaaaacttgcaaattttatttttataaaatatttatattttacagtttataattgttattaagtaacggtataccacgaatccatgagataattgttaaaaaactgaagttttaacccctattaaaacagcatattaataatattttaaaattttataaatattgattcaaatacatccaccatataacccaattccaaaatagaactcgttctgtaatttttttaccgtcccgtgatttttaaaaaaaatagtaattcttaaaatttaagaataattttttatatataaaagttttgcaaattgtatcattctctaacacatttatatctatagtttaattatatatatagtaacattatacataccacataacatttttggttttatataatcttttctaaattaggatgatttgatatgtttaatattagtggtcttaaaaataataaattaaagatttaacccgtattgaaacggtggattaattatattttacttttttattaatgttgattcaaaaacccgtccctccaaatccgttttgccaaaaagctatttattttgttaatattaattttattaatattaattttattaatattaattttattaatgatatgactctgaattagaatctaaacattttagataataacatatgagtgcaccatatttatttaataggagaatataccatatgacccgaatgcacttttatccaaatccaccaaaaaagtcttgcaaaaatactatagagataagaaacgatagtcggttttgataggtataagattagcaaatatattagttagcttaaattagttaaagaatacaaattgaaaaggtatattacactttatttgaatatagtatcaaaacttatataacacagagatctgataattttttaattgatgaatacttttttgtgctaatttttatgtgattaagatttaattgatttcgtatataaaatattaaattgacttatttgtttataatttggtaacatatagatatttgaatattcaatatattttgcttcagtttaagaagtctttgatgatccgtctttagatccaataagccctataatctagatattaacctgcggtatatattttagttaaactaaaaaattttattgtaaacatgatttaaaaatatttgatattattttatttgattttaaatgtatagtaaactgtgagttgtatatgttttgttgatattatctatattgtttaatgtttaagattatacacttgtagtttgattgttaatttaagagtttcacctgtagtataccatcttgtattaatatcgatctaaacattcaattataggatttccaacttgtattaaaaattgaatcacatctaatatgttattaattattgtagtatataagattataaattttcaatataaaatgtatgaaattgaatataaatatttctaattatgacccgttactcagtagaaagttttcttaaatctattttttatccgttataatatttttttatgtattgaacaatttatatttgtttttaaaaattcaaattatggcatatgggaaaaaactctaattatttttttataatgatgatattattttttcgcaaaaatagaatcatataaagatgagaagtgaactataataattaataaaaaattaatataataatttagatatcaaatataatttgttgattttaattggttacttttttggaaattaataatgtattttgtttttctaattaaattaaattaattaaaatttagatatcaaatcttatatgttgattttgattggttattatttttggaaattaataatgtatttcattttttaattaaatttaattaattaaattagtatttgactttttaatctttaaagagataaattaatttactctttaaaattttatttttaatggcatatctatgtaattacttacaaaaaaataaggttacattcaaaatgtattttttaaataatatagtaggatgtatttcggtgatcacgacgaataaaaccaaaaaaaaaaagagttgagaaagaatcacgtaaatgtcaaagtgtgaaaactaaggagtggggtctccaccgcaaccacaaaagggatccgaagaacttcctcaataagaatccaactttcaacattttcattttacttacgtgttctctaacagttaatagtctaaactctctctttttttctttactttttttggcaaggagttagtacgtctgtatattgatgtacgttggaatatcgtagtcgtagttcaaacagttgagctaatcgatgttggtttcgaaggaccagattagttcggtttgtcaaatcttcgtagattgataaaccaatactataatctttccattgcaattacaattattttccgttgctatagaagcttaaaatattaaagacacataatgttttaacatatttcatagattattttgaaattcagtgaaaaaactctaacatcagaaacaatcatactttttcattaacgatctcaaacttgtatacctttacaaatgttgaactttagcttaatcaagtttactttgatgaatgatgatagatatctatctgaaagtttcttgatgtaatgttttctagggcttagtgtattagagtaaaagtcgggaacatatcgtgggaattagtatactagtacattaatttagacagctaaggttacgtccaagaaaaacaatgataattttgataagattcgggggaagaaaaatgcttaatgagtaattaaatagttttttggaacttattgatcacgggagatcgatcacctggcataattatagtggccacacgacttaaaatttaaaggataatcattttgtttataagatgtatcgacataagtatgaccggacatgagtataatatgacccgcctcgttcataagattccaacgaatacgaaagagaccaagtaactaatcacatattgataagttaatactattaagaaactattaagctagaacttttagatctatgtgtggttgaatgaatatataaatcactagataacgtttacgtcaaaaccattattttttctcacatgaagatttcatcactatctaagatatctcatagtattttgtttcaaaatcaatcaaaggataaattaaaaacaagcaacaacttcatgaaaatacaaacaaagtagcacaaaacaacatcaataatatttccctttgatatatccaaaatccactgcattaggtataaatctataatcattggcgtggcgtatcacacaagtcacaacactaaactatatagtcaatggagaaatgaaatcaaatcttagtaatttccacacaatcatatgcaattaattgaaatcgtctcaacattaatttggtctttctccattaatcagagacttcgattttaatttggttctagaaataagtttgtgtttgatactgtataaaaatatgggtgctggaaccaaattaaaatgtgtggttttaatggaaaaatggactgtcaaagagagccaggctggcattttctctccgatgattgcttgtgggtcccgttgtcttcactgtcttaagcacatgcgcttctgcttacgtgtcctattcgcatttaacacttaatcatcatataaacctactttttttttgttcaccatgtataaaaacagacctcttttaatctgtaacattactacatctcacatttacgaaatggatactatatcttagtgtataatgttatttgaatagtatcttgcgtgtatatctttcttttacatgagtaatcctttaaaagcaatagataaacatggtttcgtaatgtagtggtagtaaactaatacgtcgtcttagattatccctatatagtaatcactttgacaaaatcattaatatattttagtgacttctttttgtttttaaaacagtaaatccaaacggctgctagctcaaatcaaaacagaccacatgagcaccatgtgtcgttttttaacacatcatattcttcttctctcctatctctatctatctactatcaatgtaattatcttctagttttagttatcttttcccaattgatcttagagtttttataatttgtatagccagtgaaataaataggctactaagactagtggtacatatacaatcatttataccaacaattcttaatctatatgaattagtaaaattaattcataatgtagaatagtcgtgtcggcaagatatgtttgttgttccagtcgttcaaggcaaaaacttaagaaaaaaaatgatgaatttaactgagttattattagttaagtttatagtcattatcattaacaagccaactatacagtcaattataaagataggaaacaaaaacagagataaacatgaaaacaaagttattcccaaaattatgaattaaattgaatttactaataagttataggagtgaagtctctcattaattcattttacttaggggaagaaggctaatataacgctccaaaaatctcagtgaatgatattgtctggtccttttatgtaaaattaataataataaggttgattagttactgggatcaaacaaaatgattaatattaatattaatagcaaattccaacaaacagtaagtgttaaacaaataataacatgtacttgtttcgcaactctctcttcatctcctcttcctctggtctttttttcttttgttgcgacttttcttcttcttcttcctcaggaacttaagtttctgagtccatgaagatgccagtaagtacgtttctccctttctttaattcttatttttgatttttttgtctaatgagtttggcttaatctctgtctgcaattctatgattctctcagttaaattttggtaaagaaaatcatatgaaatcgagatagcttgtaggattcttacctcagttctgtgttatttgtttgtaatcgagacctctctgcagccaaatctagaaatctgtctttagattcctctgttttttttttgtacttacaggctctgttacttggatcttcatgtcagtgtgttctgattgatgtttttcttatgaccgatgcttctgtttagtttcatagtttgaagtttatgaactcttatctctgtttatgaggttttccaagaggagaacttatcagattcccctgaatttcttccatggaaaccgaaaatataggagagttcatgtttttaatcagatatgattcttgtcaaactcaatttacgtttagctttcccggaatttcctttacgcaaacgttttttgtttcccttcacatatgactctcgttagtcatcacatataagatttgctaacatcatcagttttgatctgattttgtcgaatttagactgattttctcaagttgtaatgcaggtggcattggtctggctactggcattcactattctactgatcagtggggaaggcaataatgccatctgcaaggagaattttaagttagaccctagacctcatagtgtttcgatcctcgagtttggagcggttggtgatgggaagacgctcaacactattgctttccagaacgctgttttctatctcaagtcttttgcggataaaggcggtgctcagctttatgttccaccagggaaatggctcaccggaagcttcaatctcacaagccatctcactctcttcttggagaaaggagcaacaattcttgcatcaccggtatgagtgacctctctagcaaatcttgtaaagctaaatagtgttctttaggtatctatagctctttaagaagtgtttggtagacaagttttttgtaacacggtctctcaattgttgtctaatgtgctaggatccgtcgcattgggacgttgtcagtcctctaccgtcctatggtcgcggaattgaacttcctggaaagcggtacagaagtttgatcaatggagacaatctaatagacgtagtcatcaccggtaaacaacaaaatcatgccatcattaccttaagtttctggcttgacaacattaagactcaaagcttctttattttttggtaggtgaaaatgggacatttgacggtcaaggtgcggcatggtgggagtggcttgagtccgggtccttgaactatagccgacctcatatcatcgaattcgtctcctctaaacacatcctcatatcgaatctaaccttcttaaacgcgcccgcaatcaacattcaccctgtttattgcagtcagattcatatccgcaaagttttgatcgaaacatccgttgattctccccacgttcttggagttgccccaggtatataccatttcctcattcttttccatcactacaaaatgttaccgtttgaaagctaatttcttgaaccgttttttttcaagattcttcggacaatgtttgtatcgaggactcaacaatcaacgttggccacgacgcggtttctctcaagagtggttgggaccaatacggtatacactacggccgtccaaccaccgctgttcatattcggaatctcagattaaagtctcccaccggtgctggaatctccttcgggagcgagatgtcaggcggagtctcggatgtgaccgttgagcgtcttaacatacacagctcactcataggtgtagccttcagaaccaccagaggcagaggaggatacatccgtaatatcacaatctccgacgtcgatctcacaagcgttgacacagccatagtagccaacggacacaccgggtcacacccggatgataaattcgaccgggacgcactcccagtcgtgacacacattgttatgcggaatttcaccggagttgatataggagtagccgggaatctcaccgggatcggagaatctcccttcacgtcgatatgcctcgcggatattcatttacaaacgcgatcagaagaatcttggatatgctccaacgtctctggtttctcagacgacgtatcaccggagccttgtcaagaactcatgagttctccttcgtcttgcttcgccggtggtagcatatacgagggtgatgcgacggctcagtcgtattacagttggtaattatagtaaaataaaatggtgatgaagaagaagaagaagaaaaagaagaagagagtgcatgaggttacgatacgattggattttcgaattttttttgtcaataagttcataaaatttgttgtcagagagcgagaggaagaagataaaaaaagaaaaattacgttttaaggtggtgagtttcaagaacagagcgagcttttctattgtattaatgtacagcttccatttctttcattcatggtgtaacaaaattcatctttttttctttctgtgaagaagaaaataaaaaattatatgtgaaatgattagttatgtcttggatgctctttgttcggttatagatagatacttccaatttcaaaatgctctcatgttttggaagatagtattagttcagatgacgaaacacacaacaatgtgtgggattggatcagcacaacaaggagtcctgtcggaatataggaagttcatttgaatcaagtatcattgccaatttgccattttaagattctttctttttgttgtttgcattaacttgtttgctctgtttgtgagtttcaacgtttaactatcatttttgtttatcaaaatcaaatgttaggtttttgagtacagctgtgaaattgatggattactaccttttatttatacgtaacttccaacaatcttaattttctccattgagatgaaaaatgctatcattacataattatgtgagctttgacaatgcagatcttcgaacctgtcattgtagttttcagctctcagaagtcagaaggtacacccatctcttgcacatacatatacacacacacacatgtgacaagacccaagacgcaactcaagacacattccaaacccaaacggttcaaaccaatgattccaggtacaagcgacccaaaccaatctcagcccatctctggtttcgtgtcccacaagtttaaaccaaagaacggaaaagctgttacgagcggctgaagagtggcttgggcggttgcaggtcatttttccggactttagatacttcctttctcctaattagcgatgatattactattagccataagttaagattaattaccgtctatatttttttttgtcaaaacattaattaccatctactgattagtaattgtacattttcatgtccgttttcactttctttgggagattaaaatttagtgacaacattttttctttgtataggaccgcaacttttgtatttttttaaagaaacatttgtaagtgaaataacagtttttgaattacatatcgtatgaaaccaatattagtcccatcttgtcgagaggttggcaagaagaaaaagcaaaggagtcgtgtcgcaatgttgctgcggttagttcgtcgtaacactatggctgccatactcttttcttctcctgaactgacacgtggctcatctttttagccgtcgaccccattgttctcccactctattcttttgcttacactcaaactcaacagttctcttttttaactgaatagacatatagttgtctgtttgacataacgataattagtagaaatctaaaacattagttaacaaacaacaaaaagagttttaggaatggttctgtcatcgggctatattttttccccagatgtttagtgtaattaatataaaatttcacattttaactcctatgtaaggcttatcaaatccaatttatactctaaatcattgcatcaatgtaacgttcattattattttagtgtgattttgtttgtttttttattgtaattttttcattgtaactcagtgtatacaacacttgcaaaacgattagtttgaaataaatgaaaaaagttgttcagtttctaactattggtgtttagtaatacaagttacaacttcctaccaaaagttatgggcacatgataggacacccatcaagtagatgaatatataagttatgtacataactccacatttctattggcaggcgttaattaaatttggttatacaaatttacttttcaaaatccatatggattaataattaggacgaaaaagaaccaatattctattggcccgcgtgaattaatatttgaccttaaagcattatctagaaaaagaaaaaaaaaactccattataccatttagttgcttaaacagatacttccaatgcaaaatatgaaaatttgtcttcatcacatgcaatcgattctgaaatattcacattcgagaattttggataaaatggtccttcgtatatgagcatatcaagttatacttttgttttaacgcatttgtatgttttggatctaagtattttgattatccaatttgctgagtgcattttccatcaagaacttcaacaagttttcagtagcttactcacttaatgttaatataacgctccataggtgtgcaaatgttagtcatattaaagttgttggttctgcataaaaagctgaaacatttgtgttctacaaaaccttttttggtgacatggacctatagttggtacttgaaatataaataaaataggaggatctgtaattcatgtctgtctaagcacaataaagtgaaaaatataaattaaaaactcaaaaagctcatcgtaagagtaaaaactttttacagagaatatacggtttcagcgggttactttcttgggaccttctctatattatagcttttggcgcagttaaatttatgttatattaatcatcaattttttgtttttacgttttatatcgtatgtaaggaaaagtaaagaaagctattagaaaaaaaagctactaaacatgaaattatgagtatatctttcttaaactcaaattcaagctctcgtggtaataagtggctattgacgataacaattacaagttggaatgttgaatagtttcgttttttttatttctattaatgtttttaaaatgattgttgaaatagggaaaatttaacaaatgaagacaacgatagatggagaggtcgatgcaaatggttcgagtgatcttatccatttcatgtggacacgtgtcgcaatagggaaagcttctcagcaacgtgatttatttgtttttttcttatcattaaatgttttcattttattcttcgaaatatacacatgtacagtatttccaaaagaaaatacactatagttgatagttcataaaaattaaagaaatacttaattgatttaatattcgtattgttgagttttccttctaaatactacaagtagtgaattttacttgataacattgattaatgtaagaaattaggtatcgatgcacatatgaaacaagtcgtatgtcacacttaaaactatcgttaatttgaaaaagataagacatgtcggcggtgctaaacaactatttaagcaaagtatacactgaacttggataacttagatatagtttacattgaagttgacaaatttacacatttataaataagttactggtttgtatgtgtttataaatatgtcgtagagcaatcgaatagtcaaatatgatttgttatcctatacattattaaaaatatactttcgggggaatagggcgattggtgggtagcatatgatgttactaatcattcagatgaaccatttgcattatttctttgtttatttagtatccaacgttttaagagaagaagcgcacatgtttttttttgcaccatatactgactactgttgttgtaaacttgtaattatacatacatatatatatatatatatatatatatatatgttttcaacaatcaaacgtacaatttttttctattttccatttaatacaatttatttcctagaactacaagttgtttttgattaaaacatgaaaagtatactatataagttatattcttactaatcatagttacacacgacttgaaataaatacatactaaaaaatttggaaggttatatgtttaatttgcaccaaaaaaggcatcgagtaatcttatgttatgtatacatcatatatctggtttttttttgttgataaaagtatatgtactatatcttagctaaagatgtaggtgatgatgggaaatgcttaggtgtattttggtaccttaatcatatgcttgaatgtgcgtagacgtattattttgtttaatttaatgatatgattatatttttattttgccgtttaatttaatacatgtaggtccaatagacaggaggcattgtttctcaattacataaattcaaagggtagtttagtaaataaattataggcatatcaaaactaagaattttttatatatatatgcagctgctcttttgtttaaggcaaattcctattcgaaattggtagaaaatggaaattaaaacaaaaaattaggaaactaacaacaataatactaatgaaaatctattaaggtttgagtttgcaaactttacatatgacgagttaattaattttttcatgcatgagctggatccacgaatcaagggtctttggtcccactttcttcccaattatataaatttccttaccctatatttctttcattgatgattcaacccctatatttcactacttcacaaaataacccagaatttgagctcaaagcaacatccaaaatgttcttctaaatagaaaaataaaacagaatatagaacaatagtacatataatatacaaaactaacttgtaagaaattgagaataaaaaagagagtggatctaaatgaaatttaataaaaccaatagtctaaatgtagagagaatgatgaaaataaaggacatgtcagcttctacatatatgtaaataaaaaatatatatgactgagtatataaaaaccacattttttttttcttctgcatctaaatgttacaaaaattgaataggaaaaattaagagagctttactctgtgaataaataaaaaaacagagaaaaagagctctaaggtgagacaagccttgtcttcttcaactccctaagtctcatctcaccatctctctcttcttcttttttttggttacccagaagagattcacttctatctccaacaatttcgtattctctcataatattcaattttaaatcgaataaaactcgcgtcaatttcccctctttctttctgggtatatattcttttctgcttttctttttttgtttcttgggttcgagctacatagagagaggtatgatgaatccgagtcacggaagaggactcggatcggctggtgggtccagctccggtagaaatcaaggaggtggtggtgagaccgtcgtcgagatgtttccttctggtcttcgagttcttgtcgttgacgatgacccaacttgtctcatgatcttagagaggatgcttaggacttgtctttacgaaggttcgtatccaaaaaccaagatcttctcttttcatttttttttttttttttttgttcgtttaatctcacgagagagagagagagagagagagaaagagagttcatggtctcttgctccaatgatgggtttatttgtggtccattctcgaaaattatgttattttgaggaataattatggttttcatatcggtggttgactaactttgctccccctttaatagaaaccattttggttactttttaagattcacatattaatctcgagcttcttcatttagatcacaccattttgatctactgatagattcacatgtagatccattgtatataataagttaggggaggtttcaaatggattcaaatcttgagtctttgatctttgacttgagttttggttaaatgtcaattcatgaggtccttgttgtcagaattcaaatctctgtttttttcttttatctttgaagatatgaaacattttggttgttatgacatgcagtaacgaaatgcaacagagcagagatggcattgtctctgctccggaagaacaaacatggattcgatatagtaatcagtgatgttcatatgcctgacatggacggtttcaagctt

SEQ ID NO: 54 - DNA, 19801 bp, Arabidopsis thaliana
caaataaaatttatcttgtaaaatatgtctgtaactgactctgtatgaaggtaataaaatgtgcaacaaatctctccttctccagacaaaagaaacaagtcttgttcttctctgtatctatatatatcacataattaacttatagacacagtaaagaatctaaacaatctccaaagaatctaaaagttttccttgtttttaacccttaagtcataaaggagggtccatgtttctgtttcttgctcaaatctttgcatctgttgttatatcattatctttattcgtgtctgtgctttctctatgcgtctctgcgttctgatttctccttcttcttcgttcctgatcaaaacattcatcaaaccaattatgaacattctagtttccacagaagaaaatcagtttatttctgcattgtttgtcattatgactacctctctaggcatcacagggtattcatcagattcaagcattcgagccacttgactcatctttggcctcttgtctgcatcaggatcaacgcatcttaaagctgtcaaaagtgctcgtttaagttcgcttgttgttggtttgatctcaagctctttatccaccacttcctcaaactgtttctgttgaaccattagctttaaccactccaccatatgcacctaaaaacacatttcaaatttcaagaatcaagatcaacctctgctttcagagtattctacaatctagagaaaagatgaatgttttgtatacctcttctttaggccgcgcataatccactggataccttccagtaatagcttccaagagaacaacaccatagctgtacacatcgctcttttcgtttaggagaccagagttagcgtattcaggtgcgacatacctgaacattcatcaatggaacagagaaatatgcttcattaaccaatgcagattatgaaaagtaaagttatagctatagcatacagtttcttactcacccgaatgtacccataactcgagtactgacgtaatttgaatcagctccaagcaatttagcaagaccgaaatcagataactttgcgtcaaagttgtcatccatcagtatattgcttgattttatgtctctatgcaccacttttggctcaatagcttcgtgaagataagccagtctgtgtaagaaaaatgcaatccacactttctcatgagcttacattactagaaaacaagtaacaagaatcatcaagtggttaacttacgcctttgcagtgccaacaagaactttgatgcgagcctcccaagtgagatgccctttgtgaatcatgtctccatgaagccattgctctaagttcccattgttcatgtactcataaaccagcatcctatgtgttccttcaacgcaatatccaagaagccgaactaagttcttatgccggacatgtcctatagcttccacctcaactctgaaatctttatcagcttgacctctaatgtaacaaaaaacaattattacatctcagagatgaacaatgatagtagataaagaaaggtgttatcagaaatcttacggattgttgagcaactttttgacagccacaggggttttgttagtcaaagttccatggtaaacaactccataaccaccatctccgatgatactctccttggagaaatgattagtcgcgagttgaaggtcacggagagtgaaccaatgaccccaaccaatgtgagaaacctcaggaagacccaagagaggtgaaggagctgttgttgaaggagtactaggaggcaaatgtgacccaaccaggggttttttctccaaagaaccagagaacttatcgccattctcgatgtcctcaacgaatttctcatcaagagtttggtaagaagtaccattgttgttagatgaaccatgatcaacacttatttcttttatttcttcggtaaagcgagggctttgagttacaggaagcgttgtagcattagatcttttggactttttacggaagctgagccaaactgaaaggacaaggattactatgaaggctgcaaagagagcaatcactatgatctcccacagttcaagaacaccgtatctcttggttaaagttcgttttagctgagatgtcatatttcacagagacttgtatgtgtatatatgtacctgcagaatttgaaatggattatcaatgttatcaagaacctaaaagatcagtggaaagaggaagaaacagaagctaatggtgaatgctatagtcaattctcagatcttactctaaagatattggaaaaattaatcaaatgaagaagtccaacaaggggtttagtctaatcataatccaaaaacataagctttgatcacaaaaggagctaaaagcaacagaaccaaacagagcaaagtgaaaaaagcagagcatataagaaattcaatcttatcctgagaaaatcaagaacatctaaatctgataccaatgagatgagacaaacaaaaggtttgggctgtaaaaatttacaagttccataaacatatcaacttctgaatcatacaaaagtcatacactttaaaacctcagaaactattccgacaacagaatcagatcacgtgagctatattataactgtaagaagctaaaaagtctgaaacccagaaaaaaaagtaagaaacttataagcttccaaggcaaacccacaaacaaagatcgaaccttgaacttttgaaactacagagattcaaaaataaagatatttcgattctaattaacacaatacctcctttatgaacaaatttcctctgtttcttctttctatatccggctgggagatggaaactacaactcatccataaacatatagaaaacgaaacaagaacaaaaaaagaaacaaatcagtgagattatatatccattttcagaaatcttgagagagagatctttgtagggtttccataggtgagctgagaggaaaaagagggagggaaatagagaaagaagtttgaagctttctttgttgtttcttcttctggaatattttttatgctttgtgggctctgtgtttgctttttctatattttcgtctttttcttgttttactagtctttttctaaataaaaatcatattttaaaagatttcattcatttgataaataaataaaaagatttccattaatcatttttcggcgttaaattattcatttcatttttctttcttaggtatattaataaactttatttgtaaattgttactatagagatttaatctctcttctcttttttttttttttggtaaagtgggtttccctattaactctctttttgttgttgaaaaagacactattaatcagacatagttttgctagttttcaaaaagtaagcccactaattactaatacatcgagttcatcgtagagtaaataacttttacgtttccttcattacaaagaaaatttgcatatgaatgtacactttagttgttgagaaaaaaaaaacacacacacaagaaaaaaaaaataaggatatgatgataggagggtgacgaagctaaagaccgtgattggcgacgaaaagtttcaaagaaagtgtttacaccggttattttattttattaaaataggtcttgtaaaatgtgttactaatcaatttggtcaacattattaaattagacgttgcacctaactctttaaggtaataaatttgttcattatactataaccagctttacgtttattcttctccactacgcatttttatttattaagtaagtacattggtttctgaaggattaaacaaaaggaaacgagcggctgctaaatcagaatcgtggatttcgattctttgaattcgttaaacataataaaaagaagaagacaaaaatcatttgaaaaaaacaaaagaattttaaaaaatagaagatgcgtacttgggtccatgttatttggtgaatatcgtgtagaaaccaatgtattaatcctttaagtaacatatcgtaagtgaatttaattggcatgcaatgcaattgaaagtaaattaaccaaaaaaaagaataaattggcatgcaaattgaaatagcaaaaacacaatgctaacataatttcatataaatgcacgtcgcctccaccctccagttagttcaacgtatctgattaacaatgtgacgaaaatagttactttgacgacgtgtaagaaacaaacgtgtatcagccttggaaaaattgtttcgtgaacttctgagtcactaattaatcatatcaacttatctagtagaagaccaaagaaaagattatcgtataacttactcaaaatttaatgtgaaatgtcacgtaatgcgtagcatatgtttctcgtagttcatacttattaatcttagttaccatttacaagttattgagaaaataaaaatagttacaaacttacaacttatacatttaaccagagaatatgaggtcttcatctagaatgtcaacttaaaaatatgatttataatcaacgaatttcggtgatatcaaatcatcagaactttatgaaaataaattgaataaatcatcagaagcatatcctaagatgaagtaaaaataatttatagttaagataaaaaaaaaagcaaagaaataatagaggaaataatttgttatatattaaaataaaataaagcagtaataatgttgcctttgcgtgagcttgacaaaagtcaacctgagaatggctttgtcttgctgcgtggaatacaagagacatccatcatcatcattttccagctcgaacaaatgattctctccatctatttctcttctttttattttattataactattagtattttctttcattcgcacgatttttttacatctccctcaaccgtttaatatgttaaattgtttacagtaaccatataacataactactacatttcgttttacataatttttttgaatatttcactttaaaatgctttgacgttcttaatcttttacctatctatatgatggttggtttaatacacggttatatcttaaaacataataaaaaaaaatcattatatgattttaaaataaaatatgtatatcagaaacaccctacacacgacggcagatgatatttatcattattgtaaaaattaaaaattttaaaaaaattaaaataagctaattggttgtagaagtagaacaataatttagagcacgcgtaagaaacaattgcatgattagtgtccgcctccgaaagctaactaacaatggggtttagttggtgttgttcatattttatttcatttgtatattactttctttcttttctttcattttctcttaaacttttggttttatatgcagttttcttttttctctttgttgctgactcgctgtcttattattttgttattgtcttgcagttgttgggtttacatcatcatgtcctactagcatataagatagtctaaaattaatgtattagggtcttaacaacaatgatttataatattttaaacaataataacaaggattcagtgattgtttaagctctatttttgtctcttaagtataacatgcatgcatccaaatcataacaacaatattgtcggaagtttgttcaagaaaaatatcacaagttacataaaatggatagtgcggccattggggatagaatctgagcttcttaataaaattgtcactttttcataagtagcataaactacccaaatcacaaaaatccacattaaactatccattcctcattattttttttgggttttcttcaagtgaccattttccgaagaagctcatatagtttatgggctatgttggcttaatgcagttgcttaccttctatgctttagtttggttattttcgctttgaacatggttgtatcaaaacacctttgtcacattttctcaaagtctcttactccctgattattaccgttagaaactgaaagatatgtaagggtaaccaagtccttgtaaccataataagagaggagatttggattaaaaggtcttccttcgttaagcttggaatagaacacaaataggttcgaatacaacaatgcataaatcaaacaaccaaactaaagcatagaaatcaattatcaaaactctcattgaacataagtagttattcatgtctaatctcgaaggagagtattattagagtgtaatacacaatttctgaaaatcgataattaagttgatttatatgtagatttgtttaatcaaggaaaataagttgacaacaaatcaacaatatgtgactgccgacacaaattgattagtaataccaattaataagaaaaaaggtagaatacgaccttcaattataaaattggttagtatatcacattcacttagttattcttaattaattataataaacctctcaaatcctcacgtttagaaacaatattatattcacgatttagagcttaaccatatcgataattacacacactcatatcattatcgcatatcgcagatttttctctcttcaaaattagctttgattattcacatcataaacaggcctagaacaaagtctcttgacccagcataaggtgttatataggcccataaagcccaatctttctaactctcttcgcaggtcttctccgcatacaagagataaacccgtagccgttagattcaggttttgctgattagcttattcatctccaccgtcaatttaatttaattgttttggttcaggaactggacaaaatattaattaatttcaagttctaatctttcttcttctccaactaaactactgtagctagctatctccagttctacgttctttctattaataaaatcttcttcttcttctctttttggttgattcccaccattgaacctctcacgaattcgtcgtcgtatcatcagattctgctcgaatagctgaatttgtttaatcagatagtgttcctcttgatctatcgctactagatttgttgtgcgtttgttttctttgctgataatttgcaaattctctgcttatgatctcgaggtagtaatgtctgttcttctctcccttattgttcattttttaactcgttgcttatcggatctgatccatttcgctctctttctctgatcgtgatctctcgattttatcctgctcgtatctctcgattttatcctgctcttattggtggatttttggttttggaggtttagatttcatgtcgtaggttttggattttattttctggcatcattacttggtgttgtgaatccaattcctcagttaaatctgcattggctgacaaaagttttgcttcatttttttttttgttgggtttcaggtaatggccacagagcctttgcacctggtttttatactgccgtgttttggtattggtgcagtgtaagaaattgattgtcaaaggaaaatatttgctttttctctgaggagaggggacgagtaagatggcaaagatgataaacaagacgcttgtattaacttatatctacttgctgatctacattatactttcttcaggagttatactgtacaataaggtgattttttagaggcttttatacttaaataacgtatctaattgttaagcagatatgtgtagtttgcatgttagagcctgtatctccatataaggcttcgatgtttaattatatgtagtgtatctgagatggaaaccatagccaaacccttttcgtagcaatcggtagtaattttttctataccctatgtctacctgggatgatactattctgatgtatcgtcggatgttggatatgcaagggctatgatagtattctgatgtatcgtcggatgttggatatgcaagggctatctataactgtagtttgtattagcttttgttaaagtagagtctgacttctaaatcgtgactcttttattgctttttatttgcagtgggttttatccccaaaatacttcaattttccacttcctataacgctgacaatgatccatatggggtttgctggattcgtggctttccttcttattcgtgtcttcaaggtatcctaaactcaaagattatggagtttgctcctgtacatcttatctggagctctcttttataatattatcttctttgtggatccttagactccttttgcaagggcgtttataagttttcctctgttttgtaggttgtagctccggttaaaatgacatttgaaatgtaagccagtttgctctatatttttcatctatatttttttgttctcttgtacgtaacctccactggctctccattttgacattctttttgggcccagatatgcaacctgtgtggtacctataagtgcattctttgcatcaagtctctggtaagttcctgttctatagacaataaacataatttattgatgcgcttattgctggccatcaggttcaggaaaactctgtattttctagtatttcttgcttcccaaactgtctcttcactatttcttattctcttgtgcaggtttggaaatactgcatatttgcacatttctgttgccttcattcagatgctgaaagctctaagtatgtgaagagttaacattttggttacagaatctgtttagtttatctattcattacaaagcatattaatatgtgactatgcaatttcagtgccagtagcgacatttatcatggcagttgtttgtggcactgacaaaccaaggtgtgatgtgttctcgaacatgttgctggtcagtgttggagttgtgatatcttcttatggggaaattcatttcaacatagttggcacagtctatcaggtgacaggcatctttgctgaagcacttagactggtgctaactcaagttcttctccagaagaagggtttgacattgaaccctattaccagcttgtattacatagctccctgcaggtattgatactggttatacctttggtttcagttcgtctaaatatattacattacattattttcgctagaaggaaagttctgtctcactctactgcatattaatatacatgatcttttccttgacacactatgccttcaatttgtgcagttttgtttttctggccttaccttggtatgtgttagagaaacccacaatggaagtttcacagatccaattcaacttctggatatttttctccaatgctctatgtgctcttgccttgaacttctccatattcttagtcattgggagaacaggtgcagtaaccatccgggtggctggtgttctcaaagactggattcttatagccctctcaaccgtcattttccccgagtccacaatcactgggttgaatatcactggatacgcaataggtagattacttgatgtcacaacaaatgtgattgctgtaaacatctttcttgactggtttttgcccacataactatttattcttgtcatgtgtttgacacagcgctatgtggtgtcgtcatgtacaattacataaaagtaagggatgtgaaggcgtctcaaccaacagctgacagtcttccagatcgaatcaataaggtcagtcaaacattctcgatctctaagctcaagcagatctcagcttgcatttccctttcaaaagaaccactagagttgcaaactatagtgtagaaccagttaccttttttttccttctaatgtaacaactgatgaacacaaacattacacaggagtacaagatggagaagaagtcttcggataaattcaatcctaacgacagtgtggagatcccaagagtaggaggagaggtaaacgacgaggaagcccctttgatcacatcccggttgtctcatattggtcggacgcagctcggaaatcacgctgcttaagatgccggtataaacgtataatagacattttgcttcccaattcgttattttgttacttagaagaaaaaaatctttgaaaccaaacaaagaagttgcagcaccatctagacccgtgtcctcgtgtgtcaggtgaaaaattccaaatttgttatgagatagaatagcggagattattaccaatgattagctggaaaactaaaaagtctcaaattcgtttgtagtgaattgacgttaaatttatatatttgtggtcttaattttttccatcatcagccgaccctggattcaattatgttccggcttctgagcagcatctcttatatttgaactcgattgattggtacaaaatattaatgtcttcaaggtaaattctgattggaagagtagtaattgattctccagtaatagaaaggtgaaacaaaacgaattaaaggagaatacagtcagtagtttcataaatacttaacgtcagaaatgtagtagtactcttcatcacgttcttcgtattagcaagttacagaaagtgataaccatttggactcttctaatgaaattccagctgtgtcatgaaactttctacagtaggacgaagaaaggaatctaatgaaaacgtgagagagtataacattggtctgaattttatacaaaagaagtgataagttgctacaaaaaagaagaaggaaaaagaaatagagacaaaagctgaaaatatacacaccctccaatcaaacccagattcaaacgaatgggttaaaacaagtaaaagaacatgaagataaacatccccaagcctcgtcaactatcaaagcacacaatgccaacaagcacaaaccctctctctaacatccatgaaatggattgttaacaaattagaaggaaatatcgaacctcaagatgcaatttcctcattcctcgtgaataaatatacaaatagagatttatattctcacatgtagtcttgattcctcaagtacaatagcttcctcgattgcgctggaggagctaatcctgggatgtccctaatgtctttgttattcggattcacgatctgaagaattaatacaaaaaccagagttacaacttgctaatgagcaatcacaactttcaacagagagagaaaagacagtaccttcactatgattatggctactacaccgcatacaatgagaaacaggaaccccattatgcatttatcggtagccacctgaaataagtagacataagcattcaggttttgaggtcaagccaaaaaggataaatctacatatgtccatatgaggttacacacctgtctccctatctctttcaccagctgggaggccttcttgattgagaattgaatagtgtccaagtggttaactacgcgtcccatttgatccgtctgcaaaattttcaggttgtttaagactctactcataagattaatatggaagtaaaggagaataatttgcattacctgtccctttaaattagctgcagtttgagttccaacttcgagtgtttgttctacaacctgaaaggaacaagaatgttaccatagatatattcatatagtaacaaaggctaaggggaacataattccttctgtaacttacctgttttgagcgctcaatggcctgatcagtctcatccattcttttcattccagcatcaacaagctcctggtttgacatagctatacataataaaatgacaaaagccttcatcagtttttacattcccaatataatatacttcgcgcctaatcaaattatcagaatcattcatttctattatctaggccaccgataacatttctagtgccatattaccatctgccagaaatttactgacagacatcacaaattatgccagacgaataaccagagagcattagttaccaatccaacatattcaagtacatatagcattaaaaagtctaaacttcaagcatgtcaatctctaattgttctaagcaaactcatattttggtggcaactgaagacaagaatgcataaggactcacatgaagccacttgaacattttcctcagctgtaggttcgccactaactccagctcccatatcaaaaagctcaactttcttgttgccaagggtactcatatacctgagattcaagaccaatttcacatgtatgaacacataaaagtcaaatgaaatcctatatagatattctgaacggatcgatatgaaatcaaaaccctaaaagaacaggttgagattcaaataatcagctttcttaaagaggaatgatagaaatactaacgtttttcttagagcaacgtaagaattgagctccttgatctgtaacattatacaaaagaaaaagttaaacacagatgttaaaaagttcatacaaacaaaatgttagcagatacaaagtacagaggggagtgatagatacacaatgacactcaatatccaccttaatatatccattcggttataaacacacctaaagattgaccaaactgaatacgactgatgctgtataatggaactttacgaaggtgccaagtaagagttaatattcacatatttacttcagatacatatgacattgtagtataatcaaagaaaggcctcaatgaatttaataaacaaaggataaaaactcaccatagattgtttctcatcgttcaattgcttatttacttcaggagaatttctagcttcctcatccttgagttcacggtcgaactctttgaccaatctgacatgaagtacacattagacaagcaaatacagattattgaatcatggatttgtcacatcaatactctttccttctcaattctcattatacggcatcgtatccagctcaaagaaaaagaagtacgcataacagtgatcaaagagcacattctactaaaggcaattagcaaacaatgttgtaacgccgagaacataatggtaaagcatagcaattatgaaataagtataccttttacactctctcatcttgtcagtaagttcttcaagttgtttgctttgtctagttgaatccttaatcttatccaacctctggaaaccattcctgcaaaacagataatggtgaatcattaaaagaacaatcttttgagtgatgactaaatctaattcttatcatcagcattaagcaaaacacgcataaatcctattgagcacacataatcaaaaaattccaaaaccctaaaatatatatcacagtgtttcgtaaccacgacagagatagttagaaaattgaacaagaggataacatgtaaaacatacgcgagggctcggaaatggtcacggatttcgccatggatctgctccaattgagggctcatggggagattagaagccatgtcgccggagacaattcagaatccgacgaaaatttacccaaaaactacgtcactgcatctaaaatttccctccaatttaaattaaaaccctaattagacaaaaactgaagttaaaatctccaaaaagagaaaacacaaaggagaatgaatgaaagacgaaacaaaggacgacaaagaacgggaaaagggaaagagagctgtcaggtgtgtgttgtttttttcttttttattcaaacatatatattttttaaaaacaaaattgattaataaataaattaaaaagacagatattcggtagttaaaaaaatgacagcgaggcgccaactttttggtcccatccatatccgttgttagataaattatttcactttcactaatttcacctaataatactttgattatattcttctagccaacaaaattttcatatttttcgaatattttaaggatacaatgctagaattcaaaatacagtgttacttcgttagaattgtagcactaactaatcatcgtcactaagatcatcatcgtaaggatcaaggttgtcttcaccttcaccgtcaacgttaccagattccatgtaaaacttctcctcctcttcctcatcgtcttcatggtcttccttctctgctctgtcttccccgtgcaaagcctcctccttcaccaataaactacatttattagccttttataaaatcactggaatggcgtttagcgtttctcactttaagtaagttaagtacctcctccttctcggatgttacgagccagtcagggagcaaccgatccagcaaagcgtggttaagagttggtggtggttcatcctcataatgtagccgttgcttcagctgtttttctctgagccgtaagttgtaatgaacgtatgttagatctttcgttgattttttcccaaattggctctggcattgactgttaacttggtcgtacacgctccacttaggctcacacccaacagacgagcaagtgtggctcagtatccgaaccgccactcgctggagttccaaacagcttatcccatgctgttgccaccacgccgatggatcaagctctgttcttgtgccaatggctatatccgttccaaaatcagctttcgcacaagtataatccggaatctgaaaacatttcaacaaaaagttggtttaacctcaggttctgagaacaatgtgtgtgacttggtgatttgttttttgtctcacctgcatcaatgctgtgattctacgcgtgttatcaggctcaagcctaacaatgcattcgttaactccacgcacaacctcagactgctgcagattcattcacatttacagcaaatgtaaggaaaatggcagaaagcttttagtcattgattcaaatgaatgataatcatacctaccgccataaaatcaggacgatatttgtatgccgggttgaagaaatatgcagccacatagagaggatgatgaaacaatgggttccaacggtattctatcacccgccaaaacggtccgtatttccttgcatcatcgctatgaatagacttgatcgccattttcgcacagcacatgtaaccgtaagcatatggcatagatagtctatcgccaccatcattgatcatgtgaatcacctgcatcaccggatcaaccgatttcaaaacatactgaaccttcttccaaaacacagcactcaacaccatcttctccacttctcttccctcttcagacttggcggcggtctgtgacaaaatccagccgtcagattgaaacagacctctgagactggccttgtggtccataagactttgaagagtggtgaacccggaagcgtggcgcatgactgctggtctaagaagatctagtccctgtgtgaattcgttcttcataagattaagcagccatgtttgattgtaaatgaatcttgtgattctttgggctttctctaagcactcggagacaaattctagctttgagaagtcttcaagaaccagttctgtgcaatgtattgcacaaggagtccaatacaaattctttctcttctcttcaagtaattttccagcacttctaaagatagcagtgttctgtgtaataacctgcaccacattttcctcgccaatgtcgtcaactagtttgtctagacacttgaaaaggcttaaagcatcttctactatatcagtggcatcaatcgaggagtggaagtagacaccacgagggcacgagaccaagaaactgatcattttcttgccctctgtgttggtccaagtatctgccattatggaacaacctgtaaccacccaagaagatctgtactccctcaagtagcttttgatagttgacatctcttcctgtaagagcctaccagaaaacagctgactcgagggcacaacgaaaccctctccgtacataccaatcaattcaatcatcttttgaaagtacagagaatttgctgcttctgtgggaactcctacatggtgtaagaatttggaaatggaggatgtgacgtcttttcgtgatacaactctgtttgaacagctactgtatagtttcctttgcttgctcgaagaaggtgactgaaacggtatcatcctcgctctctttgtttttgcttcagagacagatctcatgttcgttgaatcaaagctttttcttttgtctttactaaaccttccatttcccagcatcaacctatcttggctggttggatagaagtcatgatcttctctgtcttcttcttggtcaggatcctgagagaccgttctgaaagttaaagctcccatttcatcatcaggtctgttctgcctcttcccagctcgatgccatttcatattctctttaatcttaacataaacctcctcgggagcagttttacacggcgctacctctccaggtattctcgccaggtgctgtttaaaacggttaataccgccactcacaatcttgttacagtaattacatttcactttctttttcctctcgtcctgagcaataccatgttcccatccaggatcaatataacctgaagaccgaagaagactcccatcactcaagcctagctttcccttacttcttatagaccagcagcgccgctcttcctcatccgcttcatcgtcattgttagattgatggaaactggaacaagactgtccactattatcctcagactgcctcagctttttggtggaacgcaccagattctccttcatcctcatacatacttcctccggagacttgtcacaataagtaacttctcctgaaactcgagccaagtgttgcttcaatctgtatatccctccactaacaatctttccacagtaattgcatttaaccttcttcttccgttggtcttgtgcaacaccatgctcccatccagggtcaaccactccaattgatccaggtggagccattgtcaaaccatttacaagcttcaaactttaacagttccacaaaccagtgcagccacaatctacaagagtctttacaacaaaaacaagactttgaaacaacatgcatggattcaacatagatggatttaaaaacaacattttttcatcaattttataaagcaagaacaaataattgaactgggtttttcttctatagcatacctacgaagctgagaactttcgtaatcggaggcgagatttttttctggttttgttgatttttcagaccaagaaaatggaggtgaagcttaagcgaagttggaacacatatttagacggcgagatacgtatttgagctaagaatcgaagaagcgtttttgcggaggaaggaacgagtcacgggacgagatagagctgggtgagaggcgaattaactcgactcgggcgatttctagggtttctgtcttcggctgactcgttgtttttaacgaatttccaaaatgagggcttgtatatttgcgaaattacatattgagcctttatataatggaaatctacgtaactaaccctctcttgcagtccagtcagatattcatttgtggtgttttgctctttcaccaatatagcaaaacataactttggaagttcctgaacttggtctttcaattttcgtgttgcaaaaacagttttacctatattaattttaccaattcaaattatataattttccaatcaagcaaaagtagtgactttatcacatttttcaagccaaaaacatcaacgcattatcatttcttggctcgagaactctgaatcatccaaaacattcttcaatgtgtgctttatcacaacttccaaaccaaaacatcaacgtattatcactttcttggataagtgccaatcaaaacctaattcactagctggagaactctaaaaatatcaaaccttccatgaaaatctccaaaccagtaaagccacacaacaagatgaactcttgaaatcatacagatacttttaaagattgaagatggaaccgattaatatgaatgaatgtcactgagtcttacacacaccattgtacaaaataaaagccctaatgtatcctaattcaaagtctccagctttctctgggagacatttgatcaaacacgtctgaatatgaactaaaattcaccaagataaatggccaataaccgcaaaaaagtagtctttccttgaaccctagaagcgatatatcacacaaaagctctacgtaccagtaaaattgctatcaagatttagaaaatcagcgttcatcttccttcctcttgccggtgaccttactctgtcgaataacaatatcctgaagattcgtcaatgcacctttagctctcaacttggccgttttagctgctatgatcttcttaagagcttcttcctttaacagagccaccgctttattcatattagccaccgagatatttccagctgcgacaagagccattgccgatttcggagtgagaggcgtttcatcggggacgtcttcattgactcgagatttggggaagaaggtgaaattggggttagaacatggctggcatgtgaaggaagaagctggtggtggagcggaggaggaggaagatgcggcggaggaagacggcggctgagttgagcaagaaaggtgggtgcttgatgggcaattgacgcagatgatacgagcttgtggaggaacggcgttgtcgaagagattgaaacaaacagagcaaaagtgttctcggtactctttgagcaaacaatcggtgcagagtcgccggaaagcgccggttttgatgacggtgtggatgaacgacggctctttttcacggcagactatgcattcgcgctgtttctgttccggattcatggctaagtcaacgagattgagaactctctccctcaacggtaaccctaagcgagagagagagagagaaagatgaaagaagcgtttgtgttgttctcagaatgttgaagatcttgggcttgaagagacttcaacgtataattctattgggagctgaaaaaacttatatagaagattaaaaattgggtcttgattcttgttgaattaaaaacagaatcttttattttttgttaatacgaagtgtatatatttggaagatgaaaggaaacataataatcttgtgttttcctcattgcttattgcaaactcttaagcattgtgatataacaaatgcgagcaagcctaaattcctctatttaatcgttttcaaatcatacatccaaacaactaaaataagaaaaagacaaattcatctgcaaaaagctttagctctgtgattccttcacttccacagcttctttctggtctctaatcattgtaaaagcccaaataaagatcaagatcatgctgttttcatcactctgccaacataaatgggtcaacttctccaagatctgcaaccaacggttctaattctgatggatcttcatcttctggagctaagtaagttggaaacggaagctttgagatgtctggtttcttgcaccatgcatcttttatgaacacaaagtttccttctgcaccaggaacctgcaacaacaccaaatcacaatcatgacctactaataagagaagagaaatggagctcatgttttgtgacagacagatcctagccaaagactggaactgggattgagatacttacttgtcctctcacccacatgaggttcctcgcaggatcgatcttgtagacccaaacgttctttactgtcctctgatctgcacccattctcccagccatctttctgcccttgaacacctactcaagtgtatttatcaagtcagtagtgtcatttgctttggagaaaaattcccaagaatcttagcaatttgacacatacctttccaggagcatctctttgccctgtggaacccccgcttcgatgggacaatgaagcaccatgtgatgccggcattccactgaaaccatgtcttttcatgcatccctgcaaattacacagcaaaagacatcaataacacagccattactttgcacaaacactatttcatccgcactccattctatatatctgccacattgtcactagactattcaacttatcatcgcaaagaaaagataaaactttagagcccctgagaatggtttcacctgaaaaccttttcctcgagtgatcccagtgacatcaacgtactgtcccggaacaaaatggcggacaccgagtgaagtaccaacaggaagaagagcgtcttcagtcacaggaaattccctcaacttcctctttaacggcacaccttgtgctctgaaatgccccaccacagcttttgacaaatgcttcggtttcttttgcccacatcc

SEQ ID NO: 55 - DNA, 45292 bp, Arabidopsis thaliana
ctgccttaacccagcttcttcaacaaagcactgaactatatctaatctcgtcttaatctcattcaaatccacgaggggttgcttcagccacatatgaagcagtctcttacccatccctgcggtacatgttctgttcatgagaccaaacaaactgaaattcttattagcatcagttttgctctccatcacattcaaagccctcatagctgcagagtcaagtctcatgaatccgccaatatcatatctgcggattgtgaagttcccatagttatcctcatttgagagaagttcagaaaacgagagtaatgcacctagagcaggagtcgcaaggtcaaacccggataccaaatctctaacaggctcaatattccccttcaccaatctcttaagatctgaatctaaatctcttcctttgaactcgtgtttcttcctctctgttatcatcacggcacacctctccagggaatcatacaggcttttgcattcattggatttgccggattcagctggaaaaatgcattcttttgcgcctagagcaatcaacgaagactccagattggtgaagcggctatcatcaagaaactcagctagtccaagaactcgcctagtcagatcaacataggccatcccaataacgcatctgccatcgtgaaaacttggaaatatggagacaacaactggtgtgtcctgcatttcattgtttgcaaacaaaacatcttcaaagcttccaatgtttccaggagaacctgttttcacaagtctccaattcgatccgcttccctcataaagttctacagtatgatcattacgctccaggagaagatccctagcaatcgtttcgaacatgttcctactaatgcttacgcttgaaagagcatttgaaccactcccgagctgacgtagagcagtggttgtatgataataagtctttgcaatgaaaactgaattttcaccatgagctgtataataatcctgcaaatgcatttaagaagtttccataaatcgatgacaaaacaaccaaaagtctagaccatttgagaacaatgaactcaccttgcgatcaaagaatctaacagctctcgtatcctgaagcaaagaacaatcaaaacccacataagcaaagatcgagaaattgctaaaaaatcttaagccttttttcctaattcgcttcccaatgaacaaaatgtctacaattgcttcaaaccctaattttaaagcatctactttccgactagaattggtgttatttattgcaattagaggcactgtacaagctctaacttctcccagaaatcgaaagaaaacgagaacttacatttggtagggttttgtagaacgagagaaacccttgagcttgctttgcatcttccaaaaattaaaaaaaaaatgcataacaaatatcagaccttttacaaaacccataaacccaattgggaaatcgaatacgaaaatgagaaagaaaaaaaaaactagggtttaacattacccaatttcagctccggaagcttgttctgttcctcgaaattaccctccattggaagatagagaaagctaaatccttcacctaccttctgcaactacggtgcaaatgttcttctttcgtggtttttcagtggaactggaatcgaaagcgactagaagaaatttatggtgtcgaatttggcgggaaagcggattggcggcaaccggcggcgcgtgtattaacgttctttgagaccaggcgtgcaatgtttcaatgtttggtctataaaatatcaaggcccattaattctcatattgggcttactgggctaacgacacctaccattttgagtgtgttacaaatatatatatatacttctactaaggatttcatttctttgtagtaacatgatcaacgaccaaattatttggacaatgatagttatttttcactttattatttagataatattattcctgtttataaattaaattggaaaactttggacaaagggaagtggaaggttttgtactataaagcactaaattgcatatagaggacgatgatggcctttgatgagccacaaaagtcgtatgaacttatctttatgtcatttatggttccaaatagtcaggttatattccctttttctcctttatatatttattgaattgatcccatatttatcttgaaatattcttcatgaatttggaattggatcacattataagtttttgaaaatggtgttgacagaagatattattatcacatcatagagttttaagggtccccagtttcttgtcatgatgatataccaaaaaactttatagagtacagccaacctgacaaacccatgatacacaacacaaccttatctatgtacatatatgtagtcacacacgcacacacaaatatattgatttccttatacatccatacatgtgtctttgtgtgattgtgtttgtgcaattataattgtcaaaacctattttgttatatctttttcccacttcgacattgtgtgacatcaaacttttaagaacactactaagctccaacaagtacacgtttgataaattatcaaatccatcatccaaaagtaaaccatccatcatttcaaggattagtcgactatgaatttgagtatatgtcttctgagcatgatctgattttaatattgttatctaaattttttgaattaatatactttttgccttggtacaaaaaacattccatatttattcttaggagtaaacagaatcacaacccaatatgtatagaagtactggtctctagataacttatataatgaacaagggacgtaatgagggctcgtgtcatgaacccgtaacaagaccctctcgagcctcaccagtgacattggtgacacgaagcacagcctgtgcactaagaggtgagaggtttgattggcagaagattggccaagtggctgcctctggattctcctcctcgggttcgacaggagtagttttcttatacactgtctcaagttccaggaagactgtccgtgcagcctcctgagattctgggagttggtctcaattccatattctctcatgccttcaatgccctgatgataaccatagccaaagaaaggtgatgttggtgggaacatacactggatccaaatggttgtcatgttgatgacatgacaaatccaaaacaaaagaacaagactggttttatgataacgagtgaagtttgatttaccagtcggggaacacatccggagaagcacgcagatgcttttgcgcggatccgaggactcttattcttgagacaaggtcgaagctttggcaacagcaaggcaggagaaacatgtgtagtcattgctactaatgctctttccgctgcttcacaaacaaatcgcttgtcttgggaagatttaaggaggagttgagtaagctgtaagaaaggatttcggaatttctattatagtaaacacaaatatctgctatttgaggagaattccaagagtagctgcaaaagatgatttaccaggcgatccaattgatcgaatatatggtcattatatgagctgaagatgtcttcagatgtcatacatgcggttttacttacagcacttcttgggttcttcaatgatttcacgacaaacaggatcactttctccctgtaaagtctgacagcgtgagactagaaaattctctcgacgtgtaactcaatctactttaactggtcattctcacgagcacagagaaaacgacttacagcaaatgcagcatttcttccttgtggaaaatggaaagacgacgaacggtcaagtgactggaatattaaacaaagaatttccaaaatggtattaggtaatgtccaaactccaaacagatgaatataactgcaaatttgcaaggcagcattacaaatgagaagtcacagtaaagcatagtataataccaggaaagaacaattgataccttgagaactgcatcaacttcagctacattgttcaagtctttggatttgatatactcaagttctacgataactctttctgcctcaggtttctctatctcatcgcctgtaggatgattgtgatccaaggggacagagttttgtggtggtctatcttcagcttttccattcattttgccagcacaaggattttttttacagtcaatattcctctcagagacaggaagattcttcaaatcttttaaagccttagcagccatgcgtagaagagttatctgcctgaaaaacaacaaagaagacaccaagaaaaacatcacttgtgccatcagttacaagtttagattggaaatcaacgataaaacaaacaaaaaggcagaatctgatcagaatagagagaaaaagcattggcaaaattggtgtatctgcgattacaaggcgttatatgcctgaaaagcaacagagagacaccattataagtacaaacaacatttgtgctatcagataaaactttagtacggaaatcaactacaaaataacagaatactagagacaaaattaggtaggtaatttcaagcataggtattacagagtactagaaacgagaacctttgtctgtgactgcacgaggatcttcatagatacagcaataatagcaacatgtccacatatatctacattcagtcggagggcgggcatgagacacaaactcccccacctcccactaaatcgattgtcaaagaaacgaaagattcaataacgacagatgatccggttagatcaatgtagacatatctcggcagaaacaaagcaaatgctcaaagtccaaaagagaatagaaaaaccttcaatagaaagaaatatttggccactaaactcaatccgtacatcaatgtaaaagttcaagagagaccagtaaaaaccgaagtggttattacaacaaaatcagacatagaagcagtgatatacaactatatcaagaatccacatgggggaacgaaactgaaagaaggggttcgggatggggatggggatggggatggggatggggatggggatggggatggggatggggatggggatggggatggggatggggatggggaaggcgatggcgatggcgacggcgttctcgttgtttttcttcaaaatgatcagcagccaagcagttggttttgatgatacacatgacaaccatgaagaaacagaggctaccagaaagggacatccaagaatccttcgctacacaacccagaatagcagacatcgtccctagaaatagtatgaatgtggttcggctggaatttaaatcctcggcaggagaatgaagttgaacgattgtaaccgctcctattatagacataatcaccagaaatgacacttccatcatcacatcaaagtcctcgatgctgtaggatatgcaataaatgacaaccattgtagctaggtagatcccaaaccgtccctcagctcctagccgataactcgggactggaacatcgttgcacaagcaaatgaatagcaaaccaatgtatggaatggttgcagcagacaagaagacatacctatagtcatgaacacatacacacacattatcaatacatatatataaacaaacaataaaatcaatgagactaaatcgataaactcgaaaatttccttacagtaacttgtgcaaggtgccaacgttgcgggtgtcaaaccatagaacaaagatggacccaacgagaatggtgatgacaactgtggtagcgaataagtaaaaggtgatccgagagtaattactggtcacttcagcagttacattcttccaattttgctgagctcgcgagttcatgtcttcccctgaagggctcacgagtttttccatcacgccttcgcctagttccaaatccatcactccttcggctagtttcaaatcgctaatttagttataaaaaaaaattattcgcatacagattcacataatcagttctaatctctaagaaaatagtcagtgttaaaaagtgttctgcgtctacggaatcattggactctccacaatatctccaaaagaggacaagagtaaagaacaagaaaacgaaatagcttaaaattaacgtcaaatccacattcatatacatacactaaagaaggaaatcggatcaatggagtacctaaatggaacacggcgacgggagacagtgacggtggcagagacgccgagagaacacggaaaattcagaatcagcggtcgaacacggcgacgggagacggtgacggtggcagagacgacgagagaacacggaaaattcagaatcagcggtggattaaggcgaattcgacgacgagatccagatcggcgacggagataagactacggagagtcggcactcggcaacacagatcggtgaaagaaaaaggcgaagaagagaagcggaacttttataacctaaggacggcacgaattcttattctttcgatcttggaacaaaaggtagttatggaatgcttgaatgacgataatacccttcgtttagataattatctttgtcaatcgggctaacccaatccgactgagtccgaaatccgtaaaatcgaaagatagagaaagctaaatccttcacctaccttctgcaactacggtgcaaatgttcttctttcgtggtttttcagtggaactggaatcgaaagcgactagaagaaatttatggtgtcgaatttggcgggaaagcggattggcggcaaccggcggcgcgtgtattaacgttctttgagaccaggcgtgcaatgtttcaatgtttggtctataaaatatcaaggcccattaaatctcatattgggcttactgggctaacgacacctaccattttgagtgtgttacaaatatatatatatacttctactaaggatttcatttctttgtagtaacatgatcaacgaccaaattatttggacaatgatagttatttttcactttattatttagataatattattcctgtttataaattaaattggaaaactttggacaaagggaagtggaaggttttgtactataaagcactaaattgcatatagaggacgatgatggcctttgatgagccacaaaagtcgtatgaacttatctttatgtcatttatggttccaaatagtcaggttatattccctttttctcctttatatatttattgaattgatcccatatttatcttgaaatattcttcatgaatttggaattggatcacattataagtttttgaaaatggtgttgacagaagatattattatcacatcatagagttttaagggtccccagtttcttgtcatgatgatataccaaaaaactttatagagtacagccaacctaacaaacccatgatacacaacacaaccttatctatgtacatatatgtagtcacacacgcacacacaaatatattgatttccctatacatccataaatgtgtctttgtgtgattgtgtttgtgcaattataattgtcaaaacctattttgttatatctttttcccaattcgacattgtgtgacatcaaacttttaagaacaatactaagctccaataagtacacgtttgataaattatcaaatccatcatccaaaagtaaaccatccatcatttcaaggattagtcgactatgaatttgagtatatgttttctgagcatgatctgattttaatattgttatctaatttttttgaattaatatactttttgccttggtacagaaaacattccatatttattcttaggagtaaacagaatcacaacccaatatgtatagaagtactggtctctagataacttatataattaaccttccattatgtcgattgttgaagtgttaaaattcgataaaaatcaaactttccgtaaaccatatcaagacatgacgtctttaggataatgcacctatatacattaaaaaaaaatggcacagaaataagatgtacgtttatatgtacaacaacctattacatcataaaccatattttagtggtgaagcatggaacaacaaacttagtaacttggacattatttgagtgttgtcgaagactcgaagccatttataaaggttttaaatgattaaaaacaaaaaaaaacgaaaaaaaaagagcatcaagatgttacatcgtcagggaaaagaacatcaatttctaagtaaactcgtaaaattaaggttgaaatgcagacattgataatgtaggattggaaatatattttttcaaaaaataagcaatttataatcatttcatatatatatgagaagctgagcaataagaaaaaaagacgtgagaaagaccattaaaataatcaactggataaaactattcagttattagatgactgatatgaataataagttcttcgtaaatgtggagttctaatagtagaaattaagtgaagtatatgactttgttgcccaaaaaaatgaaaaaaaaaactagtatatatatatgacttttatcctcttacatttcgcaccatatagtggcttcaagtattttcctttttctgaagtttttcccaccaagctaaaacatcattttctgaagttacaatattgaataaggtataatttgaagacaacaacggtcgtatagctacttacacttggatatatgcatatatgtttctaataaaacttaggcattctgtgttttcaattgctattatatttatatgatcaatatgaagatgtgttcatttacttttatatatataaacaataatatgaaaatgtggtgttgtcaaatctccttaacttaagcgtgaaagtagaaacataggctatctctatccctaaacctcaaagaagctctacatcaacttgttactcatcccattaagcttgtcgcgataatttgttcgattcgctaagaaataatatttgatatagaaccatttctcttcattcctgtaaacgaaagtgagataaccaacttaaaatttatgatgtattttacaaaaggcgattgtaattgaattattaataaaatcgtttgaaccgagatagtatgtttagactaacgttttaataaacgtttcaagctgtttaaaaaaaaaattagaggatgattttcataattctatttcagacttattagttgaaattttgtgactaattgaaaaaaaaaattggtgacgctttattcagaaattttgtggcgacatttgaatttctagtatacctacacaaatttgtaaagtagcaatcttttcttttcttagagaattattatttaatttcgttgtcgtccaaacaagaaaattctagattcgttttttgtgatctcgagaattttaggaaaaaaaaacttttttttttgggggcaaatgaaaaaaaataactaaaatgaagaatatgaaaaggaagaaaagtcaatattgagtatgcctgtgaaattaaaaaagtggagacaaacacataattttccagacacatttccatgaaaggaaattgcgcgaatgaatggtaatctaaaagagcattgactctctttgctatatatagaaaatgattcattatcaacctaagaaccacacaaataccaaaagaaaaaaaaagttgacaacccattatacaaagtaaaaataaattttgtactttgagaatgatgataatgagtgactgagatttgtaaccaacaactttggcaatagatagataatataacacataatgaaagcactcagggcatcaatgccaaacttttgtaaggaaaaaaaaaaagattgaaagactaaccaaagattgaaacttaaattttgattctcactaataaacaacttaaaattgttattaaaagaaacaaactcaaaattggtgatatgatatatgttgttgtcttcttcatgggttattagaaagaagaactgaaagcaaccttagaagaagccagcgagtccaaccattatagtcatgtggtcctcctgataattgcaggcctagagatagagagagagggaagagagataaagaagaaagagcatgggatgtggtggataattaggcggagaaggcggcatgtataaatggaaagagtggataacaatggatgaccaaaataggagtttttatttacaatgatagtgtttcatctttgcacgtaactcctaagtttgtactttacctacgtgcatgtatatagatgtggattagtgacttttatctcttgttagttatttctaaaaacatgcatcacatcacttaacacagctgacaaggtcaacataactacctaattaataaactcttaacgaccgttaaccgtattaacttctaacttctaatattgcttttaagcgaagagatatttctaaaatatgtttttttcacaaaaatacaagggaaaataatgatacaaaagcttacaagataagcacgagagagaaaagaggttctctttttagcgaaagcgacttctaagttataacataagtatgagagagtgtgtgtgtgagagagagagtcaaaagaaaataaaagattggtcggtcatgcaatactgaacagagaggcaaagcttttttcttttcttcctaaaattattgcagccttcttttcttagggcttcacacagccacgtgcattcctccaatttgaaaatgaaactttgtattttaactctcctatagcaaaaagattattttctccatatcatgaaaatcaatgtcttagagctaggaagaaggattttgtgatatgagaccaaaaattccaatccgagttttgatcttgttttcaagttttgtatcacaaatatgaaaacaaagagatgttttttgtttctttacataaaaaaaaagaagagaaattcttttttttttttttggtaaaagaagagaagagaaattcgtccaatgcgttcgtcagttttgctatttgaactcaattggattccaataagtctacgtaagaaaaaggagctacccttttttactaataatttacagaagaggatgttgcataacaatcaatttagaacaatcatctatgtctatacttaattttgagaaacatccatgatggatataaattgttataacagtgtttaaatttatttgatattctcaataatatatatatatatatatatattataatataagaattcatattttatactttaaaatacaattaataatattttacaacaataaataaatgtatttaaacctaaaagttggcacaagaaaatggaattaaaaaatattactgatctgtatggttttcttgagggatcgccatgattgatgattcagtttttacaacccattcagttcgatagattatctaatataagatttttttgtcaaatattttttttgatctagtataagttttttatttatgaaacaacaaataaaagatttggacttaagaatggatagaagttttggaataacaatatttgtgtcctatgtataaaaattattagatagagatacaaaaattgttatctgaacaaatgcaatatatcaatagttagtgtacatatgaagtcataagaattacaccaaaatactctttaaaaatatgaaaaagttgtttatagtgttttgaaaaataccaccaaacaaaactttataattttatttgaccttagttctttcttacggtgaaatgcaaatcaatattttatatatattttaattatatattccttgttcctatttcctttagacataatctaaaatcttctaacttttcttctattaatccttttccaaataaaggcataactaataataaaatttatccttaattttatctcatatttatttctattcaactttttattttgatcttcttaatatgcaaacatacatttatatgtctatttttgggtgaaattaaatctcattaccttttatttctttcatttagttataccttgatctttatctactaaaaatattaaaaaatataatcaatgtggaaaaatctatctaactaaattttaaatgtcatttcaataatttaaataaagatctgtttatttaaagtgaaatgttaatgtaattggtaaatatatgttctgtcaagaaactgtaatattaattattctagctaaatcctaaagttataacatatattctatagtaaatacagtgaaatattttatattgaattaactatttttaggcatcttttagtgcatgctattaattttaaagatatatacaatctttgattagttgaaatatagctgtcaacaatttaatatctatcaaataattatactgagttcttatctacatattagtaatgaactatctcaaagaaatataagaacataaacaaacacaaggtcctaattatagaaaaaaatcttgataatcaaataaaacgaacatctattatcacattttcacaaaaaacaaaaacgaatatatttttatcatgccgaagctaggaattaagaaaaatatataaacaaaataaatgctttttcaaaggcttatatgttgttccttcccccataatgatctctttgcctctctctccatatagctctccctctctctctctttttctctctctttctctccattctagttcatagcacatagactcatttaagtacgtcgcctgtgttgtctttctcaaccattagtcctttgcttcgataaaggtattctctctctacacatttagacacacacatagattctctagaacaaagacatattgtactatctgactaatcactattactgctctttttttttcttgattttgcaggctaaggaaaaaaagaaatctctctttctaattttcttgttttcattttggttgagacttgagatcaatgtcttcgtcattggaacagtaacctttctctttgattcaaactttctttcattttcttctcttttttcttgtgtgtctgaagaagattatagtacaagtgtcattctcaaaattttgtcttagggttttttaattttgttacttcaaaaacccctaaaaaggcatgaacaacaacattttcagtactactaccaccatcaatgacgactacatgttattcccttataatgaccattattcctcacaaccattgctcccttttagcccttcttcttccattaacgacatcttgattcactccacctctaacacatcaaacaatcatcttgaccatcatcatcaattccaacaaccttctcctttttctcacttcgaatttgccccggactgcgccctcctcacctctttccacccagaaaacaatggccatgatgataaccaaaccatcccaaacgacaatcatcatccatcacttcactttcccttgaacaacaccattgtagaacaacccactgagccctcggaaactataaaccttatagaagattcccagagaatctcaacttctcaagacccaaaaatgaaaaaagccaagaaacccagcagaacggacaggcacagcaagatcaaaacggccaaagggacacgagatcgtaggatgagactctcgctagatgtcgccaaagagttgtttggcttacaagacatgcttggatttgacaaagccagcaaaaccgttgaatggttgcttacacaagcaaaacctgagatcataaagatcgcgacaaccctttctcaccatggctgcttcagcagcggcgatgagtctcatatccgtaagtatccattcttttctagttttaagtctattcaagttttcaacttctatgaatttttttatatcataatctgaaaattgtaaatttcctaattaattaaggaccggtgttaggatccatggacacatcttctgatctatgtgaacttgcatccatgtggacggtcgacgatagaggcagcaatactaacacgaccggtacgaccttaaccgttgcctttctgatttacaattatatatagagtactttctatcaaaatgttacaaaagataaattatcttatacattagaaacaagaggaaacaaggtcgatgggagatcgatgagagggaagagaaagaggccagaaccgcgaacgcccattttaaagaagttgtccaaggaggagagagcgaaagctagagaaagagcaaagggtagaacaatggagaaaatgatgatgaagatgaaaggaagatcacaattagtgaaagttgtggaagaagacgctcatgatcatggtgagataataaagaataataatagaagccaagtgaatcggagttcttttgagatgacacactgcgaagacaagatcgaagaactttgcaagaacgatcgttttgcagtttgcaacgaatttatcatgaataagaaagatcacatttcaaatgaatcttatgacttagtcaactacaaaccgaactcatcattcccagtgattaaccaccatcgcagccaaggagcagctaattccattgaggtaccttatttatatctacgagtcacatttataatttttatgagtttttttccaatggttttatctaaagctatacacagttaattcaagttttagaggtagggtatatcaaattcaatgacactaatgcaccaccatcgattaattaatgctatatatagtttaattagaagttagtttttgtgttttgtggattggtacttggttattactatctagttccacatcagcgattcaaaggcgccggttttttttaactgacttggttatactattatggtttttattgttcaaattttcatcgatttttttttttttggggctatgtaccttgcagcagcatcagtttacggatcttcattactccttcggcgcgaaaccaagagacctcatgcacaactatcaaaacatgtattgaaactgatttcatttaacattaatatctcaaattaatgatatatagtttggtgagagagatatgttaatccatcttatgtttttttttcttaacatcgtaattaatcatgtttatatgaaggctttttcgtcattttagtgtcaaatattaaacctatgtgaagaaattaatgcaatttgtataatattttgttttcatagttcgagtggatttttaactgatatgtatcctttaaacgttgtttgttaatattatctctgtgttgttaagtttgtctatcgtttgcttttaggaatacaacaaatgacaaaaacaaaaggaaacgtgacaaactgatgacaaaattatataagttaagattcatgattcaatacattctcaatctatattccttctgagacctggacgtcagttctagtaatcaggcaattcaaaacctttcaagcctattaagttaaatgcgatcgacaaacgtatcgggtatcactaggcttgtgatctatgtataagtgggttaacgtacattgtatacagacaagttcatatatgcgtaatttgtgtaatatattacgtggaaactttatcattttcaaatatattttttataactgatgtgaagctatttgctttttcccttaaccaatgataagttctgctctaataaatcgaaatgtcttgggagtagtaagttacttctctattgtgataagtttgagttacttaatttggagagtttggtttactcagtttggtatatcatgttccctaactagagtttccatgataaatattaattattataaacaaattaaaattatatacagtacttctagatagatcctacaaggggttaaaagttatgaaacctgatgatatgttgcactaattaagctgttggtctttgtagtttgtattccacatttatgctataataggttgctatcaaaccttgggtggtcgttgttgttgtagaccggcgtgggaaaatgtcaaatcatccaaaattacacaactgtgagcttcagaccacacatgccggtatattctacccttgaaatatacataaatatatgtgtacatatatatatatatatatatatatatattatgttaaagttaatttgcataaagagaaatttaaaaaggttttgtgaatataagacattaattttttttaagcattaagccattttccaattaaaataatagttgtgtctttatgatttttatgaaaaaaacttttttctatgataaatttacaaaatgcatattttcacagttctcttatgaaacctcttttttgtgaaaatctcattatgtttgttttcctatattagctaccttggttcccaactttttctttggtctatgatttggcgtttgctcctaagaacgcacacatgcgtccatatcactagaaaaaaaaaaactagaaaaaaaaaactactaaaatatctagtaaaattcatctacagcctcataaagtttcgttatttatcagaattaaaattttatataggcatctgatactaagacattgactgtaatatatatatatactaatatcagatgtggaaacttgatacataagagctattatggaacttttttggttatcaataaaaaaattgagcctctatggatgacataattattaaagtaactaaactagaaattataatttgaattacaatgctttataaaagttgagtcaagatgtttgaattgtgtcttagttaatttgcaaacacacatgatgatatacatggatccattaatattacatcttagccccaaacataaaagacaatgtggggaggattaatttagtgttttgtttttaatgtgaagtttgatttgattgtactagttcctagacaattaattaagtactggaggaagagattatagcgcagtaagggattaaagaagtcccaaacacgaagtgtccaaatattaggaaggaatatatatggaaaatgtaaaaactacttcaatgacattgagatcattgaaatgacaaaagtaagttaaaagaataaagagacatttgagaaagagaaaaatgaacaagtacacaaagaaaaagaaaggaaacaatatttctataataaaaattatcaacaacttcataacataacttttttgatacaccggtctaatatgtttggattttatcaataagtcgacaaaaacgtatgcttatgtttctatgaagtcatgtgcaaggcaatcccaaacatgaaaacacaatgagaatccaattgtctttgactcgatcaggtcgaattcttttttgaaacgattaattttatcaacgatatgagctaactttgaatatatctagtgacttggtatgatggtttccaaataagcaaagcactagtaaggtagaaaatgtgattgaactataaagagagtgacagtcagaggattcctaaaccacggttattctcgcagaaaaagaaaaacaaaatcaactatgtgacaacttagaagaacaacagaaagttaaagtagatagataaagaggccacatgcctacatttgtcaaggtttcaaagattaaacatattttagaatttaaaataaaataaataataataataatctgcggtgataactaaaagaagaagaaaatgccaaaatcaaatgaaaacccaaattagttaaataatgtctcttttaatttagagtacagaaaacaaaccagaaaagggacaaactggaagaacttaaaaggtgactaattttcttatcgagaaaaaaaaaaagagaagaagaagaaacaaagcaagaaccgaacacagatctgcaagtttcttttcctcaattttaaagaagtttactaatctgcaaaaacggtaatcaaacccgaacaaagttagaagaaagtaaactaaaggagatctgttaccagaggaaaaaaaaaaaaccctaaatctgggttagttatgagaaacaagagctttgactgttaattattacaaaaaccaaaagaatccgaccacaaatgtacttgttagatagagatgcagcagatccagacatagatatatagagaattaatgagacccaaaaacagccaaattaattacccgaccttgcctttttttcaaaccctatatatttaaattagatgccctagagagagatagtggctttgaaagacagataccaaccctagaagaaataggagtagagagaactgtaggcgtccggtatcaatggcgcattcttagggtttttatctttttgttgttgtttggttgaaccaaatggagaagcggtgaaagctattcatacttagaggaagctggctcattaggctaaccgccagttttcaattatatagaagtttatgatttgtaaacttaatttcttcttattcacaatgactaatagcatgattagcatatatgtatatagtttaagatcttgttttcttcattattctctctctggacgcaatttttgacttttgaaacaaatgtgatttatttgttcattgattaaattaaatttagatatatcattagtttattgataatatgagtcatatatatattggctacggtcagaccggttgatccaatgacccgaagacttccggttcaccttccggtccagttttaaaacccgaccacataaacgctctttctcaattagcttcatcttctgctcttcgcctcttcgtcatcaaaactctctctcagtccgtcgatttgacaatgattgacttgacacaagttcgttttatcatgggagttatcggtacgatttccttctcttaaattgtaccatttcataccgtatacattaatttaatctagttgtaaacagtgatatgaatccgaacaagcatctattatatatggatcttgactctaatggcggatctctttatgcaggaagtgtttttactactggtctcatggctgttcaagtgtaagtatcccttttccttttcctctttctcttttttttgtttttcttttcatagtgtcgttatatatgtgttttagtatattctcattatattaacataatccgtttaacaatctgtttagtatatttatgagtctgttgatcaataacgtacacatagaggcctcggttggtaatgataaagccatattttcttctagaaatgttatgggttttctatggacttccccttgttaataggatagtagtatcttcgttttaacaactggtgccttcggtttgggaattggagctatctttttaaccgtcttcttcatctactgtggccacaagaaaacctccgtgtatgtttcttcagtctttactattagctagctcataattattaatgatgtgtatgtgcagaggtacattgtgtcacgtcttttggttgagatcactgggtgtactagtgatggttctcattacgcttttcgcaatcaaaagttcatttgctaaaacaaacattcgttggtgatattttgcaatatctccttgcttaaatatcccttagcttctgtcctcgtaagtcccctatctctcattgatggatggtcaaaacatttattcattacgagtaattgatttaattaaattattgcctgaaaaaacagaaaacggcggagatggagatggagattgcggagtactgttaagtatatacagttttggttaacgttcgttctcaacatggttttggacattcttgtaagtattttcttttaacacaaaaaactttcatgttttttagttaaataatagatttgccaacgttttgttttttgttttgtttatggcgtatataggtaaaaacaatgttccaagaacattggtgtctggttctcagctaaatagtctatgcctattgtctattaaaaatctactgcaaaggtgaaaacggactagagactcgggaacatcataatgatattttctcatatatacagaattttacttttcttttcctcgcttgagtttgaaagatgaggccatgattcgatgattagtgtcttcgactttgagtcatactgggaattagtaggacgaccacttatcgccccattttattcttctacgtcttctctaaggtatatatatatcccacaactttctcagatttataaaaatgttacatatgtatattcaaaatctaaaattatatatatatacaaaattacaaggcaaaatcaagtcctatatgatgaaattgattatccataagtgcgaaacaaattaagcagatgtaatatcaaattaacggatcacttttacttttgctccttgattcttgtcacttagatacaaacatactatagtgagcatcatataatatgattatatacattttcatatcttaataggcctatagtaggtttctgttacgaagcccatttatatctacaaaatgaaataatggtacatctacatcatagtgggccgaaagggtagacataggcctgataagattgaaataaataaaacaatagaaaaaccagtattttgtcccttgggaaagaaacgatttttttcttagatgggagtttgagcctagtgaagagccgaaattgtgactctcgaccaaagaggtagatcggttccagaggcataacatcatacgtgacttctcacattaatatatctactcatgcgcagatttttatctagtttgtacttgcgttcacaacttcacatgcatcctagatttatatagtatcgtaatagaaaaaaatgaaattaattttagaaaaacaattcttaataaagtctttgcttctctattttaaattatacatattatatttcaacgtacacttgctgattacatggataatgatttatattatatgtgattgtgattctctctactcatctataataagtgtatcatcatttaaaaatgttagaatcgcctctccctctcaatgttttttattactataaaacaactcgaaaaaagagaaaaacaaagttcaaaatttataattaaaaggaacagcgaatctatgaatcaaaattcttttgtgcgacacagtgatccaaacgtgcatgcactacggtcaacttttcttggaattgcgtagtgaagaacgtatgtgctaattttggattagttacgctcttacgtatttaaatggaaaaaatcttattaatagtataatgtaaatttgttataaaatggaaaaaaacacccaagtaaaccatgcgcaaaaatgggatagaatattagctttgaattatatatatgttcgttgtaacttgtaagtaaattttatttaattatagggggaggctacctaacacttctggatatcgtgcttcctaactccccttcaataccgagtcttcttgctaattatttgtaccaaactgtttgaatttaaggtatgattatttaaaattcatctgccaccaaatttgtttgaaaaatttataaactaatagtactactctatcgcatttaatagctcttggtaatatgatagggctacgaattgtaatcatacattggtcttaaaaacaaataaataaatgaaacttgattagttggttaataaaagaatatgggtcgtgccggtcaactacatttagcgtttctcaatgttctaagaaatgacccttcacgcttaattgaaatggctaacgtaactgttaattagtttttttccatatgtgaatgatagttctgtttagactaaatgagattgaattgattattaattacatcgaattaaaagtgttcatatatcatatatgatacctcgtactcgtagtaacaaaattgcagtattgccttagtaattagacaaacaataaaacaatataatcacactatatatgtaggagtgaaaccgtaacatcacttcattcaaaactattcgcaacaaatatgtataaacggcgtcgacgatcgagagagagaccgagtcagattttgttaagcaaacaaaaacaaaccaaaatagaaaactcagtgggtccctacctataccggtcaccgtcgcgttgtgaatttggttgatgatgttctcagtgacaaagatcaagttgatgagaactgagaagccaaataggtccactatcactaacccgacccaaccaaagctaacccgacccatttcatcttattcttcaacgttagacttagacacgtgtttcgcaacacctagagaataatgtaagtcgtgatcatgaaacagcactttgcaattgtgtgactaggataatgtacatccgaaacacatttagattatgcacttaacaaatatacattaggaccgaactgaatagagctcgtaatctttcttttccaaaaacaaataaaagttctttatttggccgatccatacaagtaaatttctgcatgtgtttgcgttttttccccttactcgctaggtatttggctgttaattgcatataaactccagacaaataaagaccgcatctaaacttaaattaagtcccgcataattacctaacaaagtcaaattgggtttggctgaatcagcctctctttttgttaaggcagaatcagcctcttacaatatctactcctaatttaagcagccttatttgtggtacgaatttctatgatattgttgataatttataaatgctgacgcatgttttgtgattttgtgataaacataaggaaataaattattgcatatcgaccaacacctaaatttgagtgggtttttcaccacacttgattgcgttgttgatatttgccccaccactagtgcttgatacacgaatcgacgaaccaaaatagttaaagataaagaaaacttaaactttccaagcgttgcacaaaaaaaaaaaaaaaaactttccaagcatacaaaaatagtttaaaaaaatatattttattctaacaaaataaaaatttacaaatagataagaaaaaaatccaaataatataaaataaaaatgataaggaagagctggcgaattctgttacagcaataaaaatatttctaatataactaatgtattaaacgaataacatttatcaagaaatgaattcaaacacgtaagagtattatcaagagatcgttgatgcatgtctctcgcatgctcgttaggtttcatacacaaaacataaacaaataaatagaatgtagtcatgtacttattcattgatatcatattatataacacaggatcattacagaaaatcaagaaaatgtcaaacacaatataagatgtcaacgaaaaggctaccgagtcagccggtaacctaacactcttttaatattaagggacctacattaacgcgtgcattaatataaatatacgtaaaccaaccatttcagacaagagagagaatcgcattaacaaaaaaacaaacgaatcttttgagtttaaaaccctttttcacttaccggagaaatggagagatcgacgccggaacatgtctcctccgcacacaagcgcataagcgtgagcttcctcgtgtctctcatggtactttgtgctagacacgcaagcagagtttccaagaagcttaaacccaagaagactcggaagcaaactcatcttgaagactatctcgaaagccctaagtctaacggaaacggtagcgaagacggtagaggaggaggaaggtttggatggagtccggcaaggactttttctcctatgagggtgcgtcctaaggagctctacacgaccttgagcaacaaggcgatgactatggttggccggaaaaacaaagcttacgacggtggtccgacgaagaagacggcggtggagatggtgatggaggaggatgaggaagagtacggcgtttggcagagggagattttgatgggaggaaaatgtgagccgttggattactcaggcgtgatctactacgattgtagtggacatcagctaaaacaagtgcctccaaggtctccacgtgccagtttggttccggagcgcccgactcgttcttatgtcgggtcattgttaaacccgacgggaaaggaaatttaaattttagtttgagaatttgaaattttagtatgagtatttgattgttgtttgaggtgtcatcacgtaagtggtaaattctctaggagctttgttggtcccttgtcattagtagatgcatgacatgtttttatgcatattgttgtgtagtttatgtatttaagacgtttggcaattttaaaactttagtagtttaaaaaaaatccgatataataaaggctaaggtttccaatatcaaccgttcatatataatcattcaaatgtatcattaaaaaaagaagcgattacatgtggttgaactatatttttctatatatatacgaaatataattagaagttgaatccactatgcggtaaaaaggctccaatgatggcctttaattagccgtgttaatgatatcaaacgccaaaaataatcgctttcagaaatacttagaccaaatcaacggttgacgttcagccaaactttggtgttgcttgaagttttttttttgtctgcaaatcaaaacacaaagaagtcaacaaaaaaaaagtaggcgcgtgaagaagattccaactgtctttagattctcaatgatacatgcttaatttttgtttttatccctcatgtcacgttcgagcatgtaaccattgtatgcctcttctaaatcttcaatgactggttcttccaatgtaatagtagattactagctagtagctacaaagggtaaagtaggttctgctacaataataaattatctcagtgcatgcatcaacccacagtgaatcattaatttagctactataaacggtaaacattcgaattaagattttcttaatagtttggaatctttgcaacctgtcaaaccaattaccagtggacataattttttaatcttaccaacattttacaatcctttcctttttcactaataaacatgtttgcatccgacaccgtattctctctttagatttcagtccagtgttaattaatacaaaaatagacaattctcgtgttcataaaagtataaaacgtataaagagggttattaagtcattggttttaactgtaaaaggttcttattggattttttttttccaaactttgaacatgactatttataataaggaattttcattattagaaaaagaacacaaaaaggatgtaacatgctcttccatatcgtctgaaataagcaatgaagatagaaaaaaatggtagttatttactctcattgtttcttcgaattcaaacacaacggaagacatttgattataatataagtatctctccaaaaatgtatagaaaaaaaacttaaaaacaaaatgaaatattacatttcaagcgacggacacaaagcttacattacacataactagatagatattcttcttcatcttataaagtataaacggaaacaaaataagaaaatgtaatattaccatgaaccgtgttcctcctccataaatcgaaccgtgatcggttaatactaccctgaaccagactataccaaccggttcaggtcaagcaccaggggccgcatctttagccctgccatggaagtaaccaccgtattctctagcgtaatctttgacgtgagatgccgtgtcatagatcctactacgtgcataatccatctgattcgatccaaccgggtgcattccccggaaatagcggtacgtccacgacactaaagccaccgttccgacaagaaatccggagaccgttaagaacccgccaacgacgacaaaaacgggaatccatatcggactcgagatgatgatcaatggaagaaagacaatgaagccgagcacggcagcggtgacgcttacaccaaggaggaagaggaggatgccagtggagataaagagagcgaggaaaccaaagagctgcgaggatgttggtgaatgggatcggagctgatggaaaaacgacgagatggggctgttgctaacggtggtggtggcggtgctaccataattgggccaatattgggcctcgccgctagagaacctttccgccattgtagagagcgattgttgttttgtgtgtgtgtgtgacagagaacagaatgaggaagggtaaaacaaatggaggacagattcagctttgaggtggcattcatgcaatgtttgtaaacacgtggagattggtcttggttttcactttgtctaaaatcgagattttggtttagattcggtttagtctaaatcgtattgattgggtttggtttgggtttatttgccgaaaaccatggaaaagggccaatgccaattgaagaacactaaaccaaaccttcaagttacaagaagagacaacagaagcgaaactagaaatactacaatagcaaattgtgtacctttatgacaacaattttttgtatgttaaaaatcagtagtagccaacgcctctaagctcagcagaactcggttgctgcatatcaccggcttttcccaaaaacacaactcggcctgtaaggagagaaaacagagatcaatatttaattgtttcccaatgaaatatgtaagaaatggagttttaggggttgagccattagtaccgtttctacgaattgctacttctcttatacgtcgaaccaaaccagtgacaggatcagtgaatatcttcgtctccagattaccctctaagtagataacagtactgttgaatgaacacgaaacaagttgttatgacacatacacaaaagcaagctaccattttgaatctagcaagcaagattcacctaaagtttcatcctttttcaccgattcttgatcgatatcagacatgatacatacatttgttccttattctatcatcacataaccttacaagctaaatatgatctcagaagagaactaacccgggttcaacattcttcaacacaagatctgccaagcgttcagggtaaacagagacacggtgccactgcaccgcagaccggctcgcatactctctcggatcttcgttaataagcggtctccggttgttcctgatcccaccagttcctacagagaagagagtgacagttctaccactcttaagcttcttctgcagaggaagctgacccacttgccccaccaatattgcctgtattaaaccagaaattagtctagaacacactaattattaacctatccagaacgagaatctaatgatgttcacaaaatgactcaacaaagatcatacaaaaggcaaaattgcaacgatcgatttaagaaaaacaacaaaaacagagtatgtatcaattggaattagaatctaagtttgataccttgaaaatgccagagtcaaggccattttcgagtggacgctcttccataacgcgttcttctccggaaaatcgagaaactggatctgaggcctttggttcaatgggcgattctaactcgtcaaagtcggagtcttctggggaagtgatgttgttggtacagaaagacatggaagcttgagaaattctagggttcgatagaagagatcgatagagtcttctagaaagtgtagccattgaattcgccattttcgatcttcactgagattttcgaatcgaatcgtcaaatgttggattctgggtttaacgtcataaaccctaaagggctaaagagcggagaaagtgattagaatattttggaataaagtgcctcaattatttcaaatctaatactttttaccaaaactctcttaaatgacaatttcaacccacatgctgaaatggtcaataagaagaagaaatttgcttttgtcgtcaccaaaaatacaactcatagtcctatgtatccgttaataagcatttaacaattcttttggaatacacatcgtctacataaattttgtaattcaaaataacaagcaaaaatatcccacaattctgatattcctttacaacttcaagtcatgttgttttcgacaaaatatctttttgattcaagaaattaaaataccaagtcaaagagatatccattaatatccctcaagaagtggtcaactctaacaaatctccaagtctcactctttttaaactcaaaacctcacaagtcacaagtcattacgaacactaaaaaaaaaacaatctctgtaactttggttagagcttccttcatatcaatccaaaaaaacaacaaatggattcatcaaagaagatcattatcgttatgtttcttgtaacattttacatgttttcatgtgtttcaagcactgaatttgaagttggaggagaaaatggttggatcgtaccaaaatctaagactcttggagatgcgtttaaccaatgggcgtcagataaccggtttaaagttggtgacactctccgtaagtaattaagtatattgaacacttttgtatgaagtttaaacgtttcatcttgtaagataataagatatattaactcttttgtgcggtttttggtgaaggtttcaagtacacgaaagactcagtgttagtggtgtcagaagaagagtacaagaaatgcaaagcgaccaaaccacaactctactcaaacaacgaagacactgttttcaaactagaccgacccggtttgttttacttcatcagcggtgtctctggccactgcgaaaagggtcagaagatgatcgtaaaagttatggagacggagtcttctacagagtctcctcctccatcctcttcttcttcttcttcgtcatcatcatctcttccggcgtcaactcccaaggccaagaagagcaatgccttcaaaaccgcagtccagttcagtagttccggttttgttgtctctgctgttctgattgtttcagtttttggtttggtttagttccagcggttttagctgctgaagatcttaggccggtttagcgttttctttttctttgtttcgattactgaatttggtttccggttagaccggtttagattcaatgaatatgttttcacttttcatgtagttccgataatcacttaataaagctctttatggtttctttatgttttcttattccatttccatgtatcagtttttattataagcaaacgatatcaacaattcttaaaaagttataacccatagaactgaaatattaatagtagccaaggaacatttcatttaaatcaaatgcactgtttactctttaaacaaaacttggtggtggtaattagtcaaaactacggagcaaaatagtaattttgtaaacaaatgacactttatgcctcctttgtaggtgtggacttgccatagggactgtaaggactgaagccattgcgaccttgctgctttctcgccttcctcaccttcccagctccactttctatgttcagattcactttaggcggcgaagagaagcagaacgattcagcaacagcctgtgatactcaacgtcaaaacacgagatattagctattatgaaaacaaaaatctttggaagaatatttgttttttaagtttcttttaccaggaggtcaagtcggtgaacattaaagatgtctttcaaagagtgtgaattgtatgctgagagataagccctgtacgcatctttggctaacttgttcagattgtagtccttggcaacacatttctcctgtgagacagaacaagaaacgttgttattacaaatggaaagttattaaacccacaacattactgaatcagaagtcttaccagcgcagattgaacattactaagcctcttctcattgaactcaagctctttaacaggtactttcgcagcctgagggttaaattacaaattaaaactcaagttggttaacccacaataaaatttcaataaccattcttaccttcaggtagcgaataaactgaagttcttcaggaatcaagacaagtaatgcctttccctttgctccttctccacgggctgttcgaccaaccctatggatatattcctgaaataacagcaccaaagaacaatctaagatacacatacagaggcaaagggatatgcaaaaccaaatatgaggaagtgtttgtcttaccgttggcttgtctggtggatcatactgtataatccagtcctacagataataaaaatcgccagaaatatgatttccataaaaccattggtaagtaaatgcgtacaaaaccaatgcaagaacatagatgtggagacgtaccacggaaggaatatcgagaccacgagcagcaacatcagtacataacaagatacctttctttgctttcatgaagtcgaaaaaggttttagttcttctgttctgatccatgcctccatgaatatcagagacatccacgtcgcttattttcatgatttccgtatggaattgtaccgacttgcaagtcgagaaaaataccataatctttttatttaggttctttttcaaaaaggaaattagaaggataagtctttgtttgctcggaacaacacaatagccttgctccaatccttcatttgtcacctaacagttttggaaacttgataagaaaactctccatgctcccttaatatccattatcagagtatttaattcataccttgcgtctgccatcatcgacatccacatgaacaggtgatgtcaatgacacccgagcaagatctttaacctgtaagattagacaatgcatcataagaaacaaaagatactaataatgaccatacaacagccaacagaaaaataccttagaggtctgggtggcagagaataacgcagtttgcctagtctgcagaaacatggtaagaacttcaatcagcgcaaaagccaaatacacagtaatgccagaaattttggcaaataagttgtgttgacagttgaacaaacaaaattcctacgaaactactttggtagttgtttcggatgaggagaatatcaacaccaaagggcattcacatgatattggcatgtttctataaaagagataaaaatgaagtctctgatactggtgagccaaaatgaattcatctagttttcccatatcttttttggttagaccttaatttagacccaaaaagatgaaattacctttggtaaaatctttagaatcttattcatgtcttcctcaaaattctcttccagtatcctatcagcttcatcgatcacaaggcactgcaatttgtagggaatacatatggcaataaaaatttattagagtcatctatagcataaagctgtgtatttacatttcaactattagtattgctacagcccaagctacaaacctaaacaaaccacggaatatgtgtggatcacatcggcagtattccatttgtaagtctaacattgatgcaacagaaataatatagcataagctgttgtcaacagttcaaatatttatctatgggctcctttacataatattgtttgtttactggaaattatggccatgtggctcaacagtaaagctttttgcatttacatcacacaaagaagactagacaacacgccaaatgtaacaatggaaaggacagtaccttcaagtgtttataaatgaaagcctttgtattctgaagatggtcaagaagacgaccaggagttgctatcaccaagtttgaaccactggcaatgcgttgtgcttccgaccttctgttattgccaccaataaccatgctgactgtctgtgaatgatgcttgagtaactcctccgccacatttttagtctaaaatatcaaaatagtaaagtgaaaaccagaatgggaggccgcaataacatacaacgatgctcatactttacaaacacaaagcaatatcaatgattcagctagaagaaaaacgagaaccttacagatctgatctacctagcgcattacaacaattacaggacatatctactcgaaatgacagcatggttgttgctaccaagttgaaaatgccttaagttaataaaaacgaaaattacctggatagcaagttcccttgtggggcaaataacaatcacaccagtcccgttgcgaggagagaaacgctctttaaacagcaactcaacagccggaatgagaaaagcaagagttttaccagaaccagttctggcagcaccaagaacatccttcccctccaaaaggggctgaattgatccagcttgaatctgaataatagcaaaaaatgattaagagacttagaaacatactctacaacaagtcacaagaccatgtagtgagaagaaggttaaaattaacgtacttgcgtcatgtactgaaagcccatctccttgatagctatagaagtttgctcagataagtcgagggaatcaaaagtcacattagtcattatccctttcccgacaatcacaatattcttctcatcttcaccatcttccattgcttccaccttttcttcctcttcctcgattttgcctctcactttcttaaccttcttttcactcttcttctgcgtttcatcagcgttttcctctacagtgtgggttttttcttcagccttttgctgctcattcttcttcccacggcttctcttcctaaccctcttcttcagctcttcaacggatgacttgtccgattcaaccatgtttccactttcttcaaccaatcaattctgcagcaatattaatgaatttatgaatgaaaaaaacaacaaatttgagagtaattatacacctctaagagaagggaaacagagcaatcccaaagaaaaacagagtaattaaagctgtactcgatttcatctagggtacagagattcgaaaaggaacaaccacttgaagagaacccatagattaaaaaaacttacttttagaaacgaagccacttgaaaaggatgggagagagctcagagaatcgaagaaatttgctgtggaagaagttgagagagagagagaaacgtaagagtgataacgcggcgcggagacaaggtttagggtttaacgagcctttgaagttgtgtaattcgtaaccttttatttatttttttattttttaacatttatttcattatacacctaatttcagtaattcgtataatatcggcaattttttttatataaataagtatgtacttgtgttaaaaaaaaaatgagtatgtgattaactaaaatgcacataatttcagttttatccgtctattatttttattttaaaaatacattagtcaattcttcttttggcttacaattcacaaactactcccaaaatcaagatggttaacaattcggttgtgaagcctcagctttttcttagtgtattttctagaaagaaaaaaaattgttttataaagatataatttttaggttttcaatgtatttttttcaataaataataacaagatattgttattttcaagaaatattgattgaaaattttatatttattgaattactattgggttagaattatggaaattgtttaatgcaaaatagtatatttataattaaacattaataaaattcttaacgtgtgaaaactctaaaaaatatttttttttagaaactgagaattgtcttagccagattcataacacgtgatctgtctagaaaatgttactcaaaaacttttggcatgggcaacagagaatgataattagagattttaaattgtctaagctttattctgagaagggctgatagcaatgccaatgaaccactaatgaagtcaaaaggatttattccaaaattttgagcagcaaagtaaagtgctcttaataagttttaagaaaaaccaacaaaaagaatcttaagaagagtataaagcttaatgcttttctcaacagaaaacaaaagaaactaggccaaaaacgctctactactataagatagaaccaaaaacagctttcttctactcttcatcattaaagaccgtcttcgtccctgcaagaccatacaaacacacaagttttaaaacaacactaattctacaatgcacaacaacaaaaaaggggaagaggagaggagaagaagaagaaacaaacctttggatgattccattacacttggtttgctgggtcctcttccacgcgtactgaaacggccacgaggtgctcctctatctgagtgacgtccacgtggtgctctatccgagaaacgtcctccacgaggtgctctatctgagtgacggccacgaggtgctcctctagcaggtgctctgtttgaggaacggccctcatcactatctcttggtctagactcttccacatgtatgttccctcctccaatttcacttccgctcagttgcaacgcctcatcgaatccactcgtcaaatctatgtaagcaaagcccctggaagcaccagtctcacgatctgttggaacatgaacccttgtcacctctccacacttgctaaaatgacttctcaactctttcttgatctgatcatgatcacaaaagtggtttgcatcagagttttacacaaatagcttttgtaacatgttaatattggtttaagaaaagtctaggacaagaattttacttcatcttcgccaagagaagaactgaatcctctaacgtaaatcgttcgactttggcttccttctcctttgcgaccaggattgctgcatatagtccaacaaaccagatattagcctataaacaaaaacatacataatcccatcatgctcatatggcaaagtaagaaacgtacctgtttcgtggagtacccctctcgttagcaagatcaagacgaacatcgcggcctagtaacaatttaccgttcatttccaatgcctacattcaaaacatccaaaaatgaatccaatcatcatcgtaatttcaataccacttccatgataccaaaaaaacccaatatgaacttaccttctgagcttcttctggagaagcaaattcaatatgcccatatcccttaaaactcccatcatcaaatgaagaaagtctaacatcgacaacttcaccagcttctttgaagaaattctctctgtattttgggttataaatatcataccaccaacattttataggaagaaccagaaaaatgttatgaaaaaatgtcattatacttacatgtcagatctcgcaatttgataggaaagatttccagcaaatagcgtctttgatcctccctgagtctgattagtaggtgtcttcggctgtaatatataaacacataacatttaaacgttataaccacataaaaacgttattacataaaacgtgttaaccaaataataatcataactaaaggaataaaattcttgacaaaattttactgtatggagtttttacctgctttgcattagatttctgctctgcatccaccatttcaacatcagaatcctggtttcattaaaaggttagaacatatattatttataaacactctatagagaaatctgagaagtaacattattggtacctttttctttggtgtcactttctcatctttactctcctccttatcagattcatcactagattcatcactagagctttcttgtttagaagtttttgatgaaactttagccttcttcgtaggaggtttttcatcatcactttcctgaaagtaggaaaataatatgaaatatttagtgtatagaatataaaactaatcacaagtcattaaaaatattcaatcttgagaaataaaacaaacctcctcatcagaatcttcctctgaggatgatgaatcttttgcagctggtttagcattcttaacaactgttggcttcttggcaggtgttggttcctgattacgtttgataaaaaacaaatctcaaagtaagtaaaatgatttactttaccattgagtgaataacatgtataacgcaattctcacatcgtccgaagaagattcctcctctgatgaactgctttctgccttggcatccttaacaactgttgttggcttcttcttcacaacgggggtttcctgataaaattttatcaaacacaaatttcagattaagcttatgaaattcctcctaagcttgaggtaacatgtaaagatgcaacatacctcatctgaagaagattcatctgagctgtctttcttaacaacgattggttctttctttgcaggggtgggttcctaacatgtttttttaaaggtaagcatatgtattatgttgtcaaattgagctaccatgtgtaacataactcttacctcgtccgaagaagatccatcgtcggatgaactgctctctgccttagccttctcaaggactgctgtttgcttcttcatagggacagtttcctaacacacaaatattgcaaagttagcttacgacattcatctaagcttgagttaacgtgtactaatgatgaagtaactcatacctcgtctgaagaagaatcatcatcagatgagctgctctctatcttagccttctcaaggactgctggttgcttcttcacagggacagtttcctaacacacaaatattgcaaagtaagcttacgagattactctaagcttgagctaacgtgaagtgatgcagaagcaactaatacctcgtctgaagaagaatcatcatcagatgagctgctctctaccttagccttctcaaggactgctggttgcttcttcacaggggcagtttcctaacaaacaaactgcaaagtaagcttacgagattcctctacgcttgagataacgtgtagtgatgcagaagcaactaatacctcgtctgaagtagaatcatcatcagatgagctgctctctaccttagccttcttaataggttctggtcgcttcttcgcaggcgcaatttcctcatctgaagaagagtcatcctcctcttcagaagaagactcatccttcaacttagatggagtttccttagtctaaaaaggagaattagaggaacaagatgagtatagacagaacattgtacacaatcttaaactcaaaataactaaactttgtcatattactctaaactaattaaactatgagattgaagctacaccttctcctcttcatcagaatcagaagcgtcagaactgctactctctaccttcttaggtaccgttttctcagctttctccttctgaacaacatcaatcaactctttcttctgcttcttcgtaacttgcatgtccaaatcctcttccgcatctctcttacctaagaaaaattcaaaatagaatatggttttgagaacctaattcttgagaaggcataaagaaacaaagcacaactaattccaacactctcgttcaacatactccaattaacagcaaaatcctaaatcgtcaaaaagaagaaaattgaacctttcttgagtggctttgtcattgaagcaggtgtttcaacctggaaaaaacagagttttagattcgataatcttcacactcaaaagagtaacaagaagaagaagaagaagtagaaggagaaagatgattacttcggtgacggatttcttactagacttgcccatagatcctgatcacaagcgaaactggtgtagcagctaccagctaggtttacgagaagcttaaaagttttcgcgtgtagggtttttgcttttttccacgggagatttgttatttataggtagagagagattggcttctgaatttttgggaaattgaagtgtcggtctttttattttgatattcctttttccttatatgtgaaacttaatctgaaccgtccacgtttcaagcgatatgttaacttaccatttgttttttttttggacaaaagataacttaccatttaatgtgattctctagacacttgactcccaagttttgtaaattttacatgtgtcaaaatttacatttacacggctggttaaaataagattaaaagatacattatagaaggaattaaaaaaagaataaaataatgggagtgatatgcaaaatattaagaattaatcatttctcgccaatgtgttcaaaagcttcttctcttcttcattacttccgatcaaaatttgccggtgtttactgttgcaatagccgtcgccactcgccaacggtggggtatcggtagattgatttctaaaattagagggagaaatagaggaggctctcattttatttcgtgaatgttaaagacggtcaacgcaaaatcacttgtgaagaatctgatgctttgtgtcgtcgtggtcaagcaatttcagattgatccgaaaacaatctgtcagatctttgtgtaaagagagtagctttgagggagctgatagttctgttcgttgcccatgattagagatttagtatattctcacggatgattcagcgagacctgtttcatcgattagcagatgaatggatggggtttcttctgaaattgacacgtagtccattgttttaggatattcaaagctagaggaaaacaagtttttggttgattcttttgatttcattacaaaaaaaaagagctttttggttttctttgagttggtgattgttaactctcatcaaatcttctgaagaaacctttcttgtaaccagctatggaagattcttcccaggttagtagatccttctctctctagtctcacccatcttcactacatagtcttaacgatttcatcttgttatgccttagtgtatcttgaaattattggccagtttcagcatgcttgcttgatttagtgatttaggacttaggagatcaagttgatatcaaatctggcattatatatgtgatgcaaaacctttttacttgagctttctcttttcataatacttgcttagtgaatggtaaagaaagggaacgttttaacctctcaatcattggtagctagtagagaactgttcaagagaacataatacagtgtaggcaatcatgaagctggattgtgttagtgtttacacattgtggtcatctaatagtagagtgacccttgcatagtgggactgttttcttgcagcataggtttaacagagataactgtgaaatagctttataactgtttgctttttttttctctaggggagttttgttgcaaccataaatgaggattatgaagcaatttgttggggctgtgggctaaaccttgttcttccatcatatgcacctgtttttaagtgtggatggtgtggtgcaatcacgaatcagaatccagtcagacctgaaaccaaaagctttgggttgagacgtttccgtgaccggtgttttgtcgttattcttgcagtttttatgctctttgtgatatgtaagtccctctgaataagtaaaccataattttgaaaattatatttcgttccctgctaaatactcttttggataaaaaaaacttcaggtggtgggatttgggctgcatatcccgtcttgttttcgatcagcttggcttgcggaattttccattctgttacaacagcgactctggcgatatcaacgctctcaacatttattctcgttgcttttaaatgtgccgggaagccaacaaatattctttatggaacccaccctggagtagggaatggtgcacttaacaactataccttttgtaactactgctccaaacccaagtcacctagaacccatcactgccgcacgtgtggcatgtgtgtattggacatggatcaccattgcccctttgtaagtctcatagcgttttcaggtttctctttagttattacatatatcatttttacttaaagggctgaatgtagagtggctttttgagtttacgttgtgtggtgataggaatgctagacttgtaccttgttcatcattttatctcatacgaccctctgatcttccccaatcatagagtcctcggatactagacttgtttgtcaataccgtaaatattagtgttcttaattaccggttaaggacttaatgctaatgactctccttgtgttgtatttgcagattgggaactgtgttggtgcgggtaatcacaaatacttcatagcattccttatctcagccgtcattagcacaagctatgctgctgttatgtgtgtgtataccttgattcatatcttgccacctattgaaaaaggagctgcatatgcatccgatgtggcccatgtggcgcatggtaatagtatatcgattctgagagtggtgaagaatatatgtcttacttacatagccaacgctgtcttcatctctgttcgaagccttgttctagtctatctctttgtggcgagtgtttctgtggcgattgggctaagtgttttgctgtggcaacagcttagctatatctatgaaggcaagacttacttgagccatttgagttctcaaggaacagaagaagatggtgaaaaaagctgccggaatcttttgacttttttcgggtgtccacattcaattgaaaggcacttgccaaccataaggaacttgaggaagagacataagacatgagaagaagaagaagagaagaatgtgagccaagtatgtttttttctgtttcctcctacacttggagcttgttgtggtcaattcagaaacattcatcatacagtacttggagctaacaggtaatgcagattagcaaagtttgtacctcatttgtgaaaattcatgatcatagaatataggagcaactgctcctgtaaattttgcttaaagattgtaaatttgttgtttccctgacatgcctttgaactcaaggataacattatcaaaggcgttccatagataaatcttttttggatcttgccagtgacttgagtcattgataacagaacttaaagcttctggttttctttcatgcactttccatacaaaatataatacaccaccactcttcaaaactacaacataaagacagtttgccactactgagccatactcagatccaactacttcaacagcttatgctagggttccgtgataacatatttcacaaaaaagggacattagaactattaagaacttcaaactctcttcaccaaaaaggactgcaaaaaacacaaggcttcccgagatgaatcacacttcgccttggccttaagactacggttaacaagttaaagttgccagtctatgggaggaatccccatttcctcgagtagctggtttgcgcgagagaaatgcctgtccaaaggtagaacatatattcagcagttggtacaacataagcacaacactcagataactgcaggtcgtgccatatcttgcagaccacagaagcaataattacattatgcatgtaaataggcaggagagacgaaaaggtttattaagcttaagctaacctgcagtcgaagaagcctctattcgccgacaaaccagatggatgagctgctgtgagtatatgatgtttagtcgcatctatcaacctgcattcataaaagacaaaaaacaatgaagatgcatatgctgcaatatctacaagtctagcaggttctagtgttattgcaagtcataaacagaatttcagttactaattttcttatcagctgtatcgcattcataaaaccaaacctacttggatttctcttgagcgtatcttccccagagaagaaaaacaacaccttccttctgctgtgagatactttgaataacagcatcagtgaattgttcccatcctttctttgcatgtgaattaggctgtttactccttactgaattagaaagcaagttaaccgacatatttgtgagaagaattgcaggactttgacagttttatacatataaggtcatcacacgataggagacattacctgtaagaacagcattcaggagtaacacaccctaaaaaaaaaaaaaaaagtgaattgctttaccttctccaagtaaactgagaattgattgcacaaacaagtagagatgatccatttacctgcacagcccatttctgtagattaccgtgacgtgggatggaacagccaacatctttatgaagctccttaaagatgttcaacagactagaaggaagcttttctccttcaggtacagagaaggacaaacccatagcttgaccaggtccatgataaggatcctaaatcaaagagagtaaaaaaacttgtcaaagcataaaaacagaatccagaaaagaaaccaaagctaattccaaatgttgtatgtacctgtccgataatgacagtcttaactcgatcaaaaggagttgtattaagagcattgaaaatcaagtgctgcggtggataaatcagagggcttttactgtcagtgatgatctcacgttcaaggaaatcagaaagtgatttggcgtagggtttatgaaattccccaggaagagctttaagccatgattcttctactaagagctcactcaatggtacgtagcagtttccttcagctgtaatttccatcccaaaatcaattcaaaatctcaaaacccttaatgggggaaacaacatgacaagcaatcaactaaaagaaagaagaaaaaaacatacattttgcttttgtgaccctctcggagcagacggcgaggttacgcttggacttggcgacgaacttgttgaactctgcgcgagcgatctgttcaggtgtaaggccagacgaatcatcggcgacggaagtggtaacggttacacgaggcggcgagtttgctacagaacccaaatcacgggaaccaccggcgacggagacggcagggaaagaggaggaagaaggggaagctttgaggcgtttggcaggttgaaaaaaatccattagggttttaggtgtcgacgaagccatctccgtttcagaagtgaatcagtcactatgaagaagaagaagaagaagaagagatcccaattttttattctcaatttttttttatgtttcccagaaaagtttcagagaagagttaaatggcgggaataacggtggtataggccggttaaggaatctcttcaggccgatataaaccggttaaaggaagattcgcacactcagaaagtcagaaacaattccaatttcaatttgacattttagtttaggaacgaatttagtagttctgtaacttgttctgttgagaagaacaaaagcaaaagggctaaaagacaaattcaacatatataatagtcacaaagagatcactgaaattggttctaagtttctatataaaaaaaacaaaggacataaacgcaatcttggtctattatcagacttggaccatatcacattatgtcgaaaaagaagaaaaaagaattgggacaaaatctctctaatggggacaacaaagcatcacctgctcttctaagcatcacctccaaagattaacaaccatttttcactgcagctctcaagatttatgatgatggaaagataaggaattgtattaagacaacatgggagtacaattcatattaggtcttcttgattttgccgacatatgcctggagagacaaaacaagagttaacaacatgtgtatgttttgcagttgatttaagttcaacaaagcaaaagagtaatgtatatgaaggaacctgaacgagcttggtaagctttggtttcgaagcggatagataatggtcaatcttctcctgtgtttgaggaacgtttccactttgcattgtaccagtcactttctcagctaccttcttcactatgtttttgtaaccatctttgttcagcttaccttctttccaagctggttttaaaagctcttttacaacctcaactaaagcaaacttaaacgcccgcattcctttcgggtctttctctttcttgttctcttcgtcgctcccatcatcatcaccatcttcatcttcatccacgacattctcagcatcattagtgtcttctccagttttcttaccctcttcttccttgctagcttcatcagtctttttgtccccgttttccttgggatctagcgatacttcttgaatctcttcgacattgcttatctttgatgcagtaaccgcggggactccttcagcgccagtgctcatccctaatccccatagctgatttggattactactcactacattactttgagtagtagcctgatttggttgaacagattctgaatgcagaggcagctgcaatgcctgttcaagctgtggaatgggctgaccatttgcaagaaactgcgctagagatgctgagatgttagtaatctgatcgatttgttccctacttactgtattttggaccaaaacaggtttctccacagttgagtgatgattatcttgataaacttttccactctcaagattgctcaagttggagcctactgagaaatttgtagcagcagcagctagcacttgttgacttcctccagcagttagtgagctttggtacggtaatgcattatgattctgattgaatgtttcaactggcgcaacattcactgaattactgtaactctgatgtgaagcagctacaggtttctcagccatagttctgccaccatgtgaaaacataccactactcctctgatcatctttaagaactcgagattgtgaactctgaccaataataccaacactatggtcttccttcacaggcttctttaaagcttggactccataattccaatcaggagacatctccatgtcatcaatccagctactactaccattccctttagattcagaaactcccttcttactggcacgagaaacttcgattccgcctactcttccattgtccaatctttcaacatcattccatttattatgaccactagtatgattgttattgtcctgtctataaaagttgttgttgttgtcttgaggctgttttctatcagcaacatgatgagaaaacctgcaatacttgccattacgacagaaccccgtccccgcagcgaaaaacttacacggaatattcgaactcctgtggaatcctccttcaccatcaccaccatcccttctttgtgtttccttctctcccgtaaactcgcttcttcgccttcttattctcgaattatcctcgggataatcagtattattatagtcagaagaccttgcaccttccatcattgcctcttctctgaaatcatcggtgtgatatttggtctccctcggctttctaatgttatcttcccaaccataatgatcacttctgctttgatcaaacaaatgatcactgcctctcttattgaattctctgattggcgtaggagaaacttgtgttctcgtcttgtgtctgtcataagatcccgcgtctcgtctagctctatagactgggcttctactacggcttctactcctgctattacttctacttccactcctagaaagaaaataaaaagagagagacgttaagtaacaacaactgaagaacatataaataagaatctctgtaataactcgtaaacactaacctacggacaaactgttgcctagtaccatcttgttcagaaaaataactgttatcgttattctgtgaaactctgcttctagtcctagcttcaccgttactctctgcattgaaccggacaggctcagactctttgtcgcggtaataagaagccgagtttgcatttacgctagaatgatgatggtgtgtgtcttccttagagtcccactttgaaacacgttttcttcccagaccactcatttccatccccaactagtaagcaccaaacatcaaaagaatatctgtagataacaagtttatgaaatagagtaaaattagcaaacaagtaaaaaagaaactgtaataataactagacttaaacctcctaactggaaacatctgcacacgaaaacgaaaataacaacaaattggatttgattttaatctatcaagtttctttgttatatattttatatattctctgctcaacgagcaatattgctcattctatagatcttccaacagtagtgtgaaaccattcatagcaaatcttgttatccattaaactcagaatccaagagcaattgaaaagattgatctttga

SEQ ID NO: 56 - DNA, 73977 bp, Arabidopsis thaliana
gatcaataatctgtgtcctttaacattttcttgcatcatctccttttcattcacttactctgttttttcttttttcttttgtcattgtcctttgaacaataatagtcaatcatgttaagagatttagttagaaagaaagtagtagcagtatactgctggaaaatatattaacctcctaggtgttagaggttttgaacaatataagtgttagaactaggaatgaaaaagaaacacaacttgttgatgtgcttggcgcttgctctgttttggaaatgaattccatttgactaatattgtagcaatagtatttccttcttttttttgcgtatggcggtaaaagtttttttttttatgtcggtaaaatttagttacggtatttttctatatatttataagagtgggcaagggtgaaagttagaagtccctaatttatatcacaagcttgttcgttaataaccctaattctctatgtgtatgactatgatgtccgatatctcgcaggatttgttagaggagattctctctagggttccaataacatctctgagagcagtgaaatctacttgcaaacgatggaaggatttattgaatgatccgagcttttcaaagaagtatggtggtaaacgagacaacgagtttctggcgatcatgacgagtggtagtagggcttctttaatgagcgtaaatctccatggacctcgtgacaataaagacttggaagatccttttataaagcaaataggtgaacttaatcaagaccagatatttaaagtgtttcattgtgatggtttattgttatgcatcaccaatgaggataatactaggctcgtggtatggaacccgtatttggcacaaaccaggtgcatccaacccatcgacaaattctacatatatgattggtattgtttgggctacgacaaggacaaaaaccacaaaattttagtggtttattcccctatgtttggccgcattgagtatgaaatctacagttttttgtctaaatcatggatagttcttagtttccctaccgattggcagatatcgcgtgatgaatgtctgtctctgaaaggaaatacttactttattgcttataaaaaaatggaagtggaagaagtagggtttcaagaatttttactctgttttgattttacaaatgagagatttggaccgcttctccctcttccattccaatgttataatcaaacttctctagttctatctactgttcaagaagagcagcttgcagtgttatgtaagaggtgtgatgcatatgagacgaagatatggattacaacaaagattgagcccaatgcagtgtcgtggagctacttcttaaaatttgatttcaaggttgatatatctggtggcagtttcttcgttgacgtggaagagaaagtagcagtgcttttttgtataaacagagaaaaagaaaaaggcatcaacaacaagacatacatgattggagaggatggatactacaaagaagtggatctcggagaatctaactggtgtccatctatgtgctcttatgttccaagttgtgtgcaagtctgagtaatgtcgagtattaaatctaccagaatgttatttgtttcttgcattttcttttcattcatttactctttttggcttttcattcttataaattactgatttaattagttgatgagacaaaaacttgattctcgaaataattgtttcttgttggcatttattggtagccacattgcttagaagagtccttcaaattcccaataaccttttgttactttcttcttagtcaattcttttaaaaaagacagacaattcatatgatggaggtgtcctaagacaaagagagggtgtcacgttacaaaaaaaaggatcgcttttgcggcgactcatttaatgatttaaactcagtcgatatctattttgtagtcgctgccaaccaagtgccgaacagggtcatatgtcaaataacatagtctcttagctcttacaaaaagactgctgaaaactatattagcctcctaagtgaaacatagcaagtgttgaattaaataagaaaaacaaatgttgtgcctgctctgtcttggaacagagcaaaaaatgcttctcgtttcagttccagaaaatttcttagcttaaagaaaaaactcaatcgagaatcccattactaattttaattcagtagcaacaacagcttttttcatgatatttattaaaaagtggaacgttttatctaaggaaccaagctttacaaagaagcattgtggtaaagcatctggtgatcatgttgaatgattttagggcttgtttaatgagcgtcaacctccatggaatccatgaccacaaagacttggtagatccatctataaaagagtatgtaattcatttgttaacgaacgtctttcactgcgatggcttgttgctatgcgtcactaaggacagcactagcctcgaggtggatcaaaccaagaagtagttaccacagactagaaaggtatgctcttggatacgacaacaaccgtaaccacaaaatatcgaggtatttatttattacgatcacaatgttgcgcaacgagttcttaagtacgaaatcttcgatcttaagtgtaacatatgaacggttcttgatgtcactcctggtactggtatatactaaactatagttttcggggcgtgtccgtgaagggtaacaattactttgttgctcaggaaagattggaaggagtgatgacaaatgtttcactttgctttgatttttacaaacgagagttttggaccgaacatgcatctgccgtttgaatcttatcctgacgatgctgtgactctatcttctgttagagaagaaaagcgtgtagtgttatttaagaggtcgaatgcatgtgagatggagatatggattacaactaagattgacccaacgcggtgtcgtggagctacttcttgaaactggataggtcagtgttcaatgaaagattgaggaatatagatgtgagcttattcgtggacgagaagaagaaagtagcattggttttctgtaaagacagagaagattggaccaacttcacagcttatatgattggaaaggatggatactacaaagaagtgtatctcggagaatctactacatcttggccatttgtgtactcttatattccaagtaggcccggtctctacaaggatggttttttgtttagtttcttgcatctcttttttaattcatatattaactctttggattttcttgtttagtagtcagtcatttagaacaaacatgcattacatttagattctaaagatttgccttcatttggatccgcctttatgataagcactaacctcaaatattgcaagggtataaaattttctctgtttgaagttaaatgcctcaaagcacaaaagaccttgtgatgaattgtcgatgacagacaaagagactttcttgattaactagtcttctttaggatccaagaagaataacagattttctcctgtctgttattgtatatagttcgtgtgtaagaattgcttatctgatcacggaaacagtaccctagctagttacgtttatctctgttgcaaactttttaaatgtttagtggtgaactaattttgaaaaattcaaatgaaaagggttgtttttgttgtgggctttcatttagtggcctaattctaagaagataccttgaaatggtcggtgctggtttcattctattccattaatatgatggttcctgctacatgcacaacattttagtaacccaccattcttttcttcacattctggaaaataatgcagaaactgagattggtgctctggtccttagccatggcaaatataagctaatgtgagtttcttcatcgaccaaagagtagaaaatcgctgtggtctttcataagaacgaatataaaaaaaacatgttaacctcctccaaatgcatcacagcttataatttttgttatcacttagtcacattaatacattatcatactttaaaaattttggataacagcacatcgacaagctagtttagtagaaatcacaaagcataatttcaactctgcaaagttctgattttaaaattcgtaaattttttacagttttaataccgagagcttatcatataaagtcatggctcattattaatgtcgttattttcggatttctctttaattggctaaaaagcaaataaattaggtaatttaaattcagcttaattagccaatgaaaacagagttaatgcaaaagttcatcaaacctccgaaaaagcgaaaattaaaaaagatgagctcatcagaataccccaaatccagaaaccccaccctttcttcaattctcacatctctctctcttcgctctgaagcaaagacaaatatgcaaaatcctctctgaacaaaattcactttggatttgcagaatttatttgctctaagttagagtgaggagaagcaactgccaaatctctgtaatgcactgtgaagatctcgaagaacaacaagacgaagaagaagacgaagcagcgagacatttctcgtagataatggtggctgcgattcctcaaggagcagcaatttccaacaccgactctaagaatcctccacctcgagatcggcaagacaaacctcagctcacagctaacaatggcggactacaacgaagacctagagctgctaaaaatgtcccctcacgctacttatccccttctccttcacattccacgacgacgacgacgaccactgctacatctacttcgacttcgtcttcttcgtctgtgatactgaggtctagtaagcgatatccttcccctttgctctctcgcacgacgaattctgcttctaatttggtttatacgccttcctcgttacctaaacggtctcaatcggtggaccgtcgtcgtccgtcggcagtttctgacacccgaacggaaatgtcggcggcgacgaagatgcttatcacttctacgaggagtttatctgtttcctttcaaggagaggcgttttcgtttccgattagtaagaagaaggagactgccacgccggtttctcaccggaaatgtactccggagcggcggagagcgacacctgttcgagatcagcgggagaattcaaagccggtggatcagcaactgtggcctggtgcttctcggaggggaagttctgaatctgttgtgccgaattcgctttctagaagcgtggattctgacagtgatgatgggaggaagcttggatctggctttgtgggaaggtcaatgttgcagcattcgcagagttctagggtttctggtgatgggagattgaatttaggttttgtaggaggtgatggaatgttggaaatgagagatgagaacaaggcaagacaaagcacacatccaagattggcttctagcgtttcgtgtgactttactgcatctgatactgatagtgtttcatctggtagtactaatggtgcgcatgaatgtggttctggtgaggtttctaaaacaaggagcttgccgcgtaatggtatggcttctactaaattctggcaagagactaatagcaggttaaggcggatgcaggatcctggctcacctcaatgttctagcccaagttcgagaatcagtagtatctcatcaaagttcagtcaatcgaaacggttctctagtgatagtccgttgacatcatctcctcgtggtatgacttctccaataaggggtgctactcgccctgcttcaccaagtaagctttgggcaacagctacatcagctccagctaggacatcatctagtccttctcgagtgagaaatggagtttctgaacaaatgaatgcttataaccgcaccttgccttcaattctttgtttctctgctgatattaggaggggtaaaattggggaggatcgtgttatggatgcccacttgttgaggcttctgtataaccgtgatctgcagtggcggtttgccaatgcgagggcagactccactctcatggtacaaagactgagtgcagaggtatcctttcttttagattaccgcattaatgcttaataattgagtttatgattgtgtcatgtgtgtgcctgctgattgtaattgtctttagttagccactgcagcagacttaggaaaatcattattggtattttacttttagccactgatgcaatgcaaatgcttaagcctctaaagtacgcatttctttcgtgataatgctagaaacacgatttgtattttaccaacagggaagacttattaatacttctctggtaagaggagatctgatgctaagcctcttggacctagaatagtgtttaatttagtttctacgttttggattgtgctgcatgctaacttttgcctgatgctgatgtgatgacatagatgaaaatatgaatggagtaagcattaacacagttatgaagtctagatatcgttatgataggatactcttttagaaagttgagttattgattttgtccaataaactagacacattctggtgaactcattttttcttttcttgacagaaaatcctgtggaatgcatgggtatcaatctcggaattgcgccattctgtcactctgaaacggatcaagttgctcttgatgaggcagaaactgaaactagcttccatcttgaaggagcaggtgagaatatgaacttctagcaacttcataattttaattctttgaacaagaaactttttcatgtttatattcttagcttaaatttagtggcaccattcaagttttgagactaaacaagtatcttcaggaatgtggcttagtatttctaaaaaaacttcttgttataatggaaaagtaaattgaatacaattaagtactgccaaatgataactgcaccgttacgatcttacaagtgaatgtggtacatttttcttagttctgcttctgtggaagttattatcttgattgcttaaaatcatcatctcatggcattctgaatcttagacaaggaagcacgttaagaaacatgaaagcatatttatttcaaaattcaaaagtttttttaattgctgacattcacttgtaaaaaagagagattatgacatattcatagaaaaaaaaatgacattcatagaaatgttttttaaaatgttgtaacctttttgagactgacgaaataattgtatttgggaattgtagatgtgttatctagaagaatggtctcttttggacagaaatcactcaaattctttgtcaggagcaactgaagccttgaaagccagcacacttcgtcttccagttagtggtaaagccgtggtgagtgcttcttcgcctgaccgtgatatgtttgttttgtcttattttgtatccttaagtagtgaacattagattcttttttctgaatgcgtttaaatgatttttgtgttgttaggttgatattcaagatctcaagcatgctgttagttcagcggttgatgtcatgcacgctatggtgtcttcaatattctcacttacatcgaaggtaaataccttgtctcggtgattataacgtgaatgttgactaaggaagcttatcctctcattgctcttctgtgccatttctgttttgcgtcggagaatagaatattagaatgcaatatatagctacgacgtactgcagaagtatctccatgaccatgataatacagaaaggcatacaaatacttgtctccttgccacctttgtcatagtggttattgtaagatagaaagttgaaactcagagttttagttgctggtacaaagccggttttagctctgttcagagaacccggttgtctgacaatgtacttgtctagatttgtttctatatgaattgcttgtgttttctgaaccatactttgaatcctcttatctgggtgcattttgtttttctgtcattggtaggtggaggaaatgaattcagtaatggcagaaatggtgaatatcactggaaaagaagaggttttgctcgaacagtgtcaaggattcttaacaagagtagcagcaatgcaggtttgaatgctctctctgctttctgcttttgccttttcctcctgctcagcttttataagcaaaagcatgcctcttgctaggttacggactgcagcatgaagacgcacataatacaacttagccggctataaaccaacctgacttcacaactgtagaaactgatctcctctgcgtttacacgactactcacgccacttcacaacctgaatggtttctaacaacgttttacattcccacggccttctctcggaatctcaaaaccgcctttatcgttttcaaccggatcaaggtgtgctgtctcgagatatctgtttcactgcactccggattcaacgttttttaaatgtaagttcctgcattggagaattacagaagaaaggtgaaagaatagaatgtggtgtttagttttacctatgaatttagtttaattgtatacagaaaaagcttctaaatagatcattgacttttgttctcaaatgaagaaaaaaaatgtacataatgaagatatcaatctctcttatttagagttggatttcttgctgtttcttatttcccatgtgtcgcgttccttccttttgtgtgtacacttcttgtcgtttttatgtgcccgcatcaatgcgtctttagtacgtgattgtgtcattgtgtgctaaaagaataagacaagtgacgtcattctttttatttgtttttaagtacacaaccaacagagacacaaagacttggtgaccaaggatcgattctttttttaataaaagaaaataagaacaaaaaataatgtttggataagattataattggcaacacgccaagaacatcacagtttatatgcaaaacgacacgaatggaatggattcaattgataatattgtttagtactcctgaaaatcttgatcaatatgaagtctaaaatcactacctcctagcctttttatacttgtcatacacgtaaattcttaactctagctctcttttattccatttttgggttcactagtatttacaaattatttattatttccagattaattattatttcaatcaaacaaaaatagtatagtagtgttcttttggtgtaagatatctcagcaccgccaaaccaaaatagcaatcactttatacttaattagaatatgctttttggtgaaaattaagtaatgttggagaacatagacttcaacgaaaacctatgtggttcttttacatttgcgacgcgtattaataatgacctatacttaataacgtgttttgttcctgattagtaagattaggtagaaccgtacacgagccaatacactttctagttttctggtttagtcttctttcctcttgatcatttcttttaacaaagcaaaacagaaaacgaatatatgtttggtacactatcaattaattagagtgataacttgaaaaaaacaattaacttcctaaaatcaaactaacaacgctacactaaataaattagatggtagaagttaggctctaattaatgtttttaagcacaaacctaagaaccaatacccaggttcgtggtcacatctgtattaatgattcgatataatcaatttctaacaaaattaagtaatgatgcatgcattgttgctaacaagcatgtgcaattaatttatgatttaatacgaataaagaaaagaagctaaggctatacactatagttttagtggccaataaccatatcggaaggtatgacaaagaatataaaaacagttttctgaaaattgtaaattgttatttatggaccagattaaataatacatgtgctaaatactaatgaaggcaacgaatcccacatggaaggattctcgtttccccaactatttctgctctgtgttcccacacataatgccacgcaatatttatacagagtggactgatcaagagattagttaccaaaataaataagaaattctgacttaatcaatcatcaaatttttgtatcaacccctaacaatataccaatattcaatccaaatcagaacaattaaaaatttgtaactaaaaaaatgaaaatgaaactatggttgtaacgaaaaaaatcacacaagaattaatagtcgagtattagatttttaaagataaatcttctttcttgatgacttggtcgtgatcggtcaacaaaagcggttttttaccggtcaacggactcaagatctcttcgtcgacgattggattgtgatgaaggctgagttcaggtaacgccggtaggtttagatcgatgaatccacggtggctcctttcttccgataccgtgctcgacacgcttccactgtgactgattgatttgcttcctcctcctcctccgccgccgaggttgccttcgtagtgacaacgtttgtgaccgcctaaagcttgacccgtcggaaacactttatgacagattgaacactcgtggatctttccggaggcagcaatcggatgtttttctccggcgacgatggagatggtcggagctgttgaatcatcggcggttgttgagattacggttggtggtttgattcggtgacttgctttgtgaccgcctaaagcctgataggaaggaaacgctttttcacagacgttacacttgtacggaaggttctttgattctggcggcggcgttaacgattgcgactgttgatgaaatcgcgtttgcgacggttgatctttagcgagcatgaggagacaaagagcgagatactcttcttccgtaagatcttgattctgggatttgggtcgagatcgaggcggtgaggaagaagacgaagaagggctgtgagaacgctgacgtttggagcgtttgcgtttaagccacggctcaatgaaaacggcgtcgttcatcaaatcttctttcgtttcgattctggtgaaagaagaagttggagtgttcatcgcttcgagggccatgatcagatgaatcttcttctaactgttggatcaaaggatcagaaatttgagagaaaagttgagagtttttaatcgcgaatatggtgagagatagagagaaggaaattagagagtgaagtgcttaagaaatgttttggacttgttgtttttatatggaaaccacgtggcagatgtgtttttaagtcggtcaaatttttatcttctttttttttgtcaatatactctctataagaaacctaacactatagtgtaaacatggaagaaaatttcacaatgtttaaattggattatagtatcaacaaatatgattttattagtattcttattttaaagcattttttgataatatattatctatagcatatttagctttagatatgtgtcagatatatatctgatagaaaattattttagacttatcaaatcatatatattttgttatctaattttgagagatttatggaaataatcacttaaaagtaagtaccaaaccagcaatggtaaaccaaatttgaccaaaaggaataaagagaaatttactgtaaaataccgggttgtttttggtcacggctgacctaataagttttggtcatcaaagagtgagagaccggttcaaagtcaataaccagaaaagtaacaaattggtaaacccgcaaatagattttagcttatattaaacaattaaaaaaagaagcatacctttcccgtggagctgacttatgtgttagctacgcgccacgagtcgtgtgggtcacgccttaaaccaaacgcgtacacgcctaattacgtttttttttggtactaatcttcttgaagatttatcaaattttctagatttttttaaatttattatctcttatcatgaatcatgatcttatcttaattatttattaatcactcttcccatgctaatctatagcaaataaatcgataagattcgtttaataaaacacctggattctacccgaaaaatacgtagggaataaattaacggaaagaaacaaatcggaatttttgttttcagaaaagaaaaaaagaatgttgagctaacttcagtggagttgagtgtaggtgaggtaaaaattgggtgaggcatggcgtaccgtattagtaactaaaacggggcgtgattataggacacgtgggagttccgttaccacttgtaaggcccatgtcacttttgttgttatacccaacaagcaaaaaaagtggacgtaatttatccaaacgcgttggcggagacgtcacgtggcaatttatacacgtgtcacttcgattgcgcagacaacatcttctcaggaaacgcagttttagacgttttctctcattcagattctatactcttcttacctttttgggcttgcaaggttctgtataatatgggctttattagcccaatcatctcgaaatatgtaagtccgtatcagacatctaacggcccatcttcgttgaactcgtgttttacatgattcattttggatcattgaagtttcgaccatttcgctaattcgaattcaaataaaataaaattagtttttctgtttggatatgtagagtagatctaatcgacccttgtacttctgcaatttgaattcaaaatttaaaccactctacttttgaatctctctctcactaaacctagaaagtagaaaaccctagcatttgtgatcttcaacgggaaaaatgacgactgtgactccgtccgccggtcgtgagctctcgaatccgccgtccgacggcatttctaatctccgattttctaataacagtgatcatctcctcgtttcttcatgggataaggttagtgaaacacctcatttgctctttgactgatttgattcgagtcctctctttccttcatctgaagtttttttttctgttgttctgcgtttgttgaatctaagcgtgtgagattgtatgatgtgagcaccaattcgttgaaaggagagttcttacatggcggagcagtactcgattgctgttttcacgatgacttctccggcttcagtgttggcgctgattacaaagtccgacggtattgtctctcttttctctcagtcatgtgaagagactgttggcataataatgtttcccctcaggctaatttaacattggctgctcagaagttgttgattttactgcgattttttcttcatattttgtcactgtgacggctatggaatctttctacatttagcaaatgccttgaatccgttgtataatttccttaatttataaggtttcatctggttatactgcaggattgtattcaatgtcggcaaagaggacattttggggacacatgacaaagcagtgcgatgtgttgagtattcttacgctgcgggtaggtagagtggtactctttatgctagtttgaacttcaacactgacgatttctggtgcttttaagttctagaaaactcatagctaaccagtttttgttatatgactctgatgatggatgatttaataccttagctgtcttggacagtgaactttgttccctaatcttttgtaatgtaactatatctggaactcagatattttgatttcagcattttgtttttttacacattatgtttattttgtgatgttacaggacaagtgatcactggatcttgggataaaacagttaaatgttgggatccaagaggcgctagtgggcctgaacgcacccaagtgggaacatatttgcaaccagaacgtgtttactctatgtctcttgttggacatcgtttggtagtggctacagcaggaaggcatgtaaacatctatgatctcagaaatatgtctcagcctgagcaaagaagggagtcttcactgaaataccagacgagatgtgtgcgttgttatcctaatggaacaggttagatgactgacatattgtttctgtccttgctaattttttcttccaattccaaagtatactctcagttcctcttcttccataccaatgaatttcggaaattgaaaatttacaggctatgctcttagctctgttgaaggaagggttgcaatggagttttttgatctgtcagaggctgctcaagctaaaaagtatattccttgtgttcttcttttctcttttccatgactttgactgacaaatgtatttgaacttattctcagatatgctttcaaatgtcatcggaaatcagaggctggaagggacattgtttaccctgtaaattccattgccttccatccaatgtgagttcttgtcttagaaggagcccaactgtttcatagatttctatatttactactttttcaaaacacaagaaggttaagataatactccaactaaataagaaagtaggaaaaatattttcgtgtaaagttgttcagcccttgtctgctgattgatatgttaaagatgaaattctaatgatgaagagaacaaatcgacttggaaagctgcttggatgcttggtctgagaacttatgggatataagagcaaatgaactaatgctaatatgctgtgtctgtaaacagtttctgtaattagacaatatgttagcttatgctttgtctgagaactaatgggaaaaatacaatgctgagaaatatctcctgtatagctactttcctgtgtaatcatctgagatttttaattgcagctatggcacctttgcaactggaggctgtgatggtttcgtcaacatttgggatggtaacaacaagaagaggctatatcaggttagtaatgagcaagatcttttggttattattctttcaatgttagtgtggcacaaaatttatttgcctccttgttccttttgtagtactcaaagtatccaacgagtatctcggcactgtcattcagtcgagatggtcagctgctggctgttgcttcaagttacacatttgaagagggagagaaatcgtaagtaacttgttccctttctaatcctttgaagttttagaatagtatgtctttgaaatctctgatgatttgtgcattggtttgattggttgcttattgagataacatagcagagagtaaccctgtgccttaatcttacagagattatcacaaacaaattaatgctttaaaggcaccctttttgtctttgtcacaaaaccgcacacttaaggatagtaatctctttgtatttggtttcaagttagaattctctttgattgggtctctgtgtgagaggttttgcaggcaagaaccggaggccatctttgtaagaagcgtgaatgaaatcgaagtgaaaccaaaaccgaaagtatacccgaatcctgcggcgtagaaaggaagaaacacaagttatttcctatgttggttgtttttgtatttgctaggagtgttccaaagattgaatcaacgtatgtttgagcttttaaataactagtgaaatatccacattcaccgtatatgtttaaatttctgtagtcaaactctcttgtcaaacatataatataagatgacaaatttccagtgtttaaaagatagaaagagatcattctacagattctacgttgagttcaaagtctatttcttgaagcagcgacctaacgtccttcgactccaattcttcctcgactctgaagaatctttggtgaacttccttgagtagtttcaaaacattcgccaatccaccttcgctttcactctcgtctgtcttctcctcagagtaaggcattgagtcttggcctttgagtctgaaatagctgtacttgcttatatccactaggttactcttgtgatcaggccaaacgttacgcgtatcatccacaatcaccaccccacgctcctcagccaaaacgaaatcaagtgtcttcatatgaggactctcggtttttgttatcactctatctccaaaataaagtttctttggatcaatcagctccaagacttgtttagcgtatacacgactacccttagtgtaaacatacatggtgaaaaactcgttggcttctttcaagaagtcgcgaagaaaaggtcgtagctttgtcaaaaattccatgggatctcctacggctttgatcttccataaatcatcccttgttgctgaacccgcttcttcgattagatacttctctgcttgggagagacttggaaccataacagtatggagaagcgtgtggtccaagtcaagtacaaggtgaagcttcttctcgttgagacaagataatttcgttgtaaagcacttggttaacgccacagcttcgtggcttagttgtaaaccgtcgaaaatataatcgaatgctcggccttggctttttttcacagtcgatttgcagccgatgcagattccgtgacagatgtaccagtgaccacaactactagaagaggataacgatgaagaggactcgttgatcgttggttcgatctttcgtcttttggcttttggttccgaagaaaaattctcaactacagacatggttagtcttattgataaacaaataactaatttgataagaaagctagacagaggaagagagagagattagtgtttgtctgtttgaggttaaacaggaactcgtgatttcttacgcctagtctcgtatttatagggacagagaccgtcatagattaaggaaatcctaaacctaacctgactttgttctggtaattgaccattatgccctcatacttgccacgtttgcctttttcgagagccctttgttatcttagtattttctgataattgactattataccattattttatgcactttctactgatttagagcatcattatcatgggtatataataaaaatctcttaagagataaaaatactaatattttaattctacagttaaataaaccaataactggattataaagtgtctcttagtttgttattatgtctcttagctaagagattttttcgtttctctttcttctttctcttaagttttaattatttttctttttttttttaattgttaagaatcaattaagaaactactgataaggttggttttaggttctcactttaaaaaccaattgtgaatttagaacgagggggtattggataattgaatttaaaagaattaaaatgaatagaaaagtaaaagattttaaagtatttgacaaattctatccaaatcacaccataatagctgggatttgtttcttcacgtttttgtctttgatttcttttaaattctaatcaaatcacattgctaataaaacaattttaatgttgaataacagtagaatttaaaagaattctaaaatcaataaattgaataacagtagagtttaatagaattctaaaaccaatcaattgaataacactagattaaatagaattctaaattctttcatattcaatcaaaatcctaccttcaataacccccctaatgtattttttgaaaataaaagtttctttatgaagaataaattaaattaataaatttagataaattagatgagtcaaatatgagctgtcaaaacaattataaatttttagtagactattttagctaaattggtggaatgaatattttgtacctttcccccacaaaattgaagtgaaactcaaagcatatcattatcctgaggcatagaaaggaagattcacaagtgatttcctgtgttgtattttgtatttgaaccaaagattgaatcaattcaacgtatgtatgtctttgaagccaaaatatctctgcaaacaaatttgtaatgaaccaatagacaaacttccaatgcgaacaaagttctatatacttaaagagatcattttacacataaatcgtcggcgaacaaattctatatcttttagcagcaacctaacgtcctgtgactcaacctcttcctcaaccttgaagaatttatggtgaattcccttgagtaatttcaaaacattggccaatccaccgttgttctcactctcgtctgttttttcctcagagtgaggctttaacacccggctttgggatctgaaatagttgtacctgccaatcaacactaggttactcttgttattaggccaagctttacgtgtatcatccacaatcaccactccacgttcatcagccaaaaccatatcaagtgtcttcgtatgaggactctcatttcttgttatcactctatgtccaaaatagagtttcttcggatcaatcagcttcaaaatggcttcagcgtaagggcgagtaccctttgtgtaaacatacattgtgaacatctcgttggcttctttcaagaattcgcaaagaaatggccgtagttttaccaagtgttctatggttatggatatgggatctcctctgactttcattttccatagatcttcccttgttgttgaaccagcttcttcgattagatacttctctgcttcggagagacatggaaccctaacggagtggataagcgtaaggtccaagtcaaggacaaggtgaagcttcttcatgttgagacaagagaatttcgttatgagacgcttcgttaacgctaaagcctcgctgcttagatgtaaaccgtcgaatactcggccttcgatagttttgtccaccgttgatttgcatacgatgcagaatccgtaacgaatgtaccagtgtccacagttattaggagacaacaatggaaatgagggttccatgatctccggttctttcttctgccttttggattctcgttccggagaaagatttttggctacaaacatgatttctctgatctatgaaatgaaccgtttaggatgagaatcttagagaactgatcagagatttgggagctaattcacacacacacacatatacacaaaaacgtaatttgatcagaaacctggtcagaggagagagtgaataagaactcgagatctcacctttttgatatcactcaagatctcacttttctcgtatttaattactaggttattaacaaaaaattaaatcctaaatctttgcttctcaagtaagataataacagaagtttgttatttttttaaaaaagtttgttattattttgtgaataaaaaaataaaaaatgtaaaattattttgcgaacaaccttccaaatatatctcgtttgaatacacctccaatacacaatttatataaatgtattttgataagatattataatttataaatttttaatcaatgaccataaacgttacgttactaaaaccaacagatttttattttttttaccccttcttataaagctaacagattaaacataaaaagatactacaaaatcctgacgtaaatttccgtatgaaaaatatttcttctactctcctcatttcagtttggttcgatacagttaaactgatcatccactaaaccgaacccatataaatttcactgaaaaattccagttccttctcgcttaaccggaaaccctaatctcatgagtcatgacctcatgaccaaaacgaatattgtctttcagaacaaaaagaagagaaacactaaagtgacattgtcttttggaacaagtgttgttcgtgttgttgttgttgatgatgagacatgagactggtacttcgttgatgacttaacaaagaagttgtctcaacatgtttcaaaagaatcctataaatcttgttcctcactctaccacaagcctctgtttcagactctgacatcatcatcatcaccatcttttcttcctcatcttcttctcctttaacaatggtgtctaaccaatcactcactcgctttatctgatacattgtttcccctacttcttcactcctcatctctctccactttgttccattgctgatctcatctaaatacttctcaacacggtttaggtaccaacttcttccttcttccttaagccagtttctgagttcgctcgatgctctgcttaacctctcctttatctctcccaatcttgagttgctttcgcttgcgttaccttcacggttatcactttcttgagcaattagggtaagaccctttctcccggggctctgtgtaggcttgcttgcggataaagaaaccagtttgagatcggtagccaatgctgatttgatccactgagtcgccttttcgcgtctctcatctcctgttttgactatgtttgcgttgcagtgctctgttttttcagttgatagtgattgaatgatgagcctgctcttgcttaactcatcctggaaactcaagaaatcttggattggtggctgttgattttcttgatgttggtttctcctgtctgaaagctcagagtatgacctattatatcatttcagtgagaaacattgcttgagcaagaaggtacaactagttttgtctcaattaaaggaatgtaccttagacatttgagcaatctttcagcagctgaagcctctaacaaagcttgtgaggcagctctaatagccgtatctctctgtctcagaatttcctgccaaattcgcaaggaagctctctttagaaccaataaaaacccgtttttatgattgatcaaaatctatcagtattattacctttccgagatttacaacttttggaggaagtgaatcccagagaatctctgtctctgtccagcttcgtttccttgatatcggatctgaggattcaaaggtattgcttttaggtggaagaaggtttttactcttattacttctacttccatagcttaagcttttagaccatcttggagatggtgaaaccacaacatctcttcttcttgttctactacttgacttctcctctatccctccatagcttcggatagaaagagaaggtgaagtctgaaaagatatcgaaaagaaacagatgtcagataatctcgcgtgcaggagatgttcttacgaaaagttatttctttaaaacttacagcagaagaacttcgagctcttgaaacatgtttagtgtcatgatcatgattcttaatcatggatggatctaatgaatctcttctcttcctattatcagccgagcctatccagcttctcctcctagctgctgaagaaaaagacgaagagcaacttgaaatcattgactctgtatcatccttttcttccataacactcgaaagatttttcgataaccctaaatctgtaaagtttaactcagagacgcttgagttattccatctagttcttcttggcttcttcacttggtgatcgtagttttcttcgatatccgatagaccgacacagaacttttcgatccgttctttagggattagatcgattggatcaccggtgcaagcccttcggccaggtgttggtctaatgcctttgatcatgggaactggataagcaaattcaagcttctcgacgaatatcaattgcccgatttgtaacttgtcgtagagaacaagatcgttctcttctcgtggcaatgagacatatattgaatgtgtcgaatctgttatcctcaagaagaaacctttgtttggccataaccctccagctgctaacacagggattatgcatcttatttgcagcaaaacgggtctgtgatcgacgtctcttcgcactttcccgactcccatttcttctagaagcttgaaaagaacacctgatcttaattctgccatttcaagaagcaatgcttgtaaatgtatcagatgaaacacagagagaaacgaacagagaaggctacgtttctcaatctgttgcatacagacaagaacaagattggtggagtctaatgtgtttatgtttaagttctttttagaatgaagttaagggttttttgggaaatccttcattctttttctatgatcaaaaagacctaacgtggatctttctttcttaaccgccaagtaatcaacagatcattcttctgtgtcctctgtttattagccatttcgttattttgacagttctcttttactattcttggtcattcttgttaattgtgtcagttcaaccaaaaatacaatttgactattgtatttgaccaatatagtaaatgaaaaaaaaaaaaaaattaatttcattgatatcaaacttattacaaattgatcaatacacagaaaatgaaacgtataattttttctatcttacatataattaacgagtttacgcaagctaagtctttgttgctattttctgagaagaagaatctttattcacaaattcttgaccaaaacctgatgatctctgatcaaacttatccattataacatgtggattatagtctgatctagttcgacggtgagaagatccctgcattgaagaagagccgtcttgtcccatcattaaaggtcgatagcttcggctcgatcccacagatatcgatcgatacctctgatgatcaggcttgtggtctttcttgatagcatgaatcagatatggaattaacccctccattaaaattctatgtttctgtaatacaaagaaaatcttatggaaacccaatatttatattatgtggcataaaggagaaaacaaatttgtctttgtattaatttgactactataggttcaaatatttggataactattgaccctgtttgtttgtgctattataccaaatttttatttaggttttggtcataattgatgatagcattacagtattgacttttgacaataacaactttagtagaatctatggctttgtttttttcagatagcaaccgttgaatctccggccaatctaacgttgaggtgatgatagatttgttgatcactgttggatccaataacaagcttgtggtgtccggtgactagttttcttttcccgtgagtatccacaaggctaagtgctttgcagacatcaaaatcaacggtaaatttctctgtcatgcttctcccaacttctactctctcaaaccctaccagttgcgtcagtggcacgccaccacccaccagagactttgaacactttggtggtttccagaacacgagcaccacgtggctaccagaccgtagcccgtggttcttgaccccgataactatccggatcttgagatcgtggcaatttactgtggagatatccacagaggttgtcttgtttaggttcatgattggattggttttgatgtgtatgatcgatggagctgagagaacaaaagtcgagaaagaagagtagctaagcccgtatccgaatttgtaaatcggtttccctgtgtagaatctgtaagatcttccagggaaaccagaggttgagttaggtctcatgttcatatctgtcattgcaaccttatccgcaaactcttgtgggtaccatgtctctggtagtctcccagctgatgcaacaacaaacacaaataagtaagtaatagtgtctagggtttaattagggtttagggttcatgaagtaagaggcttacaaggattgtagtcaccaaagatgacttgagctatagcgtctcctccagcttcaccaggatatccgacccataaaacagcccgaatcgtgctcagattcttggcgaatgagatatctataggtccggctgacattatgaccaaaacaacagttttctttgcagcatttgccacatctctcaccagcttttcttgataacccggaagggttaggttaacacggtcaagaccctctgcctctaccgtctgatccaatccaaccaccaaaaccgtcacatcagcctctgaaaccgccttgaccgctgctgaaatcagtgtttggtcaccacatttgacatctttacaccctggctcgtaaacaattttttccggtacatacttttgcagcccttgtatagggcttgtgtacttacagggtacacctgcgtagttactaatcatgacctttgtagcgtttgcatttggccctataaccgcaagtttcttaaccgtggtcttcggtaacggaagatctcctctgttctcaagcagaacaatcccctgttttgcggcttctaacgcaagcatttgatgatccttgctgcaaacatcagacggaccaagattaccaaaaggaagcgactttggatctccatcgaagaatccgagcctcatgagaacaatgtagttgtaaatcagcgcttcatcaacatctgatccgttcagtttcttaagcttcactgcattctctgtgtacttacctagaaaatctccacagttcatgttcaaacctgtttccagacaaaacaacatattttacttctcaaagatcaaaatgacatatctaatgtaataattgttttgagatgatcatctaaagatttttgcctgctttgagggcgagagcaactgcatcttcacgtgtcttggtgtaatgaatgtcgttgaaatagacctggatggaatcacaatccgaaactatgtacccgtcaagacgccattggccacggataactccacgaagaagattagggtctgcacaagttgggataccattaactctgttgtaagaacacattacgctgctcacatctccttcctctacacaactcttgaatggcgtctgatacgtgtcttccaagtcttgcttcgttaccttcccaccaaaacaataacaaatccatcaacattaaggtcaattataaggtcttgaaacttacgtatttatatattaccttggcatcaaagtggaatctatcgatgcctttccagttatcaagatcataagctgtgtaatgcttgcaacagcttgaaacctttagccgccgtgatttaccggcgtcgtgaacgtcttgtaagcccttaacgtagttcacagcgtacttcgaaacaacgagaggatcctctcctggtgtctcttggcctcgaccccatctcggatctctgaagacgttaacgttgggactccaataggtgagtccagctagtcctacgttgtgcatcgctcgagcctccgtcgataccacttctcccatttttagccacaacgatgtgttaaagctagccgccgttaatattgtcgccgggaaactcgtcgctccaggcaccgtcccgttgaaatgcaccttaagaaacaactcaaaacgttagcgttttcattacataacaactcatgtatgttcgtattcatctatatacagtaatgatgtttttacccctggtccaacgtcggagacgccatggagagcttccgaccaccactcgtacggcggaacaccgagccttggaactcctgtggctttgtttacgagttgctggactttttccttaagggagagacgtgagaccaaatctttggcacgtgcttcatacgacaatgagacgttgcagaaaccatacttagccgtcgctggggcacttatgtcacacgcaaagttcttttgagactcgcaaagtgatgaaactagagctatgattagcagagagagacgcacaaatcttctaatactcatctctctgttttttttactcttatggaatagaagacagagtgaggagctagttttataggcgggaagagaagctaattagctactatttacttcattaaaattaaagtttaacatttacttccaactttaacgatgacataacatcacttgttggtgaatattttataagagaagttaaacctccatgtgatagtgtggaaggaccaaggaccatctctgtttgtcttgcatataagagtgagccaagtgttttccacaaagtgatgagaggacaaaatgtgaagtttaagaaaagggttttgaagagtggcttcaaagatactacacaaccattccaaatgtctgtttcatgtctctggtcctaaagttagagaagcagatcttctatgtctctaagttccacagttccaggagtctttttgatgtctggttggttcaccactagctgaccgcaagcgccgctaatatcctgacccatttctttgcgaattgtagtccggatcttgtatgtttccctcaggattttctggaatcttgacacgccttgtatgctgcttgtttcgaattggcttgtggatccaattggattaaatggtatcaaatttatgacctgttcaagaaaagagcacagagtttccataaaaaatatcatcagataattgcagaacctttaagagtattaagacatcgaagatttaccacttgaaatgtctttagcaattcgcctagtagatgagcgtgctgctcttgatcatttactccatcaagcattatgtactcaatgaagatcttttgttgactgttaaatccaatgacaatgtggcataatgttataatcgtcaatgtaactgaagggattgtggttttaatatttaacagcaacgaaccagtcaagagtacatgaactacctgttcttttggaaagtttgaagtgcatccataagcttttgtaaaggaaaggctctagctgctggcatgatctggcagcggatttcttgaactggtgcatggagggatactgctaaacttacaccgggtagatcattgtgtagcttgttaattgcgtgaacaattccgacctatgcaaatgacattaggatacagggaaatttatttgctaactagtaaaaaaaagtgtcaacacaggcagcattgcatgatttagatttatgcctggaatatacggtacaagcattacggaaggacaaggaaatcagaagaaaatcccaaaacaccaaaatttaaaagtaaccaactagacaaaaaaagctgaaagatgtcttggaagctgcatactgcgaggtttaatggattgaagtttatctatcagttccctttatcaaattccataatctaaagtattcctacaaaattcagtgaataagtttctctgttttacgaatgtttcaaggtagctttctgagtacttacagttgatatggtaattcttttgggcgacagctgaaatggttggtttaacatgacacgaacagcttcaacaacagcattgtagttatttaaaggttctcccattccctgatcacaatcatcaaaccaaggcaacaactggtgaataaaattcatcaatgcagagtatataaaataaataaccataaggcaaggtgcacatagtgtagataaaatgcaataacagaagcagaaatataccatgaaaacgatgttgcgtatatcagcaatgcgagaggcgtgaacaagctgctccacaatttctccagatgttaaattgcttttaaatcccatggtaccagtagcacagaatgtgcaacccatcttacaaccaacctattgataaatactttcacatcacatgtctttcattcgataaaaccaagataacattgcgtgataaaaatcaatacctgagatgaaatacataacgtagatcttatacctccaggacgtggtttccctcctaacatccccaaccgagtatcgtatctcattaccacagcttccacaaaagctccattcttcaatttcaaaaccaaaagcaagaatccaatatgagttcgtcaggaaacagagacattacaagtttttcagaatccataaaagcaatgtgttgtatacagtaacagagtatagagtacctggagcttgatgagaagctttgaggtggtgccatcggaggaatgaaatagcgagtgaagagacgaagtaagagtcttgaacttggaatggagaagagagtatgcagcggaaggcaatgaaggaatctcgtcccaaacgcaatcaggattctgaattacatacttccagatttgaatcgcgaatttagggtttattcccgctgattcaaattccgatttgatttccgaagcatcgaacaccgatttcaacttcatcgactcttccttgggaattctccgctcgccgtcgccgattttaaaagccctaaacttttaaagcaaatcccctccgtcacaacaaaaattcaaagaagaagctaaaaccggtttggtttttggtggaaaatctaaacccggtttgattttgatatttgggggaaaagtaaaaaccggtttgtcttaaccgtttttgtcctttgtggtggacgagccggaatataaattccccaattttcacttccaacattcctcagctgctcgatctctctctgatcacaacaatcataagcgatgagaggagctagacccgatgaattcaattttagtacgaatccatcaacgccaaacactggtcagccgacaccgacgtaccccgccggtgttggcggcggcggcggtggaaggaaaaaaggcgttggcgtgaggacgtggttggtacttaactcgtcagggcaatcggagccgaaggaagaagggaaacactccatcatgcggcgaacgggattaccggcgcgtgatcttaggattctcgatccactgttgtcgtatccatctactgttttaggtagagagagagcgattgtcatcaatttggagcatatcaaggcaatcatcactgctcaagaagttttgttgcttaattccaaggatccttcggtctcaccctttattgatgagttgcagaggcggattctctgtcaccatcacgccactaaacctcaggtaattggagaatttagggttttcccactgttcatttggagctctttttgtttattcaaggagttggcttttgtattgtctccttttgtttgtgcctaattgcattgttttggaattgggaagtagaaatattttcgcttgacaatggaatatgtatataatagctaatgtattgttgagacatggttgactatttgatttgtgcaatggtgatgatatgtgaagattatggttgtcagtttagctatggttgactatatactctctttgtatgtgttgtgtaaaggaggagcagaactctgggggagagcctcatacgagggtagatcctgcccaaggagaagctggaacggaacaatcttctggggatcaagggagtgaagccaagaaggatgcgaagcaaagtcttgagaatcaagatggatcgaaggttcttccatttgagtttgttgctctggaagcctgtcttgaagctgcatcaagcagtttggaacatgaggtaaatacttatgttaaggctctgagacaaagcatatttcttctcttgtttggtatttgattcattcttctaatgtaggccttaagattggagttagaggctcatccagccctggacaagcttacttccaagatcagtacccttaatttggagcgggttcgacagattaaaagcaggctggttgcaataactggacgtgttcagaaggtgctatgattcggacattaaaatggctcctttgatattatgataaggatttatcatgtttccttatagatgtgaacctatgacatcaccatattctaaccacgtttgcctatactaataacactttttctctttacatgttctaggtgagggatgagctagaacatctgctagacgatgatgaagatatggctgagatgtatcttacagagaagttagctcagaaacttgaggattcgtcaaattcctctatgaatgagagtgataccttcgaggttgatcttcctcaaggagatgaggatgacaggcatgtatcaactttctgagcttgcagtaccttctattgttctgatataagtttaacatctgcctttttactccaggcttcctcccgaatttgcatcagaggctaacagagatggaaggtatcttcaagcaaatgatgctcacgagcttcttatgagtactcaaagtgcacttagcagaaatagccgtgggactcacacaagctcaacccggagtgccatgaccaacaaattagatgtggaagagcttgaaatgcttttggaagcatatttcgtgcagatcgatggtatactgaacaaactatcaacagtaagtaaatagaccagatgctttggtactctttgtcgtgatgatatccttcttctaatacattgtggtttttgttgttgttatgatgaaaaaagctaagggaatatgtggatgacacggaggactacatcaacataatgctagatgacaagcagaatcatcttctgcagatgggtgtgatgctaacaacagctactctggtgatgagcgcctttatcgcagttgctggtgtatttggtatgaatataaccatagagttgttcacggataataaacatggtccaagtagattcatttggactgtgattggaggttctatcggcagtatatgcctctacgttggtgccatcgggtggtgcaagtacaagcgccttcttgaatgagtcgaccaacaacatattgggagaggagaataatgtcgcattgccacaaatctatttaagctaacaagacttttatgtatatcctttgttcttgaggatctttactactctcaaacctttttttatccgtctccttcactatttgcatttctttcgatttaataaaagagcaaattgcatagtttccttcttgcttatttcgacatcaaaatttagatatagactgattagagaaccggattttataatggtatcgcagatcgtttctgtgcacaattctaacttatggggttttttctgatacttgaagaaatataaggcggaaactgtaatattgaggaaattgacaatttctgacgggaaaattagataaaatgttgcaggcaggcgtgggaagagagaagagcaaagccctaaaatttcttcggtgagagaaacatgtcgacgaggcgagaaagcagagattcagaccctagacgtcaccgttctagaatcgatcgcgaacccaggtcttcttcttctggagattcctgctctatcttcatcttctattataactttgaagcaaataaaattcggttttgaacaacgaggaagctcatagtgtcttttgtctagaaatcgaaatgaaagctgaatttagtgttgaagtgattgttttttgaatcatcctatgttgatctgtctactctaatttggtcacattcactctcgaacagtggagatttttctgaagatggtcaattttactgataggcacaattagttgattttggtagcttatcacagttgtacaactaatcatttatgtttttgtctttagccctaagagatcaagaagagatggcaaacctgaagctgaacgagttctgagtaagaaggatttggatgttagagatggtactgacactgagaaaaactcacgtcagtctttgagagatgctccattggaacttgatgctcatggttcgagaaaagacagtgagaagaagcactctggacatcatgagaccaccaaagcagctccccatctgtcacaagtacctcgttctagaccatattctcaggttccaaaacaaccttgattattttccatctgataacgttctttttgttactgtccttagtagatgtgtggtcataggaggtcttgcaagtttttgatctgctggaatgaaatggctaaaagagttaatatttggccatttatctgcttgttaaaaatcaattgctgggttgctatttactgcatagttagcctttaatctgtgctcatgtgatggaattattgcatacagttgaatgcctcccaatgctcagtcatatgtaatctttggcttgcctgtgcgtgtcttataacagcatgatgatcgtcgtagtgatggaaaagttgatagaagaccaacttctggtaattctcgccaaatttactctttccttctcttcattacataagcaaaaatatatgtctttaataatattggtaggtcttatgaacatattacttgcttttaaatgtttgaagtgagaggatcgtggagaagttcaagagatcagagtaaccgaagagctggagatgatgagaagtcacagcatcgtaaagacgaagacaaaagctcatggcgacatgataggttccgtgagagtgatgacacccaaggagcactctctaggaaacgaccagccttcagggagaagaagattgcagaggaaactgggaacaacacagacagaacaagaactgaggatggaaaagacactaatctaaacaatcgcagacagaacgagaggaactggaggagcaatacgcattcagaaagacatgagagaccagcaatgggaagagacagagtgtggaacagagatgatgaaagaggcgcgggaagcagacagagttatcaagctgatagagacagattcaacggcaatgggcgaagtgggtttagcggaagctggacaaggaatgagaagaaatgggaccatgacttgttcgatgaggcgaacaagagtccagctaaagccaccgaggaagaacagatagctaaagttgaagctttgttggcttcttgaagctgcttatgtcatggtttttggtatgtattcacctctactattagaatgcctgagtttgcaagtgtagaagatgatttctgagtttatacatataatgaaactctcctctttttttccaagaaagctgcatcggtttaaacttcatagatattacactctaaaccggacttttcttggggttacacgatttcacttaaaactccattaaagtaagactgacttgccgacaaaaaaaagtaatatggactcaagaatcaagatcctatcagtaaaagtcaattatactggattttaatataaaaaaaagaaggatccttgtttcatcgatcaatcatatatgtttgatgtttctataatgtttttcttttatttatttccagaaactatacatattatcacaaacatgatctcctgaatcaaaaacaccaaatcactgaacgaagaacaacaaaaaatgatggcaaaatatgagagaaaaaaaagaagaagaagaagtattattagaaaagagttcgtttgccaggacgatcagcgacctttaaggtcttatcgatgagatctctagtcttcttacgacggatggcgactctgacgctggagcttttgtccattttgatgtaagttttcttcttcttccttagcaaactcacctttgactttatcgtctccatcaaactctccaactgtaatcccatcttctccttctccttcttgcttctctaaagaaccctaaataactaagaaagacgattcaatttttgtagttgcagctcctctgacatatttatgcgttagtttttatctttttactctaaaacgtaacgctttcgagttctttggttttatggaatagtttgtgagttataggctttgaaattgagaaattttcgatattgccactagttgtccttctttgactttaacagtatttaatttagtagtcaactgctgtagatgtcatcagtaatcacatttgcttttgtcaacaatcacatttacacacataaaaaaaatagtagtatctttttgttctccgttgcattcacacataataatagcatgatgataatatatcgtaacgtagtcgtagtgtatgaaattttatctcgttggtctttccaaacgtatatcatttaataccattgatttcaaaatcaggagaacgtcggaagatatatctttgatttatgataatacatagatgcatggataaggttcaatgatgcttctttcaatcttttatccccacactaacatgtgtttcatatcttgagtactaccttaattacacttaacggattcggaccatcgtcctattctaatccatgttggtgttaatatatgctctggaaaatgatggagaggccggagatattgcattgttcggaccgcttggtaccaatctttttgttccgatatcttttctggaaaatgatggagaggccggagatgttgcattgttcggaccgcttggtaccaatctttttgttccgatatctgctctggaaaatgatggagaggccggagatgttgcattgttcggaccacttggtaccaatcttttaattccgatatctgctctggaaaataatggagaagccggagatgttgcacggaccgcttggtaccaatcttttcgttccgatatctgctcttgaaaatgatgaagaggatggagattttgcatcacttacaacacttggacctactctccttgctttattttgtacataaaatgctggaagttgtagagattccatttcgttcgtactgctaaaaacttttttagccacatctaaatcagaagcaactgaaatgatcccgcgagtggctatagataatgtcagagaaatgaactgaaacaccacaactccaaaaaatcctttcatatttcgtttggcttctgctgttttaaggtgaaaaactgaaaatggttgtattatagggtgaacgaagatagcaactttatatcaggctttttaaataaacatatgtatttagtatttacatatttatgggccatttacatatgtatttagtatttacatatttacataattatggcaaacaataggaccatttgagaagactagcacttttaaagttaaatattttttttgttgaacaaattaaagttaaatatctaaaaaagaaaaaaatccaatagaatcttggcaaaaaaatactaatgaaagaaaacattttgaatacaaggaaggtatgtatttatattgtatattcaaccttgtcaagattcactacctaatgcatagatgatagaattcgttgacaaaattatcaatcttttagttaacccaaatcagaaaaaaaaaaaatctagataaagatgtaggaaaggatgattttcttgcaaacaaatctcacgaagagatagattactcaacctaatcataaaccttacataatacaatatataatgttagttgcctaaaacatgtaatttcgttgtttgtgttgtcactcagggctggccctgagcacaacaaagtgaaacatttgctgtgtcccaaaatttgaatggcccattttgaaaaaaaaaatttatatgtataattcaaataaaaataaaaaagtggtccattttaagctttgagtttcataaaaaaaacataaagcctaaagctttaactaaatctcataaaacctaatttttctccccaataaatccaactccacgaggcttaacattggttttgtactttttgtttagtatggtaatgaaaatttttggccctcattttggattttgctctagcccttctaatctcagggccggcttcactgcatcgcataatttgtgtttttataaaaattctataaattttaaaataggtgaaactacctgtattcaacaaaaattggtaaaataggtgaaatacctaaccagccatttctcattgcgttaaagctggagctcatgataatggtcgtaacaaaatagtgtttatgatgagaccggtttcaacaaaactcaatccaagaaaattcgaagcctaaacatctccaaacacgggagtgagacattaaccgggtgtaaagattttcaataccgaccacattctccatcttcaagctcctcttcctttgtgtgctccctcgcttcttcttttctacgccgcttttccttgccctcaacctctgcttcggagacccagcctcgctgcaattttagaaagctccgagattaaaaagcttgacataaaccatatggagctaaaccacttgtgtgtctagaactaggctagagatcgacaatgtgttaacagtaaaagatatcaacacatcaaatggttttggacctaactgagtgaagactcttttcagtagaagcagcatttctgcaaccaatccaaatactgaattcattgtcatggatcgaataatactataacacagtctactctatggttttctcgacttaaaacctaaacacaaatattactttatgctataatcccttaagaaaaggaatttagtatacctgatgtcttgatttcttatgcccaccgccagctttatgggattctttgaaatggtctgtgtcattttccttcacactagtatgtctttctctatgtctgttatggctatctcttcctgatctcctacgttcttttccatggggttcattcatatcatggttgtatttaccagctgcacctttcttatgatgatcgtcactgtctctttctcgcactctgtccttctctcttccgtatttatctctccccttgtcatgttcctctctcacatcctcgggtacctgtagtaatataacattctgtgagcttgcggacatgccatcagtacgtaatagttgaatcatctataaccacaagttgaagtatgttagtgtgcaattatggtagcaactacgaccgacagagactctcaatactgtttaagttcatctacagtctaaaataactcctatagaatataaattgacatacgaaacgcagaattatgaaagttccaccaaaactattaaatggtagactcgagcaaactgtttcatagacacaaatattaccttcttgttctgtttgatcctatttgattgctctttaaggagtgaaacgtaatcttcgaaacagcgcttccgaaagctctcatcaccaatagtactacatatcagaagcataaattatagataataaaaataatagaaagggcacaattctcccatgaattatggagaaggatggggaatacataaagtaaacaagcagcgaagtcctctggtaaaaagtattgggaaaaaataacaggcattggccgaggaagaagagtagtcatccactgcatgaaccaaggaattcaattcctaacattgaacaaaagaccaatatttggcaacaataaaacagcgtaaaaaaaaattcaggtgaaaatatgctttacagtcatttttggcaaaacatactagcgaaaagcacaaaccacagagcagagtaaaacagccatctgaatcatgaggaactttaaggaaagacaaacgtggttgctgtaacatcgacataagaaacccattctagaaagcactggtattctatttacagaggaagacaatttggtgatcatgtatatgagaacggaagttggaacttagaagaccaatatatagcagaaaaaacaggatccagccagaaacactaacatgaaaggttagaataaatgaaagtacctgcatttttcactaccctcaacaagatgctttaattcctcccaggatgaagaggcagttatatcctgcaccaaaacaaataatcagggagaagcaagaccaccacccaaaagtcatccatcacataacattatacagaatcaaactaaatagattcaacaccttgaaggagcgaagcatatcaaccaacttttcagtctgccgtgtctgttttctggcttctttttcttccttctcctttgccctttccagcaaatcatcaaagactaactgagaagcatcactaaaacaaataattagcagtcatatccaaatgagacattcaaggttcaataaagaatatgctaacactgcagtgattttactgtgcttaaactagtttatgcatcatgaagcaagaagacttgtatcttcaaacatcatctggaaatgaatttttgaaagtcaagacaaagatctacagacctttagtctaacgtcaggaataagaggaaaaccaatatcctcggaaatagaaaccttgaactcatcaaatgttgacccagcggataaatttacctggaaataaattgaaattattaaacacctacaaaatacagaaatattacagaatataaattgcgtacttttctcaatttcaatacatcctttatctgagacttgagctcgtggtcctgtgaaaaaaaacacatcaaatatacagataattaatttaggaattaagggacataaaaaaaaacaagcaaaaataaacaggaaatggaaacagaagacgccactattcacaaacctagcaaaataatgctaccagaactacttaatacaacaattactgtcttttaaaaggaatcagtctagagacagcaaagcattttttctcgtcatgtaacagattacagtcactttcatgatattttggaaagtaaacggactattgaatataatctagtaccctttttttcaaatcctcaacagcatcttcaaataagtcttttggagtagctccagaggagtttgacgcaattgctgaatatactggtaaatccttgacctgagatgtagaattcattttctattaaaacagttcaatacttgaaatggaatagttattctgggtgacataatatttaattgagttatataaccttcattaaataatcacgccatatagttttggcagtaagctctcctgttgcaatatgttcatctaacagcccatggaactcatcacggtgctttcgctctacttttttgagttcctcctgttgtcatgaacagcagatataatgaactaatgttcaatacaacaaacaaataaatgccaactagaggccgaaacctacgtaccttctgtatcttctttttctcctcttcttctctttccagatcacgcagatactcctgtacaacagttaaatttagccgagtctggaatgggaagatagttcctgataaatgaaacaacctgaaagatttctagctgatcaattttctcgagacgcgaacatctttcatccacttctaagcggtcctgaactttgcgccattgactatttggctgaatacggaaaatattaagtcagaatgaactaccacaaaatagtatggaaaaataaaatttaaaaagcgggacaatcaccttgatgaaattgcaagattccaaaaatcttttgtattcaattatgttccgcttgcgatcctcaagagctttcacccgccccttataaaattaacaacattacgaataacggaacccaaattaaagttaatgccaaaactttgaacaaacaataaatttgatatttggtcctcgcaaatataaagagtaaggacacacgttgtaatgaagttcactattcaagagatggtacacacttggctaaaacagatgtgaagtttcaaatgatgatgaagttacaagaattaagaaaaagtcaaatgactactctgagcaaaattttccaatggaaaactaatgtcaaaaatacatgcatatagagaagaaatgggacaaacaaaaatacagttacttttcaaacaacacaactcattaatgtatacatcatttaataccttctcttttagctcactgacatgatcttcaaaaatattacgacggtctttttctcgttcaagagctttgaaacgctcatcgtcttcaaacattgtcacagtcttactggatttaaaaggaaaattatatcacaaagaaattgcagtaattctcgtagagaaaaagaaaaagtattggaatcagaattttctggaaaacaaaacctccaccgagtagaaggagtaagctccacgcattcctggtaaaaaaaaaagacaaagtccaagataaagataagacgcatgctggtgaatttctctactttaaaatttcctaaaaatgaaaaggagatatatcatggagcagcagatctgcaacttacctctaacatccttttaaaatcttcatacagttttttctgtctggctagcctttcctcctcagctgctcgtttcgtttggagtaagaactgaatcacaacaaaacaaagaccaacaaaacacaattaacatatgtgatcagatgtacctcttaagcatcactgttcaaacctggagaagaatgtgtatgtactatatctaaacatctgaaatttctttaattctcgtctgataaattctcttgctagttttagggtataagataatagaatgacctcattgaaggcttgcttccgctctccaagtgtcctcagagcaccgtatcttttgtcattaataatttctctcatggcctgtgacagaaaccatctgaaacttcagaaacatgctcaagaacagttaatagtgaaagttatactacctgttcccatgtccagtcagatccaactttggcggatttcaaaagtgatttgaagacatccacagcttcctatatagtgaagtaaaattaattatgcacacagataagaccagaaatatgctcagacataaaaccaatcttttatcggataaatcaatcataccaatttattgttaaaggaaaaactctcttgatgaatttgtttttcttctgtttggctctcaaccttttcactttcaaccataggtttttggctttcttttggtccactcccactaccttgctagagagcagatcaacaattatgataaacggatacagaagaaatgcatgctaacaagaaatgctcatcgcttagctttaaatacatttgcgtttttagttgacatgtcatctgaatctccactgttcccgactgaaatttcgtccttctcaaccctgcaaagatagatgatagaaacttatttaggtcgtgatactcacaactaaaactaaatagaataaaagagaaagggagataaaattgctacaactgtcagtacaatgtagcagcagaagtttcagtcacagggacagaaagaccatcggtttctgaagtatcacacaattgtgatgtttcatctgcactcatctgaactcgatcaacattttcgaccggtgaagaacttccaggaactgaagctggctgcttcaaatcagaagtaagagttagtttctcaacgccctcagaggttgaagtttggcttggtagaccagtcggagctgcagtcgatgcagtgtcagaacgagtcagcacctcagaagcatcaataatgccttccgcatgaggcccttgaacagatgctatttctgcttgttcacgcacaatctggcgagaagagttataatttacacaatgggaaacagagaaactagaacacagaaatacagaagagaatacaataatttgtcttaagagaaaccttcatctcttccggcattgtccatgttgattgcttcgtaatcttattgtagtaatacctgcaaccatattaaagattcaacatccaaaagctaaagatttttattttttcatcagttgtatgttaatgaaataaaaactttagttgcatactcactttcttccatcaggacttgaatgttctttccagtcagttcttgcatctgctctctgtatcagagaatacacatctatacattaactatatacccatacatttttggttaatcattgcttcagatcacagaagaacaaatgaagaaagaataacggtccagttcaacataacataacataatctatgatattagccacgaagaataatcacaactgttgtgactgaaaatatctgaacgtcataagaaacagacattgaaaggtgtcctcccatatgcctttatttaggtaaagagagtatctagattaggatgaactatatcactactccctttcatcagatggaaatgagaaaatgtaagaactccactgcatttcaatgttgtcacttttgtgtaaccctagcacctatatcacccaagcttgcacaatcggaattctagatataaggtcatatttacattcataataaagaaaacaaaatttccacctcaaacgaaagttcaatgactactagtaagcagtaaatggaatgacgtggcacaagacagctttgaaaatccgaatgagtagatcattcctgaaacttcatttctttagctagggaagcttacagtacttcaggtgatttttcaagaccacaaacagatgagatccaaaataactcacctcaaaaagagtcatcaactcaacaggcttctcccaagtggacttctttgtcctcttgttgaaaaaatatctaataacaagcaaaaaatcaatgtcatacaccatatactcgtacaactggaaacatggagctaaaaataaacttattctacatattatatgatgagaataatatgtggtaaggttgggaaatacacaacggttgcacaatgtgcaggacaatgaatcatcaggaacacacagatagaacataaaattacgaacatcaaacacttcctctacagcaaaaatagaagtgaaatcggatgcctaaccaacaaatcctgtgactttcagcatatcaaactcgtaaatatcttagatgtcatgattatggttgcttcccactaaaacttaagcttggtaataagccactagttcaatattttcatgctaagtccagatggaagaacaaaacaagcaagcaaatatcatcaatatgaattacaaacaggtattagatagaatttgtgtaaaagaaagcaagagattggttcattgagtgaacatatcacataccattacatttaacagagctgacaattgtataccgaaatcaaagaatcaaaaatatatgactaagaaacattaaaaataaaaaacctcctcagagagcacaaaaaattccataaatttacttaataaagaaactatcatctggattagccaatgatatggtctccaaataccacacagtggtaaaaatagagaaacaactacacaaactatcccggacatatcttttccagaattagcttttgcacaaccttattgggtacttccaagttaccagcaatttgtctcgtttaaatgtcaatatttgaaatttggcatcatatgtgaaaacgcaagcaaaacaatcaaaaaagtatagataaaagtcacaagacttataattcttacttccttccatccgcagaggtatgctcaacccaatctgttagagccttttgagaaggtaaaggttttaaaaaagctgccttcaagtcgcaaaagtaaatataaattagtattcaaccaaaaaaagagtatagaaggtagttagaataaaagacatggtaacaacctttggttgttcaaatgtcggattcatgatagaagattctgcagaagtatgaatgatagatgctctctgttgtgcctgactatgaatgcttggtccagtgacttgaggtggcaccctcgaaccttcgtaagatgtggcactctgttttttcacagagttaggaactagaagtctagtttctgtaaatataaatataaaactatcttccttccttaccggataagaaaagagtgccctagggccaccaaagccaggcataccaatatctggagtttgtacataaggctgatgcaaggaggtaccagaagcaattgacacatttggctgtgaaattagagttgggggtccaagtggcacatgttgcacttgcacctgatttaattggctgggtctttcatgtgaatggtgcatggattgtaataactgaggtgcataagattgaggtggatatccaatgctcaatactgtgccacctctgccaacacattgaaagttctgagaagacaatcgagcaacttgctcagactgaggagcttgaatggtaggaagaaactgtaatgaaaatatgcaaaacacatgtagggttgagctgataaatagtcttcagatacatatatgacataaaacattacctgaaagttcatgggtggagcaaagcctcggggtaaatctatggagctagcattaggatgctggaatggctttaaaacaaaacaaaacaaaatcgctaaattagatgtaaaattcaaaaaaaccaacagaagaatataaatctacttaaatcatatatccaaaggtctgaggcatttagaaattaacccacagccagcggcctcagggtaaaagagcattggaataaagagggtgcaaaatagaacagatatatgaaaaaaagaacacactcagtatttacgcctacctgaatgccaggatattgatggttattagccatcttccagcagtattagcctcagtgaaaccaatggaagatccaccaaataataatggaaactgcacgtatatgctctatataggctcagttgaaatatggagaagaaaactagacctgtacaacaaacacaaaataggaatgaggacgtgaactagtagtagtctacatttatttgcaatatgcaagcaacaacgatacccctcgccttctaaagtttctcatagaatatccaacatagcatacaacgatttctatattgaaaaacggcaaaccccaatacaataaaaacgcaaggtataagcatggcattcaagcaggtctctgttctaagattgttaaatcggccaccatcatctgttcataaaatccatgtcttacttaaccataattctaagtgattccaaacaagttcataatttctacttgataaccgtctgatcataaaatcgagtttagaaacagataataaactgtttggattggataggtagtattaacatgttcatgatcgtgtggagtaacttaatatgccataacatgagaataaactattgaaaatgatccagaaatgaaaagtttttcaactctaggtttcactcttgcagattacttggaaacttacaactaatatataagaaactgagagtagagacgaactcattcaatcaaattctaccaagaagatactcactttatagaaaaggattgccaaaccctaaccagaacaatatagaaatgaagaaatatcccaaaacttcaaacacttctcaattgcgctttgagtcaatcgcagaattcgaacacaagaccaaaggaacaactataaattccggcgaagagagggacgaattgcggaaaattaccaaatcgccggcgaggatgaagttgaactcaaagttcagagccaacacgacggagcggtactgcgcttcacctattaaattattaaaattaaaaaaaaaaggtcaattcggtgtctttagttgggccagacaacccagtttaggcccaattggtagccacgtgtaaattttaggattatttcgtttagtttttgatcggtttagtgtattttagctcggtttactactaatatagagatacatacattctttgaaatcagaccaattgttttttagctaccgagctacctttatttctagtttggtttgataatcaacccctgtaaaccgaactcttacatcttataaaattatatttattaaattgttacaaaatacttgtattctaatctacttcactatgtcaaataacataattacaataaaattggacaaaatgtgtttttccaataacagaagatttataaaattctatttccaacaaaatatcgactatagaaaaccaaaatcgtcctatgttcaatgcgaaaaatataatgctcaagttggtcaaagggttgatgggctttcgtagatgtatgtaaggttcttatcgtatggtgatataccaaaatatttagtgggctttaataataatgtatagcccaagctcataacttcacaaatcattataataaataactgaaaaatttatgatttaaaccaaattagaatgcacaaaaaatgttatttttagaatttaggatcatgaaaaacaaaatataccatagtaaaaaccaaaatttttattataatagttcaattagaatggtgtcatgcctagtatatccaagattttatctgatttaaaatatgtataatgtatgagttaagggtaaaggaaaactatatagctactaaattaaaattagattgagtaagagctttgtttaattgggtttaaagtttaaacaaagttatacttttagtggggatcttatttttttgtcaacttaatggggttttattaacaaaaactatatgtgattgtaaattcttttaattggtttttcttttctaataaatccactaaatttctttgtcaataacataacttggatcgtttcatgattgtaattcaaaagtcttacaccgttacaagtcgatatttctaagtaaaaatatagtttacaaataatttatatcatgttgtataataacatattatacacatacatcaacatatttgtatattaatagttacgattttatcgcatatacatatagtacgtatactaaaaaaagtattaataatctataaactagaaaacgtatttacatagtcaatattaaagaaatgtatggaaacaagaagatttatttttataatgaatattatattatttctgatgaatttgatgatttcacttgtacgcatgtgtcatatattggtgtactaactaacaaaatcgaaatttggattacaatatgaatgagagacccctatacagctgcggctcgacagtctcctcacgatcctctctgtaagacagattggtcttcttcttaatcacttgacttctatttttattatattatctctcaaactctttaaataatttatcactcaacatttaattacaaccccatgcataaatttaacaacacagattcaatcatagtaccatacgtgtgggaaccagagcaaaacgacacaaagttaatacgtgtggaaagctttcgaaacatcttctttatttagcatataaacatttttagtagattaaaaaaatattagtattatttttaagatagatagaataatagtataagccagtgaagatgatgccaactaaatgacttacgtgctccactttggggccagctcatgctccaagtgatgaacagagagatagataaagattgcgtaagggaggctgcatggtattcatctctcgaccctacctcgtattattcatccaatggcagcgattaacctctttgcgtccacggtgttttttacaattatttattttataatcaatttagtttcaaaaatcatactatcatatcaaatgaatattttatcattgtcccatatctaccgactatacaaaactgccacacaccaaaaatctaaaataaatctaccgactacaaattatggagtatctcatttcaggtgaaaaacttcaacgttaattttgttatttatctactagtagtatttttttaggtatatataattcgtgtaattgtaacatatttattattttgcaaagtaacgaacaaaaaaaatactttgtttgtttgcaaaacttttttttttaatttcataaatgcaaactgttatttttaaaaactattcaattttaagtatttctttatctattctgaaatatccatagaaaaggtttctgaaataatgtgcacaccgtactaactctcatgtagatggcatgatcagttacagaaaaaggaaacaaataaataaatacaaccagtttaaatttactctgcactgatttatacatttccataaagatagcaggaaaatattttttgcctttttcagtaaaaaataaggcaacaaatgttccagttcacgttttgagaaaaatccaaaaaaaaaacaaaaatcagattaaggtaataataatcgaaaacgtttagaaaagtaaaaaaatcaaaaaatgatgtgaaaaaaataagtctgcctctctggaaaatgataggtgaggttaataaagcccactgttttggggtttgaccccacagaatctctattttattctgtaaaaccaaatatctttttttgtaattaattaatttatgtacattccccagctattttccagcctgtgtttcctctcccaattctttccatttttataccttctctcttcctcctttcttcttcactcatctcttcttcttcccttcaaccttcataatcagtggctccttcgcttattagtctttgtcaatcttaaatcgttgagtatccaaaaatcttaaactcaatggatccgtgctctttcgtacggatcatagtcggtaacttggccgttaggtttccgtcgtcgtcttcttcttcttcttcctcatcaggaccgtctgtttccggaatcaatccaacggctcctaactgttactgtaaaatcagattcaagaactttcctcgtgagattgtttctgttccggttatgttccgaactgaatctgaatccgagactcgttgctcctcctccggtaacgtatccaccgttgctgcttgtttcagtttaagtaaagctcagatcgaagcgtcgttgaagaaacctaaatttagtgttctctccgttgaggcttattcccgcggaaatagcgacggagacgacggtgttagcggcgcgtcgtgtggactcgctacggcgggtgagaagttgcttggtcgatttgaggtttcgcttgatttgaaatcggcggagacgaagagttttttggcgcataacggttgggttgctttgccgtctaagaaaacgaagagtaaaactggatccgatccggagctccacgttagcgtacgggtcgaacctgacccgagattcgtgtttcagttcgacggtgagcctgagtgtagtcctcaggtttttcaagttcaaggaaacacaaagcaagccgtgttcacttgcaaattcggctctagaaactccaactccggtgatcgaaatcttcttcacaggtcagttaaatcatcatcttactggaataattaagaaataggaacattgcctttttcagatagattctttacttaccaatttagcaaagagatgcgaacttagaaatatgtattttcatgctttgattggtgattgagatttgttttgtgatcgtatattgattttatggtttatattttgcagttcttcgatgatgtctgagataagctcaacgagaagttgtatatcgtcgatgaattcggaaaaagaacaaccgtcaaaagagagaaaaggatggtcaataacggtccatgatctctccggttcacccgtggctatggcctctatggtaacacctttcgtaccatctcctggttcgaaccgggtgactcggtcaagtcccggagcgtggcttattcttcgacctgacggttgcacatggaagccatggggaagactagaagcatggcgtgaggctggttactctgacactctaggttatcgtttcgagcttttccaagacggtatagccaccgcagtttctgcatcgtcgtcgatcagtttgaaaaatggcgggagttttgttattgatgttaccggcggtacaagcacaacggcgtctacgccgacaacgagtcctcaaggaagctgggatctcggatccggttcaagcgccggttcaagacccgcgtcgagaccaggatcaggatccgggtcggatttcggatatctactaccgcaacatccgtctgcggccgcgcaaaacagagggttcgttatgtcggctacggttgaaggagttgggaaacgaagcaaaccagaagtagaagtcggtgtgacgcacgtgacatgtacggaggatgcagcagcgcacgtggcattagctgcggcggtggatctgagtttggatgcttgcaggcttttctcacacaagctaaggaaagagctgagacagcaaagccagcttggtgtcgtttgacttgtttcgctttgtcgttttaccaattcatgagttgtcttccactcacatttttttggtttgaattttctatttttttctttttaagatagcgttaggaattagccagccatttttttgagaggtggatgtcatcattattaaaaattgttaatatctttctcagtacagctaagaaatgacagtaacaactaacaaacaactcattatctcttttaatttgcctcattaacaagacattagacatgaaattatttttagaatggtttttcaccaatgtaattaccaggaggatcatagttgcatgtaataaaagtaccaccactgttacacacaactttagcacatcccaaacgaactgtgtttttccaaacaacttgcgtgtaatgtagacaggtgccaccgtttggatcattacacgtgttactatcgtaatcgtagtactgtttctcgttgatccacatttccgcagcatcttcagccgacatttctccactactcatcgctatgttctctccaaatggtccattcgaatggactaatgcacaatcattgatcctctggtttgcatagcttgccgcatatgcagcgacctcatcgtcccaaaccaatgggtcgagcccaacctcgtttcgggcttcgttgtgggcctctaagaattgttgttgcaaatcttcggctaaagagccatagaaaagagcaattgctaagagaaataaaatgttggttttgagtagagacattgttttacgtacgtgttggtggtgaagcttaggagttaatttgagtatttatatttcaaaatttagaatagttaacaactttggattgtaacaaaaaacaaattctgttattttgtttaccaaaattaaaagaggatcatatttacataccctccatattaaaaagacaggctagtcaacgttacattctattctttgtattcattggattttgctatttttgtgttttgaatattttgtacacgtctccggtctctcttgataacgatttgattttgaaatcttcttattttggaaaaaattaaaatataatattctgctagataatcacttcactaatcagtatttatttcccaaatttattggtaatgtatccaacggatatgattcaagtaactaaaggaaataatttcttcagttttgacttttgatttcttaccgtcacgttgccttccataagtcaaatcgggccttttctagcgattctaatacatagcccaacacaaccattggcccttatgttgtttcgcctacaatgaccattttataattaaagtttttacttcatttaggtactatatttcattcaatgttcacaacaagaacacataaatgataaaaacaaaaaaaaagaaattaggacgaaaaaagaaaaaattaacttggaaacaaaattatatgctgatgcaaacgtgttggtgtgcatgaatgtaagaaaatccatataaggaaataacataaaatatatttgaatgcgaaaatttcaaacgccacggctttttttttgttaatccttccgacgtagagaacaatgctccggctactatttatcgttcgccttctctttttaatgccactagcttcatcgagatccaaccacagtgaagaagtcgagaatcttctcaaactgaaatccacctttggagaaacaaaatccgacgacgtctttaagacctggactcaccggaattcggcatgtgaattcgccggaatcgtatgtaattccgacggaaacgtcgtcgagatcaaccttggaagtcggagtttgatcaaccgagacgacgacggtaggttcaccgatcttcctttcgattcaatctgcgatttgaagttgctggagaagcttgttctaggaaacaactctttacgtggtcagattggtacgaatctcgggaaatgtaatcgcttgagatacttagacctcgggatcaacaatttctccggtgagtttccggcgattgattcgttacaattactcgagtttttgagcttaaacgcttctggaatctctggaatattcccatggagttctctaaaagacctgaaacgattgagtttcctaagcgttggagataaccgattcggttcgcatccatttcctagagagattctaaatctcactgccttgcaatgggtttatctgagtaacagcagcatcactggtaagattccagagggaatcaaaaaccttgttcgtctacaaaacttggagctctctgataatcagatctctggtgaaattccaaaggagattgttcagctcaaaaacctaaggcagcttgagatttatagtaatgacttgaccggtaagttaccattgggttttaggaatttgacgaatctgaggaatttcgacgcctctaacaactccttggaaggtgatttatcagagctgcggttcttaaagaatcttgtgtctcttggaatgttcgaaaaccgattaaccggtgagattccaaaagagtttggagatttcaagagtttagctgctttgtctctttacagaaaccagctcacagggaagcttccgaggagactcggttcttggacagcttttaagtacatcgacgtgtctgagaacttcttggaaggtcagattcctccttatatgtgcaagaaaggcgtaatgacgcatcttctcatgttgcagaacagattcacaggacaatttccagagagttatgctaaatgtaagactctgattcgtcttcgtgtaagtaacaactctctctctggaatgattccttcagggatttggggtcttcctaatctacagtttcttgaccttgcttcaaactattttgaaggaaacctcactggtgatattggtaatgccaagtctctaggttctttagatttgagcaataatagattttcaggttctctaccgtttcagatctcaggagctaactcgttagtgtcggttaatcttcgaatgaataagttttccgggatagttcctgaatcttttggtaagcttaaggagctttcaagtctcattcttgaccagaataatctatctggtgctataccaaagtcactaggcttatgcacatctttggttgatctaaactttgctggaaactcactctctgaggaaatcccggaaagtttaggatctttaaagttattgaattccctgaatctgtcaggaaacaaattatcaggaatgattcctgttggtttgtcggctctgaagctaagcttacttgacttatccaacaaccaattgaccggttctgttcctgaatctctcgtaagtggaagctttgaaggaaattcaggactatgcagctcaaagatcagatatcttcgtccatgtccgcttggaaaacctcacagccaagggaagaggaaacatttgtcaaaagtcgacatgtgtttcattgttgcagcgatacttgctctgtttttcttattcagttacgtgatctttaagataagacgagataagttgaataaaacggtgcagaagaagaacgactggcaagtgagctctttccggttactaaactttaatgaaatggaaattattgatgagatcaaatcagagaatatcataggcagaggaggtcaggggaatgtttacaaagtaagtctaagaagcggtgaaacactagccgttaaacatatctggtgtccggagagttcccacgaaagctttagaagctcaacggcaatgttaagtgacggcaataacagaagtaataacggagaattcgaggcagaagtcgcgacgctaagcaatataaaacatataaacgttgtgaagttgttctgcagcataacgtgtgaggacagtaagctgcttgtctatgagtatatgcctaatggaagcttgtgggagcagctgcatgagcgtcgtggtgagcaagaaattgggtggcgtgtgagacaagcgttagctttaggagctgctaaagggctggagtatcttcaccatgggttagatcggccggtgatacatcgagacgtgaagtccagcaatatattgcttgatgaggaatggagaccaaggattgctgattttggattggctaaaatcattcaggctgattcggttcaacgagatttctcggctcctcttgtcaaaggaactcttggttacattgcccccggtatgtagaatcttcaggttttcttctgaatagccatatgacattaggtcaacatatctttaggtttcttgcttatcaaactttaaattcttccatttcaatccacagttttataacacctgtaaattgcatatcatttctttgttgttcacagaatatgcatatactaccaaagtgaacgagaagagcgacgtgtacagcttcggggtggtgttaatggagttggtgacagggaagaagccgttagagacagatttcggcgagaacaatgacatagtcatgtgggtttggagcgtgagcaaggagacgaacagagaaatgatgatgaaattaatcgatacgagcatagaagatgaatacaaggaggatgctcttaaagttttgaccattgctttattatgcacggacaagtctcctcaggctagaccgtttatgaaatcagtagttagtatgctagaaaaaatagagccttcctataacaagaacagtggagaagcaagttacggtgagagtgctaatgatgagattactaaagttgtataactcatagattgcacttggttattaatcgagctaaggctcaagaataataaattcttgattggttttatacttaaaaaaattcttcagagaaagattctaagaccattcaagagttttgtatcatcttcatctacatggacaaaaaagaaagtagtagttgtaaagggttagtgtaaattgaaaagccataagattttctatgataatactctttaaaaataattaaaaagataaagcaaaaagccatagttattaaataacttacagacgaacatttataaaatacatcgcaacgataggacatgcatgatcatcacaatcacaaagatcagagacatcttcagatgtttcttacataagttttgtatacacacacacacatatttagcatcaagttacagtttcaactttcagccctggcggtcaatctccaccgtccatcccttggtatcctcgacccgacccgtctggatatcacttaacgtctcgtatagcttcgcagccaatgtttcttcccctgttttgaatccggtcctgtattgagtttatacattcaatcatttcagtcaccctaacttatgaaaaaatctaaaaatagacattttggattaacaaagggaagaaagtattactttttgtctttaaaggttacggatgcaatactagtcacaatggaagcagtgccagtacagaaagcttcgtccgcatcgagaaagtccactagaggaatcgtacgttcctcgacctttatacaacgtgaaagaccaaaaggaaattattatacatgcatgatgaatattattagtaaggagatttttttcgcaaattacaagatcaacttgatatatgtatgatattgaaatattccaacctggtagccgaaatcacgacacaattccattacgcagtttcgagtgactccgggcaaaatagttcctgcaattgttggtgtcgatacaacattgccctatatacaaaaatatcatcacaaccatcttaatattctataacacatgtataaacctcaacatgcattttcaataaatttgtatatttattttttaccttgagcataaaaacattagctgcgaaaagttcttcaatgtttttgccagttgcagcatccaaaaacaaaatatcagagaaaccttgttttttcgcctctgccaatggtatccaaaccttcaacgagaaatttttccattacaatcatttagtcatgtaattatgaaaatttgatgtatatttttaaaacttacaggacaatagtttgtgatgctcttcacaccaccagttccactaggaaaagctcgacgaaactgatcttcgattttcagattcaaaccagagttatcctattccaaacaaaaatccgaaaataatcaaatttaacataatggttttcgttaaacaacataaccctttaatttaaaaccaactctcaacaagtaattgatgcatgcatgttatattacgtacttggaatcccttatattttcatatgtgaacaataaaagaaaaacgacaagaacactagtcaccttatgataacgtccaacaggacaggcaaaagctgtgaaggtggtctcaggaatgggaaatgaaccaagaatcggaccactcccaaacaagataggcctaatatacaatgttcctttccccggaggaggaatctgcgtacatatataagaaaaccccattgattatatctttcattttataaggttttattatcttgacgaattcatacaacaatcaatatatataatatacccatttcttgttggcaagagcaacttgtttgatggcggagacgaattgatcgaccgaaggataaggcatatagagtctgtcagctccggcttgaaggcggagaccgttttggtctggtcggaatagcagaatccgaccatcttctgtcctgtaagctttcagtccttcatataaaccctaatcattcccaaaccaccataaatattccagtaaattagtatcaaaccattacttaagaattgttgcgaaactagatcacatacaatgatttgataggaatatcaatactttcatactattcggttcgttgatatacattaatacatatatgtacaactatttcattttttcaatagtttatagctcaaatatgcatacaatatagttgctaactcaatagtatactatgtaattatatttatgataattagctcaatcattttattatcagtgagaaagctatatattcatgtgttaatagttttttctgtttcatctaataacgatctagatttatattcattcttttaagtcatatataacaaacctggccatactgaagaacagcagcgcaagggttaagttgcaaatcagcaaaaggaagaatcttcccctcttgaaaactctctccatgattgcacttcgcaacatacatataatccgtacgaacaaacttgaatgccaactcttcccacttgacattcgcatatttttcatccgaaacactgtaaattttgataaataaaaaaaaacaaaaaaaagatcgccaaatcatatttcatactatcagatttaaacaatataatttgttcgacgatacagaaatattttacctcacaggaagaggttgcgcagaaggagccatggatgtgtttgttcgagtcgagttgctttgttgtaagtaggtaattgcaagaaacttgagttgtctataaagctttggaatacttctctttatatatacgtttacaacaattttttttttttttttttttctatttttacaacaaattgttttttattataataataaacttaaacgaaaataaataatatctctttgttctatttcttaaaaaagaaattagcttgtagtacttcaacgtatcttaactctttagtctttagtaggtatatatcatctatttatttatttttattttttttatattacgattatagtgtacgtacgtatttattaatcaaaaataacttggtagaagtaaaaagaaaatgattttttttttactcagtgatcagttttacgtttattcaaaaataagttgtagtttccttcttaatattcaagttatatgactaaaaattggtcggttaatttactattaagattaatcggaaactctagttagatcacgagataatcatcacgtggagaaacatttggttcttgtcacgtggagaaaacgttaagcttattttttacttctttattatatttttgaggaaatggttgaaagaaagagagtgtttaaaatgtgaatgcgctcgtagttaggtggaggttaatgggtaggagggtaggtcatatgtgtattagtgatggataaaaattaaaaacataaaaaaaacttcaagctgtaaataatctaataaaagaacatagaaatataatcaaagaaccatttaactaaataaatactttcgattcaaatagcatatttctaagttccaagaatagctatcctctatccacatgttacattttttttttctttttcacatccatatagtttttaaaataattttctagatggtattttttattcgacatttttttttccttttagatttactgattataatttatttagaaataaatgatacgactgtcgtttctacaaaactgaaatttgcaaacattggaccaaaaagcgaaaccttaatcacttgaaacgacaacgttctttagtatgtttttggacatacaaagtacacataagatgttccctcactcttcgattgtttcttaacctaatataattaagcaatattgaacttgagtcactcaatgctgcaccgaaggagcctttagattttgagcaaattcatgagagtttagcttctcattcatcactctgaatttctcttttatcctctttatctgtccaaaacatgacacataacataatgttagttctcctgcatacttccaatggcaaatagaaaaaagagacattgatcatagaagtcagtttggtttacccttctgagctcgatctctgtgctccgtttcttttgatcaagtgattgccggagattcgtgatgtcgaagatactatcgaggtcgtcttcaaatgcgttttccaactcttcccggagaagagcaggtaacttatcaacgatgggcattagaagaaaacagttgaactgcagaacaaaagaaaacacagatacaaactttttaaaagaaaagtcattttaaaagcaagaagaatctgagtaaaaactgaagtaggagcaaacctttaactcagcagaggcgagaaagtactctcgtatgccctggaatatctgttggaccaatgcgtacacaattctctcagaggaaggagcaagcttgcggttccaaagtgtgctatctagaagatcagccaaccgcatttctgttgtctgaatactggaacctgaatcgatgtttgaggcgagatggcttagctttacatctgatcttgacttggtgtctgttgtgccacctaatgcatcttggggaagactaaatcctatggcattacctgatgtcgtattatgctctgttccaccaaatgagtccaagaattgacgtagaccagctcggttctacataacattgagaaacgaaaactactcaatcagaaacggatacttgatggtatgtacacaactcaattggattgaaacagagctatagggctgtagcaatgaccttgttgtgaagagaccatgtaacatagcgagttgtacttgctaaatcctccatacatctgcaaacaatataaaatccaaagggtgatcaatcactaaagctcactagaacacaggtaggaggcaccgacatggtaagaacaggaattggaaatagaattacttgtcacgacatgatttttctgtggactccacaaaactgttgaatgctgaagcaacccgcttgagaaacacctcatgcccacttaaatattcaccttctttctattcaaatttagaacatacatcaaaaaatttgctggaaagggatcatgagtatgataccgtcaaaccaaagaaaacagtacctacctgaagaagatatacagaaattggaagcaatctcttgagaatgtgtagaagcctcgcccctaactatatcaacgcaaaacaaacgaaaatgagaactggaaaaaactttctgtatggaaagagaaacatgtgaataacaaaatttcagatgaaagtattcccaaacatagtttctgtaagcagaacatgtttactcgataactcttatgcacaaataagttccagcaaatctcaaaactgaatggtagtatgatttcaatatataacgttatatttcatttttttttttacgtacagtacaccttaactaattagtaaaattgctttccatcctccacgaaagaaaaagaaaaaagtagctatatctatgtcacctgatgaaggaaaggttcaaacgtctcacgagccttcgcaactgctataacacaagctgttctacaacagcaaataagagaaagagaataagaggccatagaaaacatgacaaacgttgcagctcagattagatactgaaaggggtctgggatgcaaagacaataaattgagaagtgtgttgcatgtcagtcaatcctatgatacctggaatagtttgttccatcatgaatatcctcaactccacatgcatttacaatttcctccctcgttattgggggacatttgatagcaccaactagaaaacgaaactcagccatggcacggtgatattgtgcacccccatagagacgcatccctgcattctgtaaaatgaaagataatctggttatggtctctcataattcttgaaggtccaacgaagtatctcttttatttgtttccaatacattattctttggcacatatgtttcatgcggtcaaatttatcttccatcatattataatccatgtacaagaacaagacaactggatttgaagaccatgcccagcttgctctataaagtccaacaatattctgcttcagggaaagacttaccggtattagcttatgtgaaaactggagaccatcagtaccaacaaatgctcctccttgtgtcctttcatcttgcagtgtctcacctgaaaaacaccatgagaaattattaacaatcaaagaacccaacataaagagaatgctgttataaaatgtgcttctgccagtaaccaaagtatcatgaccaatgattgattgattagcatacatcattccatgtgtaatcatcgcagtctggtgacccagtcgaattgaacaatatgcatttaactaaactgattttgcaaaagtccaatttaacaacacccagaaacaagaaaagtttatgccaaagaagttgactagcagagaacagagcagtaacattaccaaatttatctggaggggccacaactgttcccttcaataacagcgataactgatcaagaaaaatataaacaaaacaggtgagaaaacacagcactgatcaatactaacaaaggtacttcgtacgtcaatcagaaaatatgacgcagcaattttaaagtcttaagggcatccaacacaaaaagtttacagccattctgaatttgtagcaagtcctagatatcatttactgtagcataattttatatgtgtcagtaatcaataaacaaatttgtttttatgtgtcagtagttaataaaccaaaaaaaaagagaagtttacacaaatgaacttgttgtaattatacaaaaactattaatccacgagtccaggcaaaaatgaaaaggtatgggaaggtgtaaatagaaatctaaaaaaacgaaatgctctctacagttaccttggttaagaagagatcatggaaagtcctgcctctctctttgagttttgcttcatccaaagagctgcattgaaaggaattattcaacctccaatgagttatattttctataaatcagtagctaacaattaaactgcctaaaatcaagtagacattttcagacaaaacaaattgcgacctaagttccttgctcacggtatccagctttctgactgtactgcggtactcctttcctaacagtggaatgatcaatggaacactctctttgtacctggaaagagaagggcatcaagactacagcgaaaagtaaactacaatagaaacagaggctggaaaaatcagagttaaaacaacagttataccttttccagagtagttcttccagaaacaacctcagtttactgatgccaatcctactcttttcctgttttgtcagtaaacggcccaacttcttctctaaagatgcaatgtcttccatttctctaagtgacacagcctgtaataaaaaccacacatagtttagaaaaagacctgtttaacttgtttaaggaatcagacagcagagcagagacctgtttgaactcgtcattagacttatacactgaatcctgtccatagccaactcttccagaaggcacagacgtgaaaaaaggagaatcgcccaataaggagctgtcaagtgcgcttgcaggaggtgagagaaagacttccacgtcagatgaacatgagaattgagggattttagtgtcaagctttgtagaaacaacaattgtcctagaaagctcaggatcaacctacatgaacgagaaacaaactttaacaaaaataaagacaaggttagacgcaatggagttacgtcaagcaacgtacttgcatcactatccttcgagtggttgcaatgctccagtcactgctatcttcgaggcataaaatgatgaactctttgtgttgcatctttgctcggactagagcttccacagcccgtgcttgaacctaagaaaaagaacaagtaacccactctcaaataaagcaaaaccaaaacatgaaatcagccacggaattggctggaagccataagaaaaaacaacctgaagagctcggtttttcagtcctggtgcaggagcaataagtccaggtgtatcaatgatggtaaggtttggacaatacttatactggactttcacaataatctcctttgcagagaatgggctacatggctcttgctccagcctcatgttctcagcctcaatatatgcctaactccaaatcatataacaaatttcgttaacatgagcatttcgcttctctacaataaacctaagtacttgtgtttctcaacattcgtcaaaatcttcccagaatttatacgcagaaacaagcaattgaagaagcacaagtaataataataacaaaacacctgaatttgtgagagagatttgggaagagaaacggaaggatcatcatcagatccgagatgacaaagcgggaattgacactgaggatcgtacttcatatggagagtaatcggccgacgagtcttggttccgccgccgacatggttaaattgaaaccccataagagcttccacaagcgcacttttaccgtcggtctgctgtcccaccacaagaaccgccggtgcttcgaacggcgtctccaattcctgcgccaaagcgtgtaactcgttgtaagcttcgtaaagactccaccgctcctcaatcgcagcgtcgtcctcttccgccatttcctcaaccgtcaccgattttgctgatacttccgccatcgtctcttacgaaaatgagcaagaggaagagtaagagtaagagagtgtctcttatttcttctactctttagttttcgtcgccgttcctttttccgccatggaattagcagatacggctaatttcaatttttgtcaaaagaaatattttttgtgttttaatctcacgcgcatccatggcgcgttgagtcaacgttgtaatagttctccgctaaatttaaataaaagagcgcgtaaggagagagtttaaggattttttttttttggtcggcaaatacaaaggatttgctttgtcttgaccaatagtatatgcagaaatattatctcaaaggatttgtgataactatgtagtacagaattgtgattattggatgagaaaccagaaatattttgagcaaatgacgacttgttaatttactattttttcatttcttaaaggtctctcttgtgtaactatgattaaaattgaaatagtgacttttattgttacgacatggaacaaatcaacgagttctattgttaaagagagacattgatgaatgtaacaaaactgtggcttagaagccgaaaggagacttagttcgggtccctccttcaccgtattgctcgttccattttctcaattcgttcattgtcgtcgcgtcgtatgccactgacggacttacctgcaaattacattacaatgacgcaatttcgataatgcaaacaccaggggaaaaaacatgaatagagatgatgatgatgttttttaagagattgatcaataccttagctttggattgaatgaagtcgtccaaactcagtggtcgtagatcaggggacgcatttgttaccgagtcctgataattcgacgtttcaaaagcatggagtgagtacaaaaattatttttcgtaacaacagaaatcaactgtgtgggtttatgcatgtccttaccttgttttcttcttgtaacaattcttgaacaggtctgtatgcagctgctatgcatagattctgcaatgtaagaaaagaaaaggaatcagaactactgtgttgaatcatactcgaacttgtaaatgaaaccccgaatgaccaaacctttagatcgcttcctgaatatccttcggtttcctttgcaagtttatcaaactcgaaaccagtttcaagattttctggtgtcagaaatatcttcaatatcttcaaccggttttccgcatctggtaaatccacatatatcctataaacacaagcctcaatacaattatcgaaaagatacaaatattccaaaggagaaattacttgaaagcttaaattaccgtcttggtagcctacgaatgacagcgtcatcaagatcaaaaggtcggttggtggcaccgagaatgagaatcctttggctatcttttgatctgagtccatcccaagctgccataaactcatttctcattcttcgtgttgcctcgtgctcaaaagcaccaccacgagcacccaacaaactgtcaacctatacgacaacaaaataaattacagttagtccttgagtaacacattttacgcatcacaaaagtattcctcataaaaagcaataaccgaaattgaaaagtgatataaagctaaacaatttctcacctcatcaacaaatataatgacgggggctagtttgcttgcaaaagagaacaaagccttcgtgagcttctctgcatctccaaaccactgtgccaaacaatggacgaaattgacttaaatcagaaccaatcagaggtaaagttggaaagagatttactctaagttacaatcggcattgacaataataagtcgatgaccggggtggaaaagtttttcttatgtcattagatattctccttatttatatgaagatgtttacaaagtggaatatcaacgtgacagtgcaaacaacatagttttaaggttccatgtacctttgaggtaagcgttgagccagttatgctaatgaagtttgccccagcttctgttgcaagcgccttggcaagcagcgttttacccgtacccggaggaccaaaaagcaatatgcctttacatggctggaaaaaacaaagacacacgcattcaagaaaacccagacgagaaaattccaagtccatagtcaagaacataatgacatgtatataacagaatgtaatacccgcaagagatttccacgggtgaaaagctctggccttctcatgggaagaataactaactcatttagtgtctttttcacatgttcaagagcaccaatgtcgtcaaactttaccccaatttctccaggagcaaccacggctgagacaaaattggtttcaaactcatccttcgcaatattctgcaaaaacaaaaatctctttttaacataattattactcagagttttcagcagccaattgccagactaccagaggggggaagaaactaaaccttcaagttttgtgtgggctttcgagaaatatcttcttgtgcctttaaccttttaactgaaatctcaatgcttcaaaagaggaagacaatagtaagatataagaaaatcaaagataaatcatagaccccaaagatcaatcaacaaccatgccattacctttcacgggggagaatcaggcggccctctttaatcgatgggctaggacaagaagataaatagtggtttctggcccaaccgataactttctccgctcctgcagaaacaaaataaacaagtttctgagctctcttggtcacaatataagtaattggggtttcatcacagaaagcaagaactaaaattaaatgattaatcatataggagatgaccgatatcaaggtcaatcacatggaactgcatcctatttcatgtaatactagcaacaaatgagatacataacatacagttaaggcatgcttgatatcctcaatcagcaactttaacatacttaacaatgctaagacataacgagtaataacatacataataaaccaggtatttcataggagttacacactttgctttgtcaatatcacgccatcggtgttcacttggtacaagtcagtgcacaataactcgttttcctcaagcgcctgggttaaaagttctcaaagtgttacaatggttatgataacatcgcaaattgactccatttctctaacggaattcagtctatgtctatgtaccttaagtagctcatttaaattgctccgtgacatcacaattcttctatcttctccaagttgtttgttgaatactatgaggttctcttcttcctgcacaaaattagaaaagaagaatacaggtacaacattgataagcaagaagtgctgaacaaataattttcaagaagacgatagcagcatgagctatgtaggcatttgcatcccagatattgattgcagatgaatttaacattttccaaaaggagactctgaaggaagtttgcatatattttctcatatttcaaagtcagaagttttcaaatagctttcctactttctcctaatgtcggtaacgtaagaggaattagcagaaatattttctcaatagacattattagattcgaaaccagtctaagtctatatgcaatgtcacataaatatgaaaaaacacatcaatgcaattctcatcggttatccaaaaccatgaacggaagttattaaagtcaataggcataccttaggagggactaggttcataacattagtgaagagcttgtatatctcattatcctctgatgttttccttcccgtgagtccctcagtgagacgcttcaacggaaggggctgtaagacacaacagcatctatgataaatattttggagtgtagtggctggaatttatcaaatgcagaccaataaatggatgtactataatgtcaagaaagtgaagcaaagtatgcaaatccacattcagagtcttgcacatatgaagctagttttaccaaaagtatcaaaatgcgactgatacaaagtcaggactatatgcatgttcaagatgttgaataaattgagttggtgtgcatacgagaccaaaagttttaaaaaattaccacaatagataagtactaagactatcaattaacgttacttttaagtttagctatcataccagtttcgcaagacggccaaagtttgggagtatcatcgtctgttcacaaacaaaaaaggtcaaaaaatgaaagcaaacaaaaagaagagccaatgaacaatgacacgtgagaaaggcttacaaatttctctctctcttttgagcctgtttcaatcttgtttcgtccacagatcattacaacaggacttgacaatttatcaaacatttcctgaactttgtctacaaactcattttgttttgacttaggtacagctcgagacaaccactgggacgagtcgggaaaatagacaataagtggttgtgtggagtgtaaaacctacaagaacaaaaaaaagaaagaataaattaacgccatttcatgttgtatgttccttggagaaagtgtaagctaaccgcattcaaagtcaagctactctagacttcaaatcttagggaaatgatatcataaatttccagcccaagaacgcagcatacgctgaacaatccatatatgttaagtttcaaatcaaactaaatatcatgagcacttactactgctggataaatgatcagatctgaacttatatataaggccaatgtacaacgttagctgaatggaaacacgaaaacataatgtaacttccacacatacctcacttaaagcctccaaggcgatatagccatcttctgcctgcatatccaaatcatgctttaggtctccaactgcgcagacaatatgtaagttagctgcatttacataagatgtcaatcgtctacaaacagggtatttctccaaatatagagcaatcacacatcaaccatacagaacgccatgaattaaatataccatctatccagtgcatatgtagcttatgagagtgttctgttgatttcttgtcacctccctctgatgatgtatcacctccaatgtcaaatatgactgcaacacgattcccattcacctcatagacctctccacgttgtccactagataatggcctgtaggtatagaaattttggttaaagacaaaccctagggcatttacaatccttcatccataatatttagcatgccatggaagtttataacttccagagcaatgagttcaaaatgtgttcctaaaagatcaaatgttacatttgcaggcatgtcaaattgctgagaaaaccatggatagtgatgataatggtaagcacgcaaaaacaagtcatttagttaagcaaaggtaatgcgagttgcactgttcacaaataaatgaataagtcctatagataacaattgtggcagcagtttcatacacatccaatcctataccagaactactcaaattactactaatatgaataggcagagcaagcagagatcaagtcaaataatatgagacagagtcataaaagatattagagcgtaatattcttcagcaaggttagagaataattatcacacaagtgaatcagtaaactacctgtgctttgcatcagccttcttagaaggtccaacatattttacacgatctcctgcaaaaagcgtaaacacaaatagaaatgaggaaaagtgaaaaaattgaccacacaaagagaacttagcagtctgacaagtagaagaggaaagagtgaaaggctaagatagaaagacaataccaggaaaattatgactagatagaatacaaaattactaaatcaaacttatttagcaaactgatacattcaagtgtacctagcacttgtaatgatgaagatgccttccagagccttgatattgatgattacctttctttgccggtcgcctggctttatcagaatgctcaacagctgctgcttcgcaagcttcaccatgtagttcttctgctactagctgccacaatttagaggaggtaagcaaatttcagcaatttctgaaactcaatttaattggaagttcaaaaaaggaacaatgcaaagagtcgcatgtagaaccaagaaacagcattcaaacggcaggaatggtgaaaccttctaattcatgcatagtaactctaataacaagttcatacaaataagataaatcaagaatcagaaaacttatatgacagggtcccaagatcacattgtccacggggtatcgcaaaaagaaaaagaaataccatggtattaccaactaaattaggaaaagaacaatcagtacagactaaaatttctgaatctcaattaatgcaatcataccttttcgaactcttcaagttttggcacaattttcttgatagcttcctcagaaacctcgagacaagcttcctcactgtcactcccatctgctttcgcttcagaatcctcttcgctctgagcactagaatcttcctcagcatcagactctgtcgtggattcatctgcttccgcttctgcgttctcaccatcagattcagattcttcattgtagtcatcagcaaaatcctgatccagaattaaaaaatattacataaacaccaaaaagaacgaaagaaaaatggtggcatgttataggcaaattactcataagaatctcacatatggggcaagaacgctgctgtcaagaaccaacaggggaacttgtacatctcgagcaagtgctcgtaccaacctctcccggtaaagctcagtacctgaataaaattcaaatttcttattggtcatctaacatttcctcaatatttttacttgataacagaagagcaacatcaaatcctggtctgccatttttattctatagtcaataacaaacctggaacactctggagcaatattcttccacttgaagaatctaaacgggcaccatatatggaagcggcattcttttgtcttatatgtgaggtaacacattccaccaaaatatctttcgtgtggtcgctgtgaaaagataatgagcagaatccataagcagaaatggagaaagaaacacaacaagcgagaaaaaaaaacatgttgtagattattactggatgtagtaagggaaggtctcccaagaaagctgtattttttcccaaggttggattctccgtaagaactcgtttttgaatctttctcgtctattaacgaaaggtgactccttctttttgcattcactagcaagcttctcattattgagccattctatttggtcttgttctccaagttgagcatgagaatccaaatgcccaacaccgttattacttttctccttcccggtttttccatcatctacaccattctctttgttcaaagagatatgtttatcctcactagcattccttccatcaccctcagaactaaaactacgcaactggctattcttcaaaatacttaaatgatttcccgaggcaatagtaccaccgcggggagaaaatgaaccaagtagagactttcttgtcaaattttcactattggttaatttatttgtgaatccacaatatctggaaaccgtatagtcacgaacgactggcctaactaagtacttggcttgctgcaataccaaaccccatctctggttcctctttaatgcccttgtatacatcacaaagtcccttctcttccaatataactacaaaaaaaaaaacagagatcattgatttagaatcactttcagggtccatttcttgtactatccaacctaaatgcattgcaacatgtaattgcaccattaaaaaaaaaaaaaaacgagatcaatatcaacgcaaaacatactatagtaactcggaaagaaacatagattctatacaatttatttcgactagaggaataacaacacacttcagggaattaattgattaagaacagacatcaattaaaatgaacgattatgacgcataacggaaaatccaatgtaacaacgaatatgaggcatcgatatagaaatgatgatatattcagcttttgtcatccataactattacaaaacacgaaccgtttaacagagatggacaacaaaactggttctattcatcccccaagctctaagaatcaggcttggtgcaaagaggagatgtaattaggaacgagatagggtgaagaagagagagaaaatcccgacagaggagagagagataaagaccgatctaaagtctgtaggttcttcttctgaagctgaagctgggttcgaagttcagcttcgttgatgcagtgttgtcgttttgacgcaaaattgctacttgccttcctatggatatgggcctaactataaaggcccactaaacatataagagtcggtattttcctgacaaaaaagccctaacaagttgtcggatttacaatcgtacccctatttttaagccgcgcttatctcgaacctatacctgtagagaggaaataagcatttgggggaaatcaatcgaaaaccctaggagagataaaaacaaaaatctagacggagatttatggcgacagcgaatcctggccgtggaggtggtagaagaggcggtggagctatggatgacgataagttggtcttcgagactaccgatggaattgagcccatcacgagcttcaatgatatgggcattaaggaagatgtgcttcgcggtgtctacgaatatggattcgagaagccttccgcgattcagcagagggctgttatgccgattcttcaaggacgtgatgttattgctcaagctcagtccggtaccgggaagacatctatgattgctctctccgtttgtcaagtcgttgatacttcttctagagagtatgttttctgttcctttagctggattaaacccttcatttcaattttgaactttacttgctttgctcggattgttctctaacctaaatcattaggttttgtttcttatcgatttcacaaatttggtgggatttgtttgtctgacttgtagaatagatgaacgaattatgattcattaatgttcaatcaaaatgacaatgaaaatttgtgatagttattagcttttcggttagagtgattgagtaatactttcttttaggctgcaagatctttttatatgtgtactcatgtatttggtatctcggactgcagggttcaggccttgatattatccccaacaagagagctggctacacaaacagagaagacgatacaagctattggattacatgccaatattcaggcacatgcttgcatcggtgggaatagtgttggagaagacatcaggaagctggagcatggtgttcatgttgtgtctgggacacctggtcgtgtctgtgacatgataaagaggagaagtcttcgtaccagagctattaaacttctgattcttgatgaatcagatgaaatgctgagcagagggttcaaggaccagatctatgatgtttacagatatcttccaccagatcttcaggtgcaatttcactgctcaatattatgtgttggctaacttctagtttctttggatgttattgcattagctttcttattttatggattggcttcttgaactctatgtggattgagagaattataagttgttaaaaaccttttagccactgttaagttgcttgaatgtcttatgtgtagatttggtagctattatctgtattatgaacagctaaattccactctataatagttcaatcctaatacgttttttttgtaggtttgcttggtttctgcaactcttcctcacgagattttggagatgacatccaagtttatgacagaaccagtgaagatacttgtgaagcgtgatgagttgactcttgaagtatgtttcttcttatgcttctgtatgctcgttcatgtttacttttacagtaggttgacactcatattcttcattggctatctttttgtgtacaatcttttcagggaatcaaacaattttttgttgctgttgagaaggaagagtggaaatttgatacactctgtgatctttatgacacgcttactatcactcaagctgttatcttctgcaatactaaacgaaaggtaattgtggttctcatgcaactgtatctcaaacttgttaacattaagcttctagcactgctatctgaacttgatttgcaatcttgtaattgctcaaaaattcatactatcttgtgaatatatgtatttctttatttctaaaagaaattaacaatataagtccactgcgctagagtacttgcaacctgtactcacctgcagatatctattagattgcattggcttttaaaacctttttcaatgtttcttgtaattagggttcttgaattatggttccttttctatattttactcaactctaactccgcatttgttataggtggattatcttagtgagaaaatgagaagtcacaacttcactgtctcatcaatgcatggagacatgcctcagaaggagagagacgccatcatgaatgagtttcggtcaggtgatagtcgtgttttgataacaacagatgtatgggcacgtgggattgatgtgcaacaagtaagtcattacttatccgctatattttgtctagataacaatgcgcggaataaattcaatctctgttattgaggtctcagattatgttccattctcttatggtaaaggtgaattgacatgacaatctttatttaacaggtttctcttgttatcaattatgatctccccaacaaccgtgagctctacatccatcgtattgggcggtctggtcgattcgggcgtaaggtaagaaactttttctaatctctgcttctgagcttaatttcttagcctggagatactagatggatatcttttaaccaattttgcggttatctttctagggtgttgcaatcaactttgttaaaagcgacgacatcaagattctcagagacattgagcagtactacagtacccagattgatgagatgccaatgaatgtagctgatcttatctaaaagagcttgtctgagatttttgtgctttcagcggggaagtgtctggatgaaaaagtattgttgagcgcttctgtcaaattattgcactatcttaacggtgtatttcctttgatgtttctgtgggctcttttgaacaaacttaaactcgcgtgtggtaaatgtttaatgacttgagaagcgatttaggtttagggtttggaccgtttggtttttcgtttcctcgtaattgattctgggggctttgattgtggtttgtgggtcaaaactctcaactatcactacttgtaagacttttgctcgacagttgaaacggttcattgttatcttatttcgtaaagcttggatcattgcaaaaatcaatcatttgcaaaagcaaagcaagttgatgaaattactggacatgacgtcgaggtttttcgtatcgtgtgtttcatttgacggagtcaggtgtcctcgctcgttggttgatgggttgggtgaaattgatgaacgaaacccaaaaccgggttaggaccgaattagattcactaacttaacaacaccaggaccaataaccggaacttaataaataaacgaccgtggttttgtttgtttattggtagtcagcgacacggaactcattaactttactcttctcactggtcaatcgtcggagataatcgggtgatcggcgatggagaatacggacgtcttcttggggctgcatgatttcctggagcggatgcgcaaaccctccgccggcgatttcgtcaaatccattaaaaggtcccatttctccctcttttgatgcagatccggatatatgtgtgtgtttctatgtacgatcttcctcttagcttaagtggatgtgcttcttagcggtttacgtttttaagtccattttcagttgatgatgatactatttgagcaaaattcgtactgatttgagatttctaatcatttatttatgcttcttcaattgctgttactggggaagacaattg

SEQ ID NO: 57 - DNA, 55161 bp, Arabidopsis thaliana
accgtatacaaaatgtaaccaacgacagtagatttttaaaacggaagccagttttgtattaaaatagaattacataaaactattgtattggttggtttagatttcttcttctctttaaaagaaaaaaaccaaacaaaagccacactcaagtgtaccaaataaaaccaaaaccattttgctatactcttgtaaacaacaactagtaacaaacagattacaaagctatttattttctcattaatcttgaagaagaaactggtgaagcatgtatcgcatcgaccagattttacccagaaacagatcgcacgtatttgacatgtctgcctcacacatgttaccacactcaagtcagaataggtgactttgttatatcctgagagtgcaaaaaaatgtgcatgttttttattgaggaaataaataaaaatagagagttgaggatgttgttgggttcctacttcctagctctactttatatggtgatgcatttttttgtaggtggagattttgggactcgtcatcgaaattttggtggttaacaaatatagtatatcatctaagaaaattcatttataatatagtgcattctaagaataatataaatgcatcatcatattcctaagagtaataaaacaataacaaaatgcaaaaagataaccttgaatctaactggaaacatagaacttagcagctagagctttcataagtgtataattaaagctatctacatcagtttccaaaataggagttatttgcaactcagagcatagaaccaagactgtgtatgagtccagacatttgaggatctccgggtctctatcataatcctaatttcccaaagaaaaaaaaaaagaagaagttagattcatgtcgctggactttttgaacttaataacgtttgcaagtaacaaaaacaagaaacttaataacgtcctcaccttttcagttaccacaatgataggcttgcaattagatttgtgttctagtccctttgctctcctactcatagtttcaacatcctgcacttatcattatgatattgatgaaagccaatttgatttagtaaaaataattttttggcagtgaaacaaattgggaataacacatgaagaatagctatggaattagtaacctctgcttcaaataaatgatgatcactgaaatcaagtctatcaacataatgtgctccagtctgtcaaacatatataacccactagtcagcatagcagaaactgaatatttgttacaaaatcaagtgcgcatggaactaggataataacaacttaccatctcgatgctcttgacaaatgcatcagcggatccaattgcggaaacacatagcacagaggcacagcgcaacgcttctaaagctacatgtgacctagcatttttaacatcgaacaagtatttgggcaccatcttggagtagaaaatcggtatcgactttttgaatccttgtatcatgttctcaatatctctgaggctttgtttagtaatctgcatgatccaaaaccactaacctcaatagtcatcaccaaaaagaaaggaaaaaaacaagtataaacttgtaaacacaccaagtccacatggtgtactacagcaacatctgcccgttcaagcgccagaagaggttctcgtaaaggaccatgaggcatcaaatgaccatttccccatggattcagcccgttaagcatcacaatctcgagatcacgagacaaactccaatgctatgtaccaaacaagagagcacaagtcttcaaaacagcaataaacacaaagaaggtgaaaataatctcataaagctagaattttgtgaatataaactagagaatatacctgcatcccatcatctaatatgatacaaccaattttttcagaaatggtccaaacttgtgctctttcatgaagatcaaagaatgaccttaaactagaagaatctacacaaccatacttatccaaaaacaaagcagcagtagctgcccggttagccccaacgccaatctttaccggtccaccacgaagatgtctttcaagcattttgacttcatctccaccagcataaccctgacaatatgtaagagtctaagtacacacacaagcaaacactccaaaaattcaatggtaactatacatactagttagaagaatgggaattacacgagtgagaataagaggtgtaagtccagaatcaacgaggaattgagaaatgtattccaccattggcgtcttcccattacctccccagctcagattcccaacgctgatcaccggaacgggtaatcttcattcccacagatcaaattaagttccaggaatcgataaaagcattattcaattgatctctctctcgagagagaaaacgcaccggtgtttctgtaagagtgagtagcggtagagagagcggcggatttggagagcgactccgtatagagacgaagcgattgttaggaagggaacgagagaacggtgaagagcaggggaattcgtatggactcgcgtgtaggcgatttcgttcaccaccttcctcagcttctccatatgcaaattctgactctgcaactacttactgtacgagattctgactctgcgatttcaactactgtgtactgtatgtaaatttgttcgttggccaaccgtttttagttcaaattcagtctttcggtttaaccattggtaaaataagcaaactttgtgagatcgatctcatggatcatattcttaaactttatttcagactaaattggatataaaaatctgtgctaacccgtgaaccaagatctctttcaatatgcatttttacacaactgataaaagaaatacaaattatcgcaaggaaacgattgcgaagcttcaagagctacgtaaatgtatttaaccattttgaagtttcggggttgtcttggagcttcttagaacacaaacaccagcgtcgcaggtgtaatctccagatccagaggagtcctttgcgaaacagctgaaaatattagacaagaaacccatcaatctctgattctatatcaactttttcttcacagacgcatgggctttacaggttctctgcatttgcttacattgtctaaatatataagattcacacaccagaggtaaagatagaaaggagtcaatggtggtgtgccaaaacaaatacatatcgtatgtttttttaagactgaaattgaaacacgttgctaatataactaagtcttcctaaagaacacacgttgctaatgaagttgttggtgggttacaataatgtttaactaagacaaataatacatgtgtgaaagagacttaagttcgcagtatcctacctgagttcttacaaggaaacaatggcttcctttcttcaattcttcgcctttttctttggttgtcgtttctttctggacttcttaaacccgactccgttctcctgtggacaataaagttccatgaattagctcacagagaaggtttatgcatataacattatcagatggtatcaaccagcttcagtggatgctgacctttttgtaacatctataagcactttgacctgaaaactcctgtccgcttttagagatatatacctacaaagagcaagaaaattcagagacaacaaatttttagacgttcctgtctatgtgttctttaacaaatagttctcatgcttaaaagatgtgaatgcgtgtgtgtataacacattcatcccagtcattttctatgtatttttagaacagtggaaacagaaacctacctttcttccttctggggatgtgaaccaatgacctgcagagccactgtcagcagatacacgccttttcccagcatcctttggagctgcagctctcgttttaggatttaaccagccttcagaattgtgtgcgctctcttggctctttgaaacctttgactttgttttccctcttctgcagcttttgctgctagagtctccagctttagaactccctttgctgccaaattgattcctacaatggcattcgaaagatgtgtcaatccacaggaagcagaagattgtaagtatcaaaataagaaatagattaggagtaacctacatataatcaacaaggaacacctctcgctggctctccctatcattgacaattcccagaggaaagaagtttggtaaccgctgtcgagctagattccggatccttggatcactatgcaagaagaaacgatgagatggaggagaagggtgggaaaaatcgtggaatagctcagtttgctgaaagccagtcaagttatgatttccgctattgctactacttgccacagcactgctttgtttctgagctgtgctagtcgtcttgatggagataaaatagtcctgacaaacatcatcgaaagctggtgtctgaatcttggaacttgccggggaaaaatctttccacagatctttaatacaggggatagatccaggttcctttctcttcggtttacttgcaatagatggttgattctttgagaatgaatcatgttttttagttgctccgcttaaatctctgctggtggatggatggtcatcttcagaatctgaatctagtagctggaaccttcgtagaggactacgacttgacatctgaaacaacgatgcaacagaactaatcccagaggcagcagatgcttgaacatccgactgctttctttttccccgagagatagaaggttgattagataaaaccccagaaccatgaagtggcacccttgagctgcaactagaaaaatgacttcttgttgaggccggtgcgtctgcatgaagcaacacaagttttataccaagatgaaaccaacacaatatggatgacttaaaatattacactaaagaaatccaaaagaaaccagtttgagtggaatgaagcttaatcaatgtccttataaataacaaattctcagcctgaaggctccaaacccactctagtctacctattagtgtcaacaactgcaatcaagttttcatctttgagccacaacaaactgatcctgatatctaaatagaagagggtttgcatcaggcttcctaaatccatcagttttaagttctctatgataaactaagggatggtctttctatcaatgtgttcacgatccaagacgcctaatgaatgaaagataggctaatcagctcattgacgtttaataagagatctaacaatgctcgattcctattccagcagtttaagtaagacccatattcgaaaagacgaagcagaagctcaaaattgtaattacccgtaggaaaatcctcaggagaagagaactcttcaatgtcatcatcccgatcctctacagctacgcttctatcatctttcacagaacacttgttgggattaatccctcgtcgcaaccgcttgagaaccgggcttgtaaaatctggttcaagctcccgatcggaatctgagacagtaagtcccaactctggctcgttatcgccgtccccgattaattggtcgccggtggagctagggttttgatggatttccgattggagatccgatgcagcatcaagatcaaaccctagcgaaaacgatggtggctcaatcgaatccatgagaatgaatttagggtttggactaggagatgaagagacttcaaagacatggaattggcgccttggtgtgccgaagaagcttgagatttcgtaaaaattccccgcctagcgcacaatccatgattttaaaaaaatttcaagtgattctcaatttctcatgtattaattttcgtcgggatatttaccgccgcagaaaataattattttggaaagaaaaaaaatcagaatgggccgtgaaatttcaaagttggataaagcccataatttaatttggtgaacggtcttcttttttttttttcccggcaaataatttcattgatatcaaactgaaattacaaagtcagtatacagaacattagaaaacaaattattacataagcagatatatgcgccatgtagtgagaaagatgcacaattgggaagtgaatttgacgatgctttccttagagaagccttattcgctaatgaatcattagattcactattttccttctccatttctgatcttcctctaatgcgaaatgtatgcatccatctactctaatgttgttcttaattgtataatcaactaatcttttttttttattcggatttataaattctgatgatgatgacatattgacaacacttttattattcgattacaaatactaatttcaattaattatttacaaaatttcaaaatcatgttaaatattttgtaatgtataaatacattatacatatcgattacaatttttttattattgtttatttctatatctattgcaataatatgttttaagacaaaaattggacatatggaagttcttaattcacgagttattcattacaccgaaaataaatttgattggtgacacgatcacggtattactaatttgacatatgaacacattttatcataattgttcacacttaacgagtgctcgaactcgaattaccaaagacatcattggccttaaaaagtgtaaaataaagatgttttaattacgaatccaatgtcatcttttatttttgtatcttgtttttgttggtcgactttgtcatttatttttgttttatcttcattcattgcttataagttaaggcttgtcctccattttttgtcatttgctctcgtgacagcatctcgattcaccgtttttactttttctctaactttctatttttatttatatcattttacttcttcaactttattttttcatttttttgttagtcattcttggattagtgttttctttcattcttggaccatactaatattcagataatacttcatacattgcaaaaaaacaaaaataaataaaccaaaattcataaggtatcataagaaatcaattataagaaaaaacaaaaatcattggacaagacaacagactgaattatcgttttatccttttaaaatgaaaatcaacacattcatacgagatatggtaaggacaatttagtcatttagacacgtgtcgtgcccgcgtcgcaaaagcctataaagaatccatttaccttttctcactgaatctgaaagaaaaagctcgcagagatggaaaaatgggggattttgctactcgtaacattatcagtgtcaataatctttacttctgcggccgcagatgattacgtccgaccaaaacctcgtgaaaccttgcagtttccatggaaacaaaagtcctcttctgtacccgagcaggtataaattagaattccttaagctctcctctgttttgatgattcttgttccgaaaaaatcatgtttttaattgtctgaaatctttctattcttgtaactgcatgtgggtctctgtttgttttctccgaaagatccgatttttgggtttatgcttactccagagaatcccatttgctagtgtcccgaagtcttctcaacactagttttctaatggataaatctaatgactgtgtagttttgatcaacgccattagtaatcttcactaatcactactttgggtaaaaatggccttttcctaaatgattatttataacaatggagatgaattgtgttgtttcattctgaagaaaacattgatgcttgagtgaaattgtagctatggagtgcatgatacagttgatacttgataatgaacatcaaaggttctgtttttagattcatttggtcctgtttcttatactgagattcttacctgcaggtgcatatctcattggctggagataaacatatgcgagttacttgggttacgaatgacaaatcgtctccttcatttgttgaatatggaacatcgccagggaaatactcttatcttggtcaaggagaaagcacctcctacagctatataatgtatagatcagggaagatacatcataccgtcattgggccattggaagcggatactgtttattattaccgttgtggtggagaaggacctgagttccatttgaaaacaccaccagctcagttcccgattacttttgcagtggcgggggatcttggacaaaccggttggactaagtcgactctagatcatattgatcaatgcaaatatgctgtgcatctacttccaggggatctatcgtatgcggactatatgcagcataagtgggacacgtttggggaactagttcagcctctggcaagtgtaaggccgtggatggtgacacagggaaaccatgagaaagagagtattccttttatagttgatgaatttgtgtctttcaactcgaggtggaagatgccgtatgaggaaagtgggtcaaattcaaatctttattattcctttgaggttgctggtgtccatgcgatcatgcttggctcatacacagattatgatcggtactcagatcaatacagctggttaaaggtaaggattattgcttgacatccatctgttatgtgtatctcccctttattgccacaataggtctaagtagttagtaaaatagtgcttggttgaattaatctttttccgtgagataatcttttaagatcagcagattctgttacacttattggatttaattttggtgttatctatgatatgtgtaggctgatctctcgaaggtggaccgagaaagaactccgtggctaatagtcctcttccatgtaccatggtataacagtaacaatgcccatcaacatgaaggtgatgaaatgatggctgaaatggagcctttgctttatgcgagcggtgttgatattgtatttactggtcatgtccatgcttatgaacgcacggtatgctcagagctgtgttgaatctcaatagaaatatatctcagcttttcttcttgtttccctatgatattaaactggtttattgtgctgttcgacagaaacgtgtcaacaatggtaaatcagatccatgtggtcccgtacacattaccataggtgatggaggaaacagagaaggattggctcgcaagtaatttcctcaaactgattacttctagctttatcaaatcttcattctttctgtgttataagtaaactatgaacaagaattctctgatgtgtccatgccaaacctctgcatcttagtgtctgagattcttgagctaattcaacatattatctacatgaaactaatcacacttacggtgcagttgttatatgatgaaagtagttgatacttatcatgaagggatcgtgtttttttcactttcaggtacaaagatccgtcaccagagtggtcagtcttcagggaagcaagctttggacatggggagcttcagatggtgaattcaacacatgcgctatggacctggcataggaacgatgatgacgaaccaacaaggtctgatgaagtttggttaaactctcttgtgaactccggatgcttgaagaaaaggcctcaagaactcaggaaaatgctcttggaaccttaattatatccataaagtgagaatttcagtaaaatagtccattaaatatagaaatctacaagcttgtaatgttgttagcaatgggactcttaatcacaccattgaagaagattttcaccaactctatagaaatcatagttccaactttaaaattttgtaaacttgcactttgctttgtgttgtttttcccactatttataatcttaaaaaaaaaaatctagaagctaaagtgacatacgttagattttgtcaatgtagatggttcaacgaatgtgacatacaaaacaatgttgaaaactatttccttttgaacattactcacattaggtacaacaactgtcactatcttaaaatgcaatactaaaaaacattcttcatcacattaatataaagttgagatacatataaaattacaaattaattacaattaggccacaaaaatgatggaccgtaagtggaggattagttgtctgaagaccgttgacgaaaaaaggcggaccttttccacgcgctcaccacacaacactttcataaaatcaattcatcgatccatcgtctctatcagatcaattcatcgattgcgatcgctctttcaattttcttcatcaccggtgaaaataatcgaaacccagcacgagaaaaatgcatgatttttgcttcactatcccgtacgggatgcttctcatcggcggaggatttatcgggtacatgaagaaaggaagtataacatctttcgccggaggtgcaggcactggattattactcattctcgctggttatatcagtctcaaagcttttgagaagaagaagaattccactattgctatggttcttcagacaggtttttttcttgcaaatttctttcctttttagcgatctgggtttatatgtctttaacagatatttatgtttaggaagatttattcgtatgattccgttagatgtccatagggaagactttcaattacaagatgtgaatagcttttagtgacttatcacttgagccaaggaattgtttcattttgttttcaatttgttatggttcaatgtgttggatcatgaacttagcttgagagttgatgataggttatgttataaggttaaggatcttattggaccactaacgatctggatctgaataagtgatttgtgtgatgatgctaaacttgctattcaaagataaaaaaaaattaatattttggttgtgtttggatcttcaattgcagcagtatttgaattggtttgctaattttttccactaatgtaatagtgtctctcttggacaagatgctgttttactgcagatgaacattcaatttgagttgttagatgttgtagttgagtagctgtttttaattagtgttcttgccattgattgacaatagaaccaacctcaaagatataacaagcttgcaaaatcgattttcattatctatggtgactgaaactcatctgaatgtttctttttttttcgatacagtcatcgcagctgctctcacactagtcatgggacagcgttacttgctgactggaaagattatgccggctggtttggttgctgggatcaggtaaaaatccttcaacactggctggctagtatctttgtttgcatcaagatttggtatttttaagtttttacaccattgacttaactctagaaccatatctgtattgcagtgctctcatgacctgtttttacgtatacaagatcgctactggtggcaataaatttccagcaaaagctgaatgatggttctgctacatgcagatgatactatccgttgttgaatttgtcgattagaattctttttggtgtacacaatgcggttgtcataacgccttaatagcttgtattagtcaaagaactgcatatggtcttgtgttttcttgtcatcgtgtttttgtaaccacaaactgttttgagctatactactatatatattgagatatatctgccgtttcgatacacacttgggatctggggatgagcacatcgtaaaacaaaatagaagttgatcctcaaaacttctttgtaaccttgtgtcatcacaacaaaaaatcttcaatgtgtttgttctctccttaaagtatatcttgattcatgcagtaacaaaggcaaaactcttttgcaagagtatagaaaccagactcaagctgtgcgatggtgattcttttggagaagttggatttgtgctctgatgtaaagggaaacttaagctaaaaggtccatcaatggaggtgacacatagttttagaaaatgtgcttttctcatgctagaaatgttatggagacccaaaaatgcttttcggaaaaaattctcatgctagtagctaggctctacttaacgaggtgacagctaaaataagttctttttattccattttcagaatagtgacattcttctcacaaatatagaaaaactacaattaatgctactgcagagtctgattacgttttaagctaatttttccatttttaggacgtggtagattgtgtagattattgctaaacagctcatgagttcaataattcacttattcttcactccatcttcagcaaaaaaaaaaaaagtaagaagaaacactgaaagctctccactaccatggcgtgtcctagagtgatttttctgattctgatcacgttcttcattttacagactgctttctcaagttcttggcaaacattgagtggttagagacagagttctctcactttttatgtacgtgaatttttcataaatgttccttacagtttcttgatgtgttttctttagggaaacctccggctgtgattgctcgaggcggattctctggtatgtttccagattccagtattcaagcatatcagttggtgaatataacaacttcaccagacgtaatgctctggtgtgatcttcaactaacaaaggatggtgttggaatctgctttccaaatctgaagcttgacaatggttctaacgtcataagaattgacccacattacaaagaaaggttttctgttgatttcacatggaaggaactctctgatgtgaaatgtaagtccttttaactatatctcgtttctttaaaccctcttcttgtaagtgaaacttcttaaatcaaaatgttcaatcttgtggtatatcaactctgcaaatgttttttcccctcaacagtggcacagggtgttgtctcaagaccatatatattcgatgatgtatcctcgatattggctattgaagaagtagcaaagttgacagcttcaggcctctggttgaacattcaggtataatgtagatactcttttaacgctcagagtcttttctataagaatcataattaagtaatcttcttcctctacttatccgtctctacacttataggacagtgctttctacgcaaaacacaatttgagtatgagaaactctgttgtctctctatcaagacgcctgaaagttaacttcatatcttctccagggatcagtttcctgaagagcatgaaaaacagtgtcaagccgactgtgacaaaactcatctttaggtttctgaaacaagaacacatagaacccttcaccaaccaatcttacggctctcttgccaagaatctaagttatataagaacgttttcttctggaattcttgttccaaaatcttacatatggcccgtagattcagctctttacctacaaccccacacgtcgcttgtaacagatgctcataaagaaggcttacaagttttcgcctcggagtttgccaatgattttgtaattgcttataactacagctatgatccaacggctgagtatctatctttcattgacaacggaaacttctccgttgatggtttcctatcagacttcccggtgactccatatcgagccatcagtaagtaaaaaacacactgtttttctgtttcttcatctagttttgcattgcatatagctacatttatgattcttgttttctttccaagattgcttctctcatgtggaccctaaaagagctaaggagcaaggtaatgcacaagagaaaaccataaacatatgatcactaaatcgtttagttgcattttaacagttatgtcttgcagctaagataactattatctcgaagaatggagcgagtggagatttcccgggctgtactgacttggcgtatcagagagctgcaagcgacggggctgatattcttgattgcaatgtccagatgtctaaagacaagattcccttttgtatgagctcctttgatcttataaacagcactaatgtcatcgaaacaagcttcagaaatctgtcatcagtagtttcagagattaacccacggagaagtggtatctacacttttagcctgaccatgtctcagatacaaaccttgaagcgtaagagccaaaactacaaagcaaaatcaagattcaatataaagacttttaatgaattggctttgtttccctctttattgcagccactatttcgaatcttgaaaaggactctggtttattcagaaacccaagaaacaacaaggctgggaagtttcttacattatccgagttcttgtttcttccaaaccgttacagctctctcttaggcctcttgatagaagtggaggtgggagttctatctgcaaatcttgtgtgtaaataagtacaacacatgactcttttcttgatatagcattttttcgtttcttagaatgcagcttatttagtggaacatcaaggaattagcgtggtcgatgcggtactagatgaattgaagagagctactactcaacaaaacaagacaagtgcaagaacaatactgatccagtctactgataagtctgtcttgatgaagttcaaggagaagaacaaaatgaatcatgacgagctggtctatagagtcgacgacaacatccgtgatgtagcagattcggcgatcaaagacatcaagaatttcgcaggctcgattgtcatcagtaagaaatcagtctttccctacaaagggtttatcatccttgaaaaggagacaaatattgcttcaaagctaaaatcaaacgggcttcgtgtttacgttgaaagatttagcaacgagtgtgtaactcatgcatttgacttttacgatgatccaacgttagagatagactcttttgtccgcgatgtccaaattgatggcatcatcactgacttcccagcaaccactgcaagatacagaagtaagaaagtagtctcatcttctctttatatcttctttaactttccttgagccaatctgagattatgtttgattgcagagaacaagtgttacggcgaatttggtctgactacaaccggtgagctcataactttcgcgaatccaatgcttcttccaccagctgaagctccatatccagcactacttgactcagatgtgacggaaccaccattgcctgaagcaagaagtcagcctcctgcttcttctccatcaaaggcagaggaaaaagcaatagaagttccctttgcatttatagccatggctattcttgtgtgcttcttcatttcagtttagtgataagtgtttgtaaccgacttcgactgcagtatctgcaagtgaaccttatgaataacaatgtctagtactatatcattcttctttttaaggtttcaataagatatctagaattacaaatttagaagagatattaataggaatatggaaatggataaacttaactttaaatccaacaaaaccaaaattagcttatttgatcttttaactctcttccaatggattcttcacccaaatttaaccatccatttatcaggaaaaaaggaaacataaaataaacaatcaaacataagggaaagattctaagtggcaaactcatttttgtttgttccttctttcttttgaggccaaaagagaccagattcatttttggtttcttcaaaggccaaaccttattttcttattttctcagacaaacccttttgccatattacaaaataaaatttattcgtctgagaattatcttgatcccttttggattcgaggttcaagaacattcatgaacttcgagtaaatcaatcatcttcttgtagtaataatccaggaagatacattatcaacacacataaaacagaatgaaaatcaattgcttgttctgttgtatgtcccacagacgatttaacagacgatcatcatcgagacaaagcatcaaagactgcattgatgcaaagaacaatataactacatttgacaacatctcttttaaaacaggtcccattttctaacctttttcattatatgcattctcaaatcccttaaaagcttttctttctaaaagaagcgaggcgtatttgcacatacctgcagatagcagtaggcgaagatacatatccgaggagatagcaaaactcggtaaagggaacatcagtgctcatatttttacattcagagagctttgcgtcgctaccaagaacttcaaccccgataatcagctcggtgaaggcgggtttggaagggtttacaaagggcagatagaaaccccggaacaagtacttataacattctctctcatacaacatcgatccatcatattctgctcagtggtttgattctgattcttgcgtgtttaggttgttgcggttaagcagctagacaggaatggttaccaagggaacagagagtttcttgtggaagtcatgatgttgagtctcttacatcatcaaaaccttgtcaatttggtcggatattgcgcagacggtgatcaacggattcttgtctatgaatacatgcaaaatggctctttagaggatcatcttctaggtaacatatatctaaacaccatcacaacatactttcacttccacacattctaaagatttaccttttttatacttcagaattggcgcggaacaagaagaagccgttggattgggacacaagaatgaaagttgcggcaggagcagctagagggcttgagtatctacacgaaacagcagatcctcctgttatctacagagacttcaaggcctcaaatatattacttgacgaagaattcaacccaaagctttcggatttcggtttagctaaggttggtccgaccggtggagagactcatgtgtcaacgagagtgatgggaacatacggctattgtgcgcctgagtatgctctcacaggacagctcactgtgaaatccgatgtatacagcttcggagtcgtgttcttggagatgatcacaggaagacgagtcattgacacaacaaaaccaactgaagaacagaacttagtcacttgggtacgcaaaagttcttcaatctgaacaaaaccatttgattggttttcttaatttggttttgctaaaatgcgcaggcgagtccattgttcaaagataggagaaagttcacgttaatggcagatccattgcttgaaggaaagtatccaataaaaggattgtatcaagcgcttgcagtagcagcaatgtgtcttcaagaagaagcagcaacgagaccaatgatgagtgatgtagtcactgcgcttgagtacttagccgtgaccaaaaccgaagaagatggacaaactgtagaaggagaagaagaagaagaagaagacgaaagatccaaactttgagcaaatttttttgtttgttttcgtttgtaattttcaaatgatcggttttaggaaatttgataactttacgaattcaccaatgaaaaaagaagattaaatgagagttttcgtgttccccatcgaacattttaaaggatttgctgagaattttgtatctgggtttcaaaaagtttcagacttgactcatcgctgaacaaaaattacagaattaaaaatcccaactttatcggaaaaatgtcttttttttttggtttatgtatttttttttaaaagtgaaatgattaattaaagaagataaaaggggaaaagggtttaagggtttgtcatagagcaatggctaccagctcagctttgtgataaaacgacaaaattggacaacgataaaccctacttttatctctggaagactcaaaattccttcaagctggggagattagcttcacttactacggccatgggggtttctcttcgtcacttgtctccttcctctttctgggtttcgcgtcgtcctcgtgtttcttcttcaattctttcttttcttgtccctcgccgtcgaatcctttgcaccaggttcacagcttttctcatcttatctgttcccttttctcatttttgttcatcgagaattagatttactcattcattagtcaattgctctgttccgtaaagttggttgttagttttatatagtgatgatgattcacgttttgaggttgttgaagaagcaggttaaaaatgtgtgtttgctcaattgctctgtttcgtaagtttgttgttagttatatagtgatgattcgcgttttaagtttgttgaagaagcaggttaaaaatgtgttttgctgcaatttggtttcagtttctcacttagtctaaattgttcctgtgttaaagttatttaggagtctgcttttgattaagcagaagaatgtattttagttgaggtttggttattattctgagtttgaaggtgtttttctttgtgttgatatcattttttggtggttatgatttgcaggaaagtagcaatcataaagggaaatgcgggatattcgactgctactgattgtggtggttctcatgggtttcatcattcaggtcatcaaaggtcatcctctgttgagtttagtggagagtggaaacttaatttgggatctaagacggcgagaatggttccgccaactgtgaaacaagctggagctgtaagtgcttggagggaggaagtcaataataagttaagaggaagaaatagagaatatgctaacaaccaggatgatgcttttggtaatggcagttatattttaaaaggctttgtccccaaaatagatgatgtccattcttatggaaacggccagaactttgattacaatctgaagcctggaactgatattaccacacttggtagagaattgaatggctttatgcaaacgaatagtataagaggatcggtcgtagcattaccaagcaaggatattgaggttggggaaacaacagacgtgactctgaaacctcttaacagtgatacgactcttgacaatgccagctataagaaaacagcaaccatttccaaagtggaaaaatgcaccaacctatcgcaagtccgtgcaaacctcaagaaaatatacaatagagttcgtgttgttgataatgtgtctagtgcaaaggaaaccgtggctctgctcatgaatcaatataggaatcttgtccatgcttgcgatacagaggtattgggtcatgtgtttgctaatacattgttgttcacatggcctagaaatgcttatgttcttgacgtatagacgcttcgtttaattctgcttttactctctgataatctattctgtaggtatccaggattgatgtgaagactgaaacacctgtagaccatggggagatgatttgtttcagtatctattgtggatcagaagcagattttggagatggtaaatcatgtatctgggtagatgtgcttggcgaaaatggaagggatatcctggctgagtttaagccatttttcgaagactcatccataaaaaaagtgagctaaaacgaaaaacaacttgctgcgtttctatttattcagtgataatttggtgttacgaatcttgttgtgtgttttcctgaaaagatgattgactacttcttcaccttggctctcttttgtttagatggaggcactaatgacttctgaatcatgttttaattttgtaaatcatttgaaaatgttttcatgatcaaataacgcttataagcttgacctttccttttacttataggtatggcataactacagctttgataaccacatcatcagaaattatggaatcaagctttctggttttcatggtgatacaatgcacatggcacgattgtgggattcatctagacggatatcgggtggttattcgcttgaagcacttacaagtgacccaaaagttcttgggggaactgagacaaaggaggaagcagaattatttggtaaaatatcaatgaagaagattttcggcaagggaaaattgaaaaaagatggatcagaaggaaaattggtgatcattcctcctgttaaagagctacaaatggaggatcgagaagcttggatttcgtactcagcgttggattcaataagcactctaaagctttatgagagcatgaagaagcaactgcaagcgaagaaatggtttcttgatggaaaactaatttcaaaaaagaacatgtttgatttctaccaagaatattggcaaccttttggtgaacttcttgccaaaatggaatcggaaggaatgcttgtagatagggattatttggcgcagattgagattgtagccaaagcagaacaagaaattgctgtttcgaggttccgtaattgggcttcaaagcattgtccagatgcaaagcatatgaatgttggcagtgacacgcaattgcgacaactcttttttggtggcatttctaacaggtatgcttcttccaagtcttgatttgaactgccttatttttccatgtatctttagaagaaaccatgacattttggtatttgacacgtaccatatcactttattataaagaaaaccaaatgtatgagactctagtttaagaatctggtgaagattgtaatcttttgccttgataaaacacttgcagctctcagatttagtttgtgaatcaaattttcttcccattatgatgcaaaacaggagttacataatttcgtttcttagtgcttatttctgatactaagttttgttcatatctgatacagttgtaatgatgaggatcttccatatgaaaaacttttcaaagttcccaatgtggataaggtgattgaagaaggaaaaaagagagccacaaaattccggaatatcaaactgcataggataagcgacagacctttgcccactgaaaagttcactgcctcaggctggccctctgttagtggagacaccttgaaagccttagctgggaaagtctctgcagaatatgactatatggagggcgttttagatacttgtctagaagaaaacattggagatgatgattgtatttcgctaccagatgaagttgtagaaacacaacacgtcaatacctctgttgaatcagacacatctgcttatggaacagcatttgatgcatttggagggggtgaaagtggaaaggaagcttgccatgctattgctgcattatgtgaagtttgctccattgattccttaatatcaaattttatccttcctttacaggtatgttttttcttttaaaacaatattccctggatttacgagctacttaattatttccattagcatatccttcaggttatttttttatggaatttgttttcctaaatgacagggaagtaacgtgtcaggaaaagatggtcgtgtccactgctccctgaatatcaacactgaaactggacgcttatcggctagaaggccaaatttgcaggtacatggcttgaacttaatttaagagttagcttgaatggagatgcaatcaaataactaagcttctctaatttctctactgataaccttgtaaatttttttgatgttgtggtatgaagagctagtatatgctaatttttggattggtgtgctcaaggtcaatttttagatagaggtataggacatctagaatttgtttgtaaagtattccttttctctgtctagaaccaacctgcattggagaaagatcggtacaaaatccgtcaggccttcatagcatcacctggaaattcacttattgttgctgattatggacaggtgaaatgatattgatatctacttttctgatgactagtaagctaattcacttgttgactgtgaggtgatttttctatcttcagctggaacttaggattctggcacatcttgctagttgcgaaagcatgaaggaagctttcatagctggtggagacttccactcaagaacagccatgaatatgtatcctcatattcgtgaagctgttgaaaatggtgaagtgctccttgaatggcatccacaacctggacaagagaagccgccagtgccattgttgaaggtgaatcctggttaaatgtttttgaaacagggatttttaactcttttattcattttgcttgtaagctaaaagaatagttctattagtgctgaactgcagagcgggactctttcatccctttggcactttaagattgcaacagtcgacttatacagactagggaaactaaactttgttcctgaattcgtctaacagctggcaaaatgttttcttacttattcaggatgcctttgcttctgagagaagaaaagcaaagatgcttaacttctcgattgcgtatgggaagactgctattgggctgtctagagattggaaggtactatcaactaagccgttaagattgatatgaacaagcttgatataagataataagctcacagaagcctgttttccatctttcaggtatcaagagaagaagctcaagatacagttaatctctggtataatgacagacaagaagtccggaaatggcaagaactacgcaagaaagaagctatacaaaaagggtatgtactcactttgttgggaagggctcgtaaattccctgaataccgttcacgtgcccaaaagaaccatatcgagcgagcagcaatcaacactcctgttcaggtttgtttgcactatcatcagatcttaaccatcttgaactctatcgactttaaacctcaatcaccactattaatacagggaagtgcggctgatgttgctatgtgcgctatgctggagatatcaaataatcaacggctaaaagagcttggttggaaattgcttctacaagtaatacttctcacagattctttacataactacaggttagatgattgtttatctaaatgatttcttttgggctacctacaggttcatgatgaagtaatcttggaaggaccaagtgagtcagcggagaacgctaaagacatagttgtgaactgcatgtctgaacccttcaacggcaagaatattctctcagtcgacttatctgttgatgctaagtgtgctcagaactggtatgctggcaaataagaggaaaatagaaaaagatcttgctagtgaaagctaacaatgaggcagtgcttgaggttttttttttttttgtctcattggctctgagaaaatctgttcatatgtgagaaagggtcattttgtttatgctaatgaaagctaattgttgtcatcttctttatgttaaaagatacattgctgtgtaaattagtaggcttgaagagtcggtgtttttaatgagaaaacagagtaatcttatcaaagaaaagtgaacgagtagatgataataattacaatctcgcaagaagcttcgaggcagtatcatggcttccatttcaccatgcatagctcttctgcgagtttattctcctctaccaccaaactcaacaacacttcttctaccccacttagcctctcctctcggtttcttggaactagggttgtgaatctcgggatcagacttatccgactcggaccctccaataggtcagagccactgcctcgtttaagttcggaaagaacggcgtcgatgctgagaatgctggaatctatggcagccagtcacgtgatgattttgacagagacgacgtcgaacaggttcgtgttcacttcaagcttctagagtcaaatatgtcaatctttgttttgttacaagggcgcttataaaagcttccgtacgtggttgtgtctgagtttgtgaatgaagaaaacagaggaaatgttagatttattattgtcgtttctgtgttatttgcagtattttaactacatggggatacttgcggtggaaggtacctaagataagatgcaccatgtcgacatccttttaatgctagcagtctcggagggagacaagcctaaaattgaagagcttctcaaacgctgactacacggttaaggatgctgacggcagaaccactcttgactgagcaagcagggaggagatccgtgacttgatccttgaatccctcactaaaggcttgacaaataagtagttttcaatcgcagagttagctttatcttactaagaaagtgatgtccgttttggtaactctagttgaaatctcagtcgtctccatgtttctacgttaagttaggtcgaaaccctcagggagcgacaattttaaagtagagattgatcttatacagttataccaaaagttaacctttttctcttaccaatcgttcatcatcatttattatataacaagcaagcaaaagatttctaaatgatgtctgagattatcaccagcacggtagaaagcatacatgaagcagctcaaacatctctaaaaaccctgagaaacgcaactatctaatcttgtgatttactcgtttctgcttgactctgatttcattcactcggcagaattctcgtgcaacagtacgtactctcggctgcaaccaaaagaacaaaacatgtcaagaacagaagaaagtagatgttaactgcacagcaagcaaagattaatcacagagaataggcacggggtatgattcataatgggaaaccagaactagaatgtgtcttcattagaatacctgctgttgccaaactttatggtgtctttctcaaaaagctcataatatctttgtggctcaatgggactttcctgaaaaagtaaaagaagttctaatcacaaacgtttgaattaaccatgataaagaagcacataagaaggaatgtaattgagcacttacattgatataagttttgttggtactaccaagatccattatgtaaggcctggaaagtgacattaagggaaattaaaatttagcttaaagccagaagaggtacaaattttaagcaaaatgaaagagcagataggttttacttcacttgcttccccatcataccatctggtttctccttttccatttccctgagaaaagcacattcacagtgacataaatattaaactaaaaaccttattctcattaaatctattgtcatagatattactacttaaaaggagaaatacatgtcagaaccctaccggtactgaatgacagcatgctgcttgctgcaagatgggtgatccgtaggaatgtcggcaatccttctttcacgtccaaagaggtagcagctttggcggtgaaggcagagtggctctgttagtccaacacatttcacatgcacagaaacatacatcaagaaaactgattcagggcattcagaattattaagcaaacagaaatgggaaacaaaatgtaaaatcttatatacaatgttcaggggttcaaagtaagaatgacacgggaagccacagtcacaaacatatcagatcaaaggagctatttttcctctaagagtcattaacattcataataagattcattctaagaaaattgacaagttctaagaagtatcaagctatagtttggctactatcggtaatcacgctgttatctggacactaaaccatcaatgaccacagttttcaagtttacatggctagagtgcatcaaaatttcttgagtatctctttcattgccactacatgctttactgcatattttgtggacaaaaaattgacgttcaccacagtaagatagttaagtgaaatacatagaagacaaatgaaccactacttagacagatggatagagatgtggaagacgtcaaagactcaccattcagtggttcaccatccttaaaaacatacagtctccatcgttcgctgggttttctagcctctgggggctcattgaagaggagtgtgatacctgcaaaggattcactcagtcaaggaagctaagcatgcctatggtgaaatttaatgcgagaaaccaccgtctccattcctaggagcaaaagcggattggcagtcaaaagatatctgctgatagcagatgcttatatattgaagcttctagtctcattagatattgaccaaagaaagcttttacccagtgacagacacgtacgcatacaaaattaagtaaatatgacctgacaacaaaggcagatgtttcgcagttcaaacatgcaatgaaaacactatggcaaaagtttctagcacaaggtaatggtaacaggtgatattcttaaatgaaatggacggatcagaagtttcacctctgtatctgttagtttcttcagcaagtttccctgatagctcaaatgatggttcttcctacaagatatatcaaaattagatttgaagcgttagcatttatgcatggatgagctaagcgagctcaaaatgacattggaaattgaaaatcaatagggcttgatataatacctttttcttcgctgccagagcctcttcaactgctctcattctcgcgactgaatcttcctcgacatttctgttaacgaaaacccataacatggttaaaagaaagactgaaaaattgtaacggctaatctaataagaagaaaactcacggctcctcgctgccccctcttgcattagacccctgaaaagacaaaaggcgataaaaatgactgaagaagtaacaaaaatctgtggctcgcagaaaatgataatttgcagaaagcaaccataatctatataatgagcttttactaaaaagagagaaacatgagaagtgatgttactggacatgctgaagggaaacaaagagactatctttcttaagtcctttagcaacagagtaagcaaaaaatggctggctgcaggttctagttatagactcacgagatggataagctagattacaggattccaattatttattatgtgacgaaacaagcagcagaggctaaccttttctagcatacatcagagctaaacaatttcaatcacatttatcttttcaagcagaatacgaatatgcacaagtaaaacccaaaacaaaaaaaaaaacacttctgagattaagaacatatccaagctaaagaaagaagcagaaatacctcatcatgccttgaggcaatagctctttcaggtgaacgcctactactcctgtgactcctatctgacggtgaagtagacctctcatgtcttcctctagagtatctctcatcatctgttcttgtccttctccttttttcagtatcctctctccctgatcgtcttctcttatccccaacttccctatctctttctccttctccttttctctccctatccctatctcttcctatatctctatccctttccctactgtttctcttctccctttctctaccatcatcttctctctctctacttctcccaatttccttctctcctcgagctcttctcagtctcttcgtacgtggtgaaggagacctagaactaggagccattattggagtcagggtcgttttctctcttctttgcctttggaaagatcacaaattgaaaccagggtcagaaggaaaaggcatgtgagctccagataacacagtaaaccctaattcccaaatgcatagaaactagaaatggagcaaaagccctaaaccaaaaaacgtaagctacagatttcaaatactaaattcagaagttccgggcatagtctagggttgcaagaatcgttaagagaaaaaatcgctgcataacgagaaagaaaaattttacctggtggccggaactgtgactacttcggcggagagaagaggagagagtgaataataataatcgcagagataaaaagaatcagagccaaaacgagaagaatcatttatttggcctcttttgcaaataaatggaaactgaggggttcaatatcaaacaaattgtagacggtatggtaaaacttccattagttgacacgtgtcatatcttgtttggtagaaaggatatgtataattagggcagaagccgcttgtaacgtcgtacccttgtacttccttcgagatttttgtttcttcgtcctagtttgcaacaaagattttataattgatcatcaaacaaatcggtgagcctgtaacaaatcgagtgcaccagctttaccaccaactttgataggatagaagacaaatacaagatcatagatatagttgaggtggatagctaaacgacataaaccatcagaagtgacagtgatcttgttctgattgtaacagagtgcaccaggtttaccaccaactttgatcctctcatgaaggaacttgtggagagaaattttcaacttcgaggaacatatgtcctgaaatcccatctgtagttctccttactaccgatttgtagtcgcaactgttggccttgaagcttatgtggaagacagcattcatagactcgagctttagagacgggtcagtatgagtttctcgggtgatgctttggtttgtcgggtgatggctcatcgaatcccaaatcatgtctccttgtttatttgatgtatctttagtttcatgtatatactagtgtacgccaatattatagacgattaaaaactaattcttgtttacgtatgaacaaaacgatatgtactttgtcattattatattttttgtcaaagattgagaatatttatttttttcgcatcatagacacacaaacaaatgttgtctaatgatctaccagccggcttgtatatctaattcaaatatcggtcatgcatcatgcacttcattagtatcttatgttttgcaaaatactggctagactgtcacatatatcagaatcggtcaccgtcaccttcttcgttattgtcatacggtttcactatgacaaagtccaaattaggtcaaattttaagcgaacatacgtagcctcttacgtcatagattgctgatgaaaaagaggcaaattattataacaaccatcaaagattcggtactaactttacaaattcacacaattcgtatctcacaatctaaaagtgcaatatgtcgtacatgttttgtaagctagacaatagtaaaataattatcctgccggactataaaggttcgagaacgtggaccgactatatttatatatcaattagctatttgtggtgttagcctaatgttgccttcatcacgttttctgtttttttgttgaaggattttcaaatagatgaattgactatcatcaccttgtcacgttataaaccatatatattatcgttaaacacttagtagcagttccccacgaattacatgtctccatcattgacaaatttatatttttgtttgtaagaacactttttccttcctcaacaaattcttgtacttaatacagatatatacttataaatgttacatcaaacgctagataacggagaatataagctaaaatgaaattaatatatcttgtttcagcttctatcgaaattattttcattaatggacaatataaaatttgatccttatctactgtttctgtgaatttgtgattatcatcaggcaaatgtatcattaggcaaatgtttttatctaaattaacacttttattggaaaactaccaaaatacatttaggttcacccatcaaaagtactttatgttgttatgttatatattgtgtgctaactaaaaagattacaatttagcaaatctcaagttgatgtgtacatttataatctccactacaacaagaaggtgatccacttctcttgtatatctttatttgttcttgcacgtacataaagaaatcaaactgttcaactgccatttagaatattaaaaccaacaaaataatattataacaagtaaatacttaaacaataataagaacaaagggccaaaatcgtgccaaacctacaacattcctgacctctgcctcccccactatatagaggtcacatttgagagaattaggcaaataaaaatctaagaaccattttaatagcttctcacatctctctattataatatcaaactactcttcaccagccctcttaattatctaagaaagtctcaatggaaaactcagcactaagcaactgtgtgaggcgaacaaatttctctaatcaacagagaactatgcaagagggtctagaagagagtagttggacaatgtactttgaaacagaagatggattaggccattacgatgattcttcaatgatgtcagacgctgcttctcctatgggttgtgtcgaagaagacaccgcttcatctccttctaacagaaccgaggttagtccaagaataagacaatatatcttactatgttcatgatacatacattgatacacacattacacatacatatataggttagtctaaatggctatgcttgtctcttcagggttacagtggaatggaagacaatacgatagaagaaaaaaccatgaacaatggtaagattgaggtaagaaacttcatgttttctaatatatcttttcataaatgaaagttattttggcggctaacaaaaatattcatacgggatttgtaggagaaaatattgaataaaaatgggataaagattgaagaatactgcgcagaattgaagaagagaggactttgcttagtccctttgtcgatgttatctaactatattggttgaaactttgattactctttcaatcatatacatattctttattgtgattatatatcttcctttctctgattattttctgtaaattatagaatggactagtaaatgtagtgaaagtcaaatcaagggttgcatcatgtatcgcatgtatgtatgtgtaatgggtgtatcaatgtatgtatcatgtttccatgtgtgtaacagtgttaacatgtttccatgtgtgtaacagtgttaacatgtttccatgtgtgtaacagtgttaacatgtttccatgtgtgtaacagtgttttggtacaatcaagtacatatgtattttggaacgcctttgtaatccaatgattgaatgatccggatttagaacacttcattagaattaccaacaacctttagccaagtgggtgtgtcactcctcgtggtctgatctcttgtccttggaagttttttttctttttctctttagagtttggatatatttctatagaaaaatttaaccgactataaatccgtgagattctaacctatgctttactacaagtagatcttttcgtgtctgtgagaaggcttcaatttcttcatcaaagtcaccacaatgaccatcatgttgtccatcgatttattcatgaaagatctttcgatttattgttatctcatatgtgtcaaaatgctacttaaactttgtcttcaacctctcatataatccttgttgatctacattatctatcttgttgtggtattggggaatgtctttatttgttatatcttaaactttggaatctttgaatccttgttaatctttctacttggattcatttgaaggaatgaaatcaagtatgatgcacacaaaaaaaaaagatgtgctttaagatccaaaagaatacattttccattgttggataaatagaaatcttcgcaaaaaaaaataaaaatctttgattcaagtttaatgtaagaaagtcatcaaattatttgaaaaatgctatttacatgaaaaatgttataaaaaaaattattttatttaatttatagagattttaaagaaatatctcaaaattgcattttatcaaaaacatatagattttttcttaagaatgttacctaaatttaagaaagttattaaaatttagatttttttcttattatttgtggtatttttttctttaaaataatattattttacagagtatcagaatatagtattattatcattttaatcaattaatatatatattttttttttaaccaaaaaccaaaaaaaaaaactgatgacaaagaaaaggtaagagatttgaaacgcaaagctttcctaacagagaatcacgaaatcacgaccgcattagagaagaaagagagagagagagcttttcttcttcttcttccgctcactagatctgctccctctcgcagtctcctgggttttggcaaattgcttttgattcttctcgggtggcagctatggtttcctccaccaaactcaaatccgttgatttctacaggtgcgatcctccacatttcctcaattctcgttgcctaattcagtgcattgcttcgatatctgctgctctgatgcatgtttatacatttttgattgtgtgtgatgaattacgcgtttgattgagattattcggaatgttagttaaagtatgcattttcagctgtcgtcgaattctgcgttcgttttcgtatccttgatgatctgtttttctggggtgcctcttttttggttcaggaaaattccgagagatttgacggaggcatctctatcaggcgctgggttatcaattgtagctgctctctttatgatgtttttgtttggaatggtaaaatcctctttgggctctgttgtttatttttccaaatatgatctctttcacctctctctgtttgatcaagtatagtttgagtaaagatatcatctttatcttttttcaggagctgagtagttatttggaagttaacactaccacagctgttatagttgacaagagcagtgatggtgacttcttacgcattgatttcaacatcaggttagatatttctgcagataattggtgaacgggtacttttgttgtttattcttctttttcctctgttgatacaatcataaagatatggttttcttttttgaataattgctgtgatattttttcgaactttattttctttgtcaaatgcttgattgataataaagaaatggaatggttttctttacaagttgactgtttttgtttcttacctatatgtagttttcctgctctttcctgtgaatttgcatccgttgatgtgagcgatgtcttgggaacggtatgtctctctactcacaactctcagtcccactgttagaatgcatttctctataaatgttttgtgattatcattcaaaaagcaataatgcaaaaggaaaggaaaagcttaaatcttgacactttcttcagtatcagagaatgtatctttgcttatgtgatatatgatagactattcgtgttggcatgttgagttggttgtgcaatgatgatatggatttaatccaatgtttactgattccattttattagtaattggcgctatcaaagctaggaaaaacttaataatgctgtccggctgtaatgaaacaagaataaaattgtttggaaagttttaatcatgtagttgaaatttcaaccgtatcacctaatccctgagtccccgtttcagttgtgcagtacatcctatgttttatactaaaagcaagactgagcgcctttaacggagttatgatatatataccctcagaaaactaaatctacttctctgatgtttaatttttcagaataggttgaatataacaaaaacagttcgcaagtttccaattgatccacatttaaggtccaccggcgcagaattccactctggccttgcattacataacataaaccatggagaagaaactaaggaagagtttcctgatggtgctataccattgaccagtgctagttttgaagcattatcacatcagtgagtaggcagcttcttctttttttattgtgcatgcataagagtcctgtctgatggtttgaatatcgattaacaaaaattgaatttctttatgcagctttccaatattggttgttaactttaatgcaccatggtgctactggagtaatcgtctggtaattacttatgcttataatctttccaattttctgaagttttacttttcttctggtatacaagcactaatgatccagttggggatgtactcataataacttgtttttcctgcttgaccgagtgagaaagaatcttcctgaattcgttattgactgttatttgtgaatatattcaatcacgatatgtggaatcatagacatgtcattttatagggaaacttactttcttcatattgcctgttgttttgtgctaaaggggtatagggtttgctattttgtgttacgaattctagatgacaataaactttttgttgaataatacgctcatattatgtagcttttatgggtattgtgtacctcaattcctgtttgacattgaaaaagttgttcatgtttggttatgatgagtttcttttgtattttctactatctgcttcagaaaccttcatgggagaaagcagctaatataataaaacaaaggtttgtgttagaatcttcggcatttttattaagttgtgatattcttaagccgctggctgataatgttctttctgaaacatcttcatgttaatattctgctgcagatatgatcctgaagctgatggccgtgttcttctaggaaatgttgattgcacggaagaacctgcgctatgtaagaggtactacgaagttgatgttttcctccattttcttgtttttcttatttgattaatgagtcgtttccaagaagagaagaatttgtgtttgcacctttttaattcctgctgttcaaggatgcaattccaaggggagcagtgaatgtcgtttgacttaacataaatcgtggaatgtgttttcaggaatcacatacaaggctatccatctattcgtattttccgcaaaggcagtgaccttaggtgagaaaacatctgatatgatgtttcttagttatacacaattcgtcatttcttctacttaaccttatgtatccatgtggcgacaaattcgagtttatgtctcctaattgtgttctcggtacagtcaaatgttgacacatgtgaagtcatcaccgtaaatttgttcaaaatcttaaatttttgcttttcgtcttttcctctctaacttcctttaggttaatagaccatatatctgttggtgtaaataattttatgaaagtgtacctgtttcaatgtttccagagaggaccatggacaccacgaacatgaatcttactatggagatcgggacacagacagtatagttaaggtagacaaatccaaatttcgtttcagtatcaggaataaatgagccaacattcacatttatgtgtatgtggtgtattagtcacttagttattgaaaaacgtctagtttgtctatggattaaatattatatacatgcacagcatatctttgtgctacgttttgagtcaacagaaagcagtctaaaagttcatataagattttctttcttccagatggtggagggactggtcgcacctatccacccggagactcacaaggtggctttggatggaaaatccaatgatactgtaaaacatcttaaaaagggaccagttacaggaggttgtagagttgaaggttatgtacgtgtaaagaaggtaaacctcggactgaaaagtgaacactgaatgaatgtcctgtaattgatttgtggcatgtactgaaatttgtcttttgtatgtttcaggttccaggaaatctcgtgatctcagctcattcaggagctcattcatttgattcttctcaaatgaacatgtcgcatgttgtttctcatttttcgtttgggaggatgatttctcctaggctgctgaccgatatgaagcgattgttgccatatcttggcctaagccatgacaggctggatggaaaggcattcataaatcaacatgagtttggtgccaatgtcactgtaagtcccagaaaccttcataggaatttagagtcttgaacaatcgtcaaattttcttttactggctctcatctaactgttttcaacatgctttctacagatcgaacactaccttcaaacagtcaaaacagaggtcattacaagaagatccggtcaagaacattcactgatagaggaatatgaatacaccgctcacagcagcgtggctcagacttactacttacccgttgcgaagtttcactttgagctctctcctatgcaggttcagtcctcatttacacaaacaagagattatctctcgaaaatgtcacaatatatatactttcctctttataattactccttggttggtctgtttttgcagatcttaataaccgaaaacccgaagtccttctcacacttcatcacaaatctgtgtgccattattggtggtgttttcacggttagtaatttctcagttaccttgcgtcttcatacccgcatggattcaatggtcatttctgattttacatgtggattttttcaggttgccggaatactagattcgatttttcacaatacagtaagactggtaaaaaaggtcgaacttgggaaaaacatttgatcgtccactggaggttagaattttccattaatatataaaaccatagaagaacctcagactgtttactttgaatagctgatctacacagaaaaactcaaaaaaagagagaatttttgtttgacacaatcttagtttctttatggttcttgttctattaaaatccgcctggtttttcttatccttccattactatatacatatgacatcagtaaaatacacacgagtagaacttttattcatatacatgaaaaacaaatggggtaaaaaatcaaacaacaaacaccaattgacacaaacttggatgaagagggaaagggaaaagactcgatacagaatgaaaagggaagacaaaagagaaacttcttagtgtaggaatagagtggaagctagagcagccccaagaagagcagcgacaaatgataaggaagaagctgcgctgtttggagtgtcttcagaagtagtaggcgtcggtgctggggtcatctcaaaggttcccgagacaggtggagaaggagcggattctcctgagggagctggggctggggacggcggtgatgatgcggtgtttttgttgccgcttctatcagccatgacgatgaccacaagcttctcgtttttcttgcagttgtctttgtttccactaatgaaatagtatggcccagagtggttcagcgtgacagaagttttgccatcggcgaatttagcggttggtgagtccgtgttgcagctgtcgtaagcgtctcttgtgacttggagcactgaatcttggtttgattggtagacgaacactgcattgtataaatttgtgtcatatgcgaagaaactaagattgcagttaacgaatcaaatagtatcaatacagtgtgaaaaacttacacagagagtcaccaatttggaatctgctctgttctgcccattgactgtacacttgagaaccagaagggacggtccaacctgttgcaccaccgaccgtaaactctctagcgtaggctcggtcaacgatcataagaaaacacaagagaccaaacccacaaagcatcatgctctttaggtttcgtgccatttcgtaagctaaataacagagattttagaaaggtgaaggtgaatctagtgtggtatagggtttgatatgagatgatgaaaggcaaatgggtttatataaaggtgatgctttttgattttgaggaaatgttgcagagaagctttttattgtcttttttcaaattctaagcaaagcataaatgccagaagtgtttcagttttggaatctcatgtgacttgcttcttctgtcaatggcttttgttctttgcttcagaatctttgtgttatattttattattacttttcggataaagatcttcaagaacgaagagagatttcacaaaaacatcaaatcaaagtactaagatcttcttcatgccaaaaaaaaggccaacactaatctgagattttgggattactagagaacaacatacactttaatacttttatagaccaaacaaaagtattaatacaacattgtcaatatttttccaacttagatcaatcatataacaatctgctccttttgatccttcctctgttcagcaacatcatcaaaacaccaatcttaagaatttgaagatcaaaaaaactgatcaagaatggtaagtatagttatctcctcagtaattaatccatcattagtgcaaaagccgcgattgttgcgaaaacaaaggacattgagacactgataccgcgtctatgccctgagctcttcttagggaaatgttttggaagcgcacattcttctccattgaagaaaagctttgttgggaaaccgtcgccttcgggaatattcagtcctttgatgtttttcttggtgaaggagatgacagattgttgctttccgggcacgggagggtctcttaatggatttgttccattaacttgacctacaagatagttcataccaggcaagccttggaagataacggttcgattgcttggtggaacacgtgttccattaaaggagtaaacgttttcatatcctggacctgcctttcccatatcaatcgccacaaaccaatcctcaaacgcgaaatctctccaattaaaaacggttaaccttgcggtccaaccatttttgtaatccgtgctaacgtgccagttaatgctgactccgcagttatctggacaaggaagtttctttggtactggcatgtgattttgtttagcccaagctttagcttttaaggttcggttatcgaacggaacaaggagagcgtcaggagggaggaggagcgggttactgttagcattgcaagtgtcggtatcgatgtcattgcatccgcaagcacaagtgttgcaaggaactgcagagttgttgtaaaatgcagagaaagagacacaacatcttgaggcttgggctttaggcttggttatgttgcagaccacttgccagctggagatggcgtaggttacagccagtagaccgctaggatcagggaattgagacgggtcaacacgaaccggtggcccgcatttgtactgaggattgagaacaccgtcgattttccaatgctgaggtgggtatagagctgttctgtttaggtcaggaggcaacttgaaaacctaacaaattgagagaaaacaaaaacttcaaaacccgaagatttctacgatctcataacatattttaaacgaaagagatgatttacctgcaattgaaacatagatctagatttcgaaggatccataataggtggcaagagagttccgtttttgcaacagaaaggtaactttcctgtcatgttatcttccttcttctcaggaggcaaatcggaaatggctggttttctctgacaattcatgacctgggagaaatctaagtctttgtaatactgtccagctttgctataaaggcattccgatggatctttcttatgagtgtaagctcctcgcatagtgtttataaactctcctcgcatccattcaaaagtcaggttccaacggtctaaccgcccgagaggattatcattgtcgatggtcacttgggctaagtagttgctgtcgaatgattgcagaacatcgtagactatgttcaggtcaccgtaccttctcggtgcaaactttgtctttagtccgatcttgttcttgatcttagggtttctcttgcaacacacgtgcatactacctcctgcgcaagataacaaaacacaccgttttgaatatcacattcaccacatcttttttatttttgtttgacaattatattagggagtgtaaatatttaatgatttaacctaaattgattcataaactgcaaatgcaaacgcaattttttttttacgttttgcattgcgttcataatttccctataaataatattttgatgataaaaaatataaattagttgcgtttgaaacgatttgagtattgatctaaccttttcttttagcggcgggacattcccaaccatcgttggtgagcttaatagttcttggcatgggcgtgaccgcttttgaaaccccaaaaagagttcctgtgatctcgatattcgcagatatctgagtgaaatcaccggctgtttcaatagaggtttttaaatccatgtttggcgatccaacgaacgtggttccattgctcgcgtctagaggataatctccgtccataggagtcgcaccagtcgcggaaacgatcagttctttgtgacggaaccctatgaacatttgccatcccttaagctcttccctacccgcgtttacaatcatcgcagtcgatttaaacgcccatgattgggcggttacattcttcacgtgcgggtactctctttcacggctaccaaagttgtagctcatgaaaataccgttacaatgtgccatctccggcggtggctcagctcctcctcctccatcctcgcccggcattccataatcttggccgttggaaagaaaaagaattgatgataagaaaataaatagacttaatgaatagcgtacgtcccaaggtatcttcatccccgttttaacgtcaatagccctcatcgttatcaatctttttcttcttccccaccgccttgtgattactggaaccgcaaggcagcgagagagaaaaaaaaactaggaatcaaccaagccttttaaacaaagacgaagattgatcaacgaataaggtttaatgtgaaaaatctgtaaaaaagtatcaaaatccaaaagtttaatgcaaagaaacgaagatggttggaaaagaagatgtcttaatatgagcctctggtttaatttggtggtcacgcggagagacatttaagaatgtgtgttaaggcaattgctaattttggacacaagagtttcatatttgttgcttaacttttttttttttttttttttgagcaaatttgtttcctaactaaataaccaccgcttcgattattttcgatatgaaacaaactctggtcataaatttactcggtgggttccagaataatttggatactagttctttgttttcagttcagagtttttgagctttcttgaataaagcgaatatggatgtagtattatcaatttagtaaattttcagttttttttttgtttttcttacataaattttcttactgatttttattttatttacagtttatgtggtaacagtttttaaaatattttataagacaagttgttcaatttacctggaaacttctagattgaattggccaaacaacttttacatacatatgacggataattttgttcatgatatcaaaaactaagatttaacttgcggtatatagggagataattttgatttcacataattttgattatatcaatctgttttgatatgtataatattggtaatgttaacaaagtaaaataatgaagattaaacccatattaaagtatctgatcaatgatattttaaatttttaattatctattttaaaaaaatccgccatataactcatttcgatataaatatatctcgtgttattaaactttctattaactttaaaatttgaaagtttaaaatttactatcagaaaactgaaatcgtaaaccattgatatatttttataaaattgacgaagaagtcaacaaaaatgacatgcatgctccatagaaaaaggttcgatgtacaatatttcggggttgatatcttaactttcaagttcaatatttaaccaattgtatcgctaactgtgctaaatattttggtatgactttgccagtcagttggtctattaaatatcattttctttgggtcataaaaactataacgatcttcttcagctttcaggcaaaaataccaaaaccatgacaaaaatagatccagaagaagaacttggtcgaaaatgttgtacctgcttcttcaagttcatcttcacaactcgtctcggcgctcttatcttatggcttagtctccgtgccaagaaacccaaatgctcaatccaaaacttttacattcctgccctcagcaaaaacctaagctcacgagacaataccactctaaatttcatggttcgttgtgacaatccgaataaagacaaaggaatctactacgacgatgtccaccttactttctccaccatcaacacgaccacgaccaattcatctgatcttgtcttagtcgctaactacacagtgcctaagttctatcaaggacacaagaagaaggccaagaagtggggtcaagtttggccgctaaacaaccagacggttttacgagctgttttgcctaatggatcggcggttttcaggctggatctcaagactcatgtgagattcaagattgttttttggaaaactaaatggtataggagaattaaagttggtgctgatgttgaagtcaacggtgatggagttaaagctaatgagaaagagattaagatggagaaatctaatttttggaaaactcatggatattggagtgaatttggttttgacgatgatgttgaactcaccggtgatggagctcaaaagaaaggaagtaagacgaagaaatcggattcttctttaccattaagaagctcttttccgatttttgttttgatgaatttgctcgtattctttgctattcgttaacttgattagtggtgtttgatttcaacttttgcttttgtttttgttgatcttgattattgactctttcatgagttttgttctgtcctagttccattttcttcatagtttctaaattcgaccaagtactcattgcattcccttgttgtttttgttttaactatgtactagtttccatcaataaaattatatttgaaaattaattatccatattttgtatatgtacaattatatcattatctatctgtggtttcaaaatcaaggaacaaagaacataccaccaaaaagaaagtatatatataccaatataaccgttcaaatacggaaataattttttttttaagtccataaatgactaagggaacaatgatgaataaattccaaaaacaattactaaaatttgatattattattgcaataacgaataaatttatttacttctctatcacaaaattgaaaccgtaagcattgctaaatttttataaaattgacaacaagtcaagaaaaatgacatgcatgctccatagaagaaggttcgatatttggggtagttatcttaactttcaagatcgatactaaccaattgaatattgtattgttaactgtgcaaaatattttagtacgactttgcgagtcagtttagtctgttaaaaattattttgtttgggtcataaaaactatctatatctttgcatgaaacagcactacagtctacatcagatttataatttaaaaagacgcggtagtattttaaaacattttgtttcgtttattcatttattgtgaaagttgacatcgattacatcaaacaataatcttttctagatcattttcctaacgaatctattcagtgaaccatgtgacacaatttacattggttggtagtaatataagaatttcacatgtggtatattataaaataattttagtttcacataattttaatcaaagaaatttaatttgatatgtttaatattaataatgttaaaaatataaaataaatattaaagcttagagttaataatattttaaacttttactatagttgacacttttaaaaatctaatataaactatacctggtaaaactaaatagtttaactaaaaaatgaatcaaacaatataagagatattcaaagcagtttaacaatatctagtcttagatttactcatgcggattccagaataatttggatactagttctctgtttcagttcagagttattgcattttcataaataaagcgaatatgaatttagttttatcaatctagtagattttcagttttttatttatcaaacaattatttcagtttcttttttcaggttttatcaatctagtagattttcagttttttgtttatcaaacaattatttcagtttcttttttcagtttatgttcgataacaatgttttagatatacgataatcaagtagttcgaattaccttgacatttctagattgaattttccaaacaaagtttacatatatatatatatatatatatatagcggattgctcattgccattggttgtgaaatcaagaattaatgtggatggtaagatgtaaacttcttacaaaaagtctatttaggagaacgaaaacgtgtgaaggtcttgttttcctaaggtttcgttttgggtctcttttattttgtaccttgtaattctcttggccctttagccaactaagcacattttgggattgaatatatatttaaaaaaatatatatatatatatatatattaagaaaattacttttgaaatttgtattttgattagtgttgctaattatggtttaagcatgagagtccatccaattcgacccgagtcctatatacagtatggttcagcaaaagggtttgggcctggccatagttttttatggcaacaagctatatgaaaccatatataataaatacaatttcgtattttgatacagtcagtatgagactagaaaaactagccactaggccactgaccaaaaaataaaataagaaaaaaactaatctttatctcaccatatttttagatctttgaaattccaaaaacataattagagtttctctttccttagtttcttgtgtagtttgtatgtttcagtagggtttttttccttattttatgtaaataaatggaataagattcagttttctgttatgggacatccctcgttaattcttgttttggttctttttgataacccaaagtttatataggtttttttttaatttatcttcttacgtccattaatttgtttttgttttgttatgtatttggctaaacgcgtgtgtgcgtgtgtgtcctactgagtcgtctcttttgagtcaacttgaaatatcaaccaatcagcaaaccaaaatcttataacatcatcttcttcatctttccgacaaaaataccaaattcttgaaaacaaaaaaaaaatgaataatcaaaatgaagacacagaaggtggtcgaaactgttgtacttgctgcttaagcttcatcttcacagctggtctcacctctcttttcttatggcttagtctccgtgcggacaaacccaaatgctcaatccaaaactttttcattcctgccctcggaaaagacccaaattcacgagacaataccactctaaatttcatggttcgttgtgacaatccgaataaagacaaaggaatctactacgacgatgtccaccttaatttttccaccatcaacacgaccaagatcaattcatctgctcttgtcttagttggtaactacacagtgcctaagttctatcaaggacacaagaagaaggccaagaagtggggtcaagtaaagccgctaaacaaccagacggttttacgagcggttttgcctaatggatcggctgttttcaggttggatctcaagactcaagttagattcaagattgttttttggaaaactaagaggtatggggttgaagttggagctgatgttgaagtcaacggtgatggagttaaagctcagaagaaaggaattaagatgaagaaatctgattcttcttttccattaagaagctcttttccgattagtgttttgatgaatttactcgtattctttgctattcgttaacttcattaatggtgttgattttcaggtttttcatttcttggttttgttgattttgattattgactatttcatgagttttgttgtgatccttagttccattttcttcattgcataatttatcccttattttttttgttttaactatgtattagtttccatcaacaaaattctatttgaaaatcattttatccattttttatatgtacaagaaacaattatatgttgggtttcaaatcaaggaacaaagaaacataacatatataccaccaaaaagaagtacataattatataacagtgaatataaccgttcaaatggggaaaagaaacttataaaaactccataaatgaataatctaaaaggaccattagtttatgatttttaagcaattattccaaataaaattactaaattctatatttattgcaataacaaataaatttgattactactctatcacagaattgaaaccgtccctaaaccattgatatatttttataaaattgatcgacaaataagtcaacaaaaatgacatgattcatagaagaaggttggatattcgataataaaaaaatttggggttgttatttttcttgtccgtacgacaatatcttaacgttcaagttcaataattaaccaaccacatattgtagaatataaagtaattaagtgtgctagatatttaatttaagtatgactttgccttgagaatagtcgctagttgttctattacatatcattttggtagggtcatgaaaatgaaaactatatagctttttcacaaaacaacaggactttttaaaacatttttgtttcgattatcgtgaaagttgccatcggttactattacatagaccttaaaattatttagcagaaaaaacactaacccaagttgttttgcagctaaaacaaactcaagattagcaacatgaacatatcaaaatagacaaataagaataaagaagatagactatactatttccatttggttccggttattgtaccatgcctagtaattttctaatttcaagtcacattcaaaattaaggaagctttcttttcattaattttttaaatgtccattgaattggttattttgttgttgttgttgttaaatagtcgtgttcccaagttaacttgaaatatcatatcagctatattggaatagtgaaagcaaaaaaaaaatccatggatcgagatgatgcatgggaatggtttgttacaatcgtaggcagtctaatgactctcctctatgtatcgtttctcctggctttatgtctctggttatctactttggtccaccacatacctagatgctcaatccattacttttacattcctgccctaaacaaatccctcatttcatcagacaacaccactctcaacttcatggttcgtcttaaaaacatcaacgctaaacaaggaatctattacgaagaccttcacttatctttctccacacgtatcaacaactcctctcttcttgtggctaactacacagtgccaagattctatcaaggacacgagaagaaggccaagaagtggggacaggccttgccttttaacaaccagacggttattcaagcggttttacctaatggctcggcgatttttcgtgtggatttgaagatgcaggtgaaatacaaagtcatgtcctggaaaacaaagaggtacaaattaaaggctagtgtgaatcttgaagtcaacgaggatggagccactaaagtcaaggacaaagaggatgggattaagatgaagatatcagattcgtctccacaacgactaacatttttccaagtttgcttttcgattatttgtgttttgatgaattggctcatcttcttggctattcgttaaatgacgatgagagtgattttcattttccataggacttttccttttgactatttcttctgtttgaatattattacatgttttttgtttagattgtattagtgtagtgtagctttggtttgatgcatgtgtattaaccgtttttatccccttgtatataattaaggtcagttccaacgctttctatacaggtgtgggactgaatgccagaaaaatatatataggcttgggactggttagatatcgaataattagatatcggaatttttttttatttaattagatgtttcgaaaaataatcataaaatgttaaataaactgatctcatgatagttgcaaaaaaaaaaaaaaaaaactgatctcatgacaattgtttttaaaaaaaagttgtttttaacatatctacatagcaaaattgtttttaagaaataaatgaaaacttgaaaagttaatgaatatattaattgatagaaatagtgaaattaaaatttgaaaacctgaaaaacagtattcaatcactaaatatgttttttctgcatccaaaaaatataatgaattagtgagagattttattttctacttttttggattagctactttattattgtttattttttaaaaggtcatgaatcttgagatatttttctccaaatataggtgaatagagataatattttaattttgatagttggaacactcttattagagataatattttctatttctacatatagttttccaaaaataggttaattctcttctgaaaatagataactttaattattacattttttcaaatatagatagggtattaatgtcgttatatgtacttggcccaaaatgatcacaattttcgaaagtggataattaagattgttcagtatagatagtcaaagttctatatatggataattgattagatagttttcagtatgaagcgtaaaaatttgccaacatttcgtacaaatttgcattgttcatactaactaaggttgttttgtgccgaaggcagaaaacaaaatcagcaacacaaacatatcaaataacacacaacaggtgaatcatagcataagaacattaatggtttttataacattaaaactttgtccagagacaaagcaaccacagcttatttagtttcaatgaagtcttaaaataagaaaatgcataaaccaagttgaaaatcttaaaaagagacaaaaactgactgtagaaaaatagtcctaaaacagaaaccaatatgaaagttcctaagagaaacacatagcctgaccaattcaacaatctccgcatcacatcgatactcttgcggtttccttctactgtttcacaccgccgttacctgatttagcaaacagattacgtggattagaaagcaaacaaaagaaaagaacattgtatccatacatatatataaacaatacttacaaggaagaacgctttcggtgaatgggagcacaacaggattcctaaatccagtacgagggctctttcttctcttccacttttcagtctccatatcatatatacgccaatgtgtttcattcacacatatgatcttgttatctaatgcagttacggctaaaatcaattcatcatcttttattggaacaacatctttaaattgaaaaacccaactatatctctcgccgtcgtgtttccaaacccagacatccatgttctctggatgtagaacgagcaacccaagagaacctttcaggtttatcaaatgactagcttctgtaatctgctcgtcttctcttagtccatctgcatatgcaggcaagtttataacctcgaatttcccttccaaatctactgagagaatcttacctggcgcatctaaagaaacgagccagtaaacttttcctccgacaaaaatatgtccagttcttctgtatggcctaagactacaactcataggaagacaaggcacggtgccaatgtttttccaagaacccgtgctggacgaataaacctcgcattcataggctaaagagtgaccgtattttgtaaaaaaccgaccttcttgaacataaaatccctctgcaggtcctctttcttcaggaattatcttcccagtgcaaaaaatacggtaaactttgtagtcacttacatcagagccataagccactcctatactaggctcaaactcaaatgagggtgttccttggggaagaaggagagtctcctttgtaatggggttgcatatccatatctggagatcacagaacttgttttctacgtcttcatcataaatcatattcacacagcagatgatcccgttataggatgatatcatgtacatgaacacctcaggggttctttgagatggatcaatagtactgaggagggaaagtttacatctctttgcatccatcgaatacaacttcattgttttccccatactaggacagactaccaatgatgaattctttccagattctgctaactgtagctttgcaaggtgcttactaactgtcttacaataccgggcagatttgaccgagatctgagaccggatgcaaagtgcatctacaacactcatccgcttgatacgctgagcacgagttttgaccattttctgtttgctttctgttgctaaggctctgcatcaacaaaaacaacggttagcacagaaaagggactcaagcacagatatttatgcaacatgaatgcgtatttatatgactgtaacaggctacatcccgaaggagcacagaactgctaactactaatacagaaacgcattagtaccattcaaggtaaaggccaaaaatactgctaagaagcaccaggcaaccatcagaactaagcaaaagggtttgaaaatgaaagaaaaatgcatcacaatcgttcatgtagaagagtacttctatctgcatgtagaagagcacagaactgctaactactaatacagaaacgcattagtaccattcaaggtaaagaccaaaaatactgctaaaaagcacgaggcaaccatcagaactaagcaaaagggtttgaaaatgaaaagaaaatgcatcacaatcattcatgtagaagagtacttctatctgcatgtaccatatacacgagatcaacactgaattgatccaaagaacaaattgtgaaggatacaaaatctaaagtacctagaaacattgatcagaaatcagaataatcaaggcgatagttacgaagacagatcgaaatagagaaaacattatgcacctacacgaaatcaaggatttgtaaccaaaacaaaaaaattgttcctcagtcgtgttacatatctacacaggatctgaattgtattaaagtaattatgcaaaagcctaatcaaaaggcaacaaatcaagaaactgaagggaaatttataaatgcaggagttgatgaaatcatcgagatatgagatacttttgcgcgatcgggaatcaaaactttctcgatcgccggagaggactcacaattcgatcttcacgcgtgacggctagggtaggatagatgaaccgaaagggtgaaaccaactctttatatataatagcttctatcacttttcatctaattacaaagggacatatgtaagaatctcatctcgctgctaataacagttatgtataacatttagtcatatatcatgaatcaaaatctagcagcatagtaaaatttagtcgcacaccacgaataactacattaaaacatttctcatatacacagtcaacgtacaatagtctcataccataattaacttactatataatttgactagagagcatgcctgcaagtctgtttagagacagtccaaaaagatttactcttgtcaacagtacacatatcgacagttttatgatataagaaataatatactaatcaaaacatgcactaactttaaaggaaatccttggacactcattacaaagatgttagaattcatcactgtgaccattcatatatctagatacttaatacagaacagggaagaaaacgaacagaaacaacttttctgaagaaattgagttccaaaatgtgtgctttcagaaaatgcagtttgtatgtgtgtaacaatgactagctcaaacaaattcgcatctcaagtgcaaacatgaggaaaaagctaaaagaaatgaaagcatatgaaaccaatagttcctaggttagatggctaatcataggtccacttacatctgatgaaaattgtctatttaaattcaaaagggaagactttccagggaatcaaagggaaaaagtctgtttcatctcgtatggaactgcaaaccccactatgcacccatgaacaacagatgatagtcattctatcttagagatacaactacaagcagtctaaacttgtaaagaccaccaaacaagaatttgagctaaaggaacttctttcaactgtggaaaatgttcactgcttgtggaagaaacaagagaaatggacggacatatgaaaataacaaggaatagcaaaaatagtgtagatatgaaaaacatttctagttgctggtttcacactcttctatattcatttactttagcaaacttagcaatgttttgtctacttgttaaatgtcagtgagaaataccaaatgcaaacagagaaagaggctgaaaccaacctgtaacagaagcttgctgattcaccaactctcaaaacttcaatcacaatgatccatgaaatcagtagtgcctctttgattaccctttgaaaggaaaattcataaaaatgagtcttcaatttttataataaaagcaacaaatccaacaaaacctaaaccaaaatttcacataaaattcaattctatatggtctcagtatttcaccataaatccctaaaacatcgtataacgctttgaaaatggattcccaaatcaataaaagagtaaagaacagcatctgtttttcgttacctgataagcagacgataacggcaagagattccgattagacgcaattaaaacacccataaacggaaacaatttcatgattctattatcgggattttataatttttagtatcttctttttctgtttgtgggaatcgagaataatatgagcgaatttgaagaacacgtgtttggagaagaagaaacaattcgtgttatttctcttcgagattataatgatggccagtgttaactatataacaaattagcccactttttgatcttaaaaactaattaaaagatctccaatttcagtgtatcccgagattaaatattttaatcaacagtttttctgctaatgtaaaaaaaaacacttatgattccccttttatatcttcatttttcataaatctaagcaccaatgatgccaaaactgaaggaaaagctcaaaacttttatccaaaagaaaaaaaaaaaaaactgaaagtagttgagaactgaggaggcaaattaaaaagacagcgaatgatgtttagcttctaaacgggtcttaaaatttgtgacgaagttccacagataaaatcatcaagtgaaccaaatttactaatccacatgtaagattttggaaccgaaactagtcacatgggtcacctcaatccaaatgttaaaaaccctatcgaccttaaaagtttctatttaaaaaaaaaaggattagtttttgtctctgtaactggctccatcgaatcaatcaagccgctgaaagaagtagacataacccatgtctttaggaggatcagtcgagataccaactttgtcgtcattgaaaattacccagcggccttctttcaatatgtgagccacgtaatgaccacagtgcactgatgttcccatgtgacttactattccaaacagcttgtattctgcatttaagatcaatcttgagttagagttttattcatactgctttgtggaaaaaacgaaacactaacatttgttttgcaaaatgagatagaaagactcaaaagagggtttaagaaactaactccctcctccatctggtaatccactttgagccggagtctgcgctgaattgctagaggatacatccatgtctgaaacagatgcattagggttgttgaatacccagtctgttgctttctcaatgtctcctccctgattaaagacaaaaaaaacaaaaccgatttcagtaatgagtaaagaaaaaacagcctcgcagaaatgtaactaatttgctcaaaagtgttataccgaggcttttagtgccttccgagcaacatcttcagcaaaaccaaaggagagtaaggtatcaacgcttgattgatcaatgtcagatgtctggtgggagattggtgcatcgatgtctatgaaacataatgcctcatcatattagaaatcggtctcgagtcgtaatttagttgagcctcaactaaagacttgtggaactattttcaattacctggatcatccatgtgagaaagtaaccagttcattgcctcttcaaccccagcattggaagtatttatggcagctttctggcagtgaagctggctaaatcccattgagactagctgtgcaactatctcctcatttgccacgggctgcgctgattccatcacttcttctggaactgtatacagaaaaatccaatagccaacagaattataaggagactgagtgccataaagaaaccgtttaagggatgctgatactttttaatgattaggaaactgagtgctaattccaaaggctagtagtcatgacaccagaaaagataccacgagtttgaaacaatcaataaatggagtcaatcaatcattatttatgtgaattatgaacacaccactcctgtgataaatataacaacataccgccatctggcaacagttcttccccaggttggagtcctttgctacgcatgtggctgatatcaataacatccggaacatcaatgtatacatctgccacagtaaatcaagaaaggataataagtatttatatacagggacaataggggaacattataaggatcattgtttcagaaagaaagagaccaagtttctttggcacccagccttcctccataacaaatttccgcatgtgcaagaccaaataatctgggaaagatgtcaaaccagttgtcctgcataaaatgggaaccaaaagtcaagccttgctttcattctaatcttggttgcaaaagaattcactcggtaaaaaacaatatcttacttgatagctgttgtcattcccttcaaagcagagctatagtagtcttcaatcggctctgatgatgcaaaatttgctagacaggcttctaaaggaactcgtgggcgtactatttcatcacttgacctcctgaaaataaacaaaaaaatcttagataagcagtgaaactatgaaacagatttaaacttaagtccattgactcacatatcattctcttccaatccttttcctgctttttgcttgtgaaaggcttctaattcatcttgatcaccaaacattaagcaaaattaagaaacacgccaaacgataaaggaagaggaacatagacagacgaacaggatatacctttattagttgcctcatgtagcggaatgttcaaagaaagaatacagtcttccctcttattatatccaacctttccagacggacaaaggatcttctcttctattccaaacttgaagctcctcgaggggtctaaatctggtgtcgtgttgctagcacgctcaaccttgcctaccagatggaggaaaaagtcgagagcatcctacaagacagattggtgctagttagtatgaaaacataaaataatttcgttaactgatgccgaaaaggagtatcgttccaatacaagttaaaaaataaacaaaactccgaacattaaaaaagacatggttttcacctgctgtctcatagaagagaattctgcgtggctcgcggcaattacgtttttgaacatgcgaggaggtattccttcttgtctctattatcgattaaaaaacgaaacaagatgtaaagtcatcagaaatcaacacaagtggggtatgcaaaaaaaaaagtgtggccatccgcatacatatatttattcaaaagttaaacacaggacttcaaataaaaatcttacaggatctccagttgtagcatccttctgcaatcagaagaaaggcgaaatcaatgtactgaggctctaaaaggtggtttagatcatatacatatatatatgcatacaagcaaaaatatttcctactatagttatacctgagttgcaggcattgagtacttcccagatagtaagccgtgtccaagctttgttctacaaccaacagtgcaaggagtatgaaataaatatgcaaattaccatgcaattattcctcatggaaatcagattagttagaaaaagtgcacagcatatcaaaccaaacggagagaaaaacagaaactaaagcacgtgcatgcagatacagagtatgcacaaatataatcttaaaaccctttcatcataacgatgccaagatttcaatcacatgatttcagaaagtccagagcataaacttagtaacattttttctaacaataactcacaattgcatattgaggtccaaagttggatcagcaggagccatctcaaaagccatctttaagctctgatgtgaaaagtatctgcaacaatctcagaaccaaaagttactacagttgaatcaaagagcaaaagctt

SEQ ID NO: 58 - DNA, 58510 bp, Arabidopsis thaliana
taaacttatcgtttattctataaaccctagctagaatctacatgcaaattccattggggtaagttaagtacgtacgtttcagtctacgcgttaattttttttgtagtgtttatcacaattagactcgagttgacttattaaaccgacatggtcggtttctttcaattttggtacattggatcggtccatgaccgtgggaagtcaaattcgtcaattaatttgagaagttgttctcgaccgacatttttggttcccgattgaggtgtgagaattagttaatactgatttgagaatttttgttttttatgggtctcccaattaatatacgttttggtattattcaaaaaaaaaaattggagttcacatatatggacaaaataaggtctctttcgttgtgagtatcctaaggatgtcaacaactgtgaatgtgatgttgatcttcatttacccattttcttctacatagaccattaattatggttatatgatttaatgcaaaatgaatcccattatgctatccttaagtatttctatatatatatatatatatgatttacatattaatttgacatttttagaataattattctgaaatgaagatatatacatttctattaaaatgttaaatattgtagaacactaggtacgtagattggtattacacattttaagtctcaacattggactaacgagtttgatcatctaatctatatttacaaagtgtatacaagtagaaattcaataaaaatggtgaggtcggtagattggtagtatgaggagattaaattaggtaattgactatgtatttttttcttttctttttgcaaataaaaaagttttgaaaattaaaaatagattgttattcttctaattattcttgccatatatttagtgcattattcatatactctaaaaactagtaattaagactgtagtggagatttctgttggtaatgatttaaagtgcttttacagttgttatttagggttttagaattttatagctacaagtatttcatctataacatgttattacatttttttttaataatctgtatgttcttgttcttcagtgaatattgtttatagaattattttggttaattcgttataaagtttatggattgattggtgattacagagctcagttgtatgacctagccactatgataaatccaccaacattcgaaagtagaacgtagaaggtaagtgaaaatcatgatataaattacaaagttgacaattataaaagaaaaataaaaattgaatgagctgtgggattatggtagacatgtggttgggcagagaggtcatgtcgccttctttgctctctctttctctccgttctaccgattgcgatgttttgtataattaccctcaaaccaaagctcttcttttattcccgcactgatgttgctatattttcatagccccacaaaatttccatataattttggtctcaattaatgatagaaaatccttaagttttattttttctttctttcatgagatcataaaataaacaaactacagtattgtcaaacatcatttacgaagaaaaactagttaataattaccaacaaatttgtagtaactataaccgattaatttgacattgccaaacatcaaaaaaaaaaaattgttaactttaagatgatcttttactattatagacggatcaccgacttatgtgacggttaaactactaatggattagtgtggattagtgacgactttgaataaaaataggaactagaaagttatcaatattgtaaaagaatgttcaaaatttacaattagtatctcaaattataaatactactacaaattgttcttacatagtaaagatataagttcatacaaatatacaataaaactatattggcgttattggtttaggttctcgaatgttggttatttcaagcctaaggaggaacgacttgggaaataagaagcgactaataatgtacttctctactggtatatggaaattacaaagttttcgaaaactactccaaaaagtgttccacatcgattatatatgatatcatgattatatataatcaaataaatccacaaaaagagtgtttggtatttttatataacacgttctagccaaaagaaatgaagataaactatacaagaaagtgttgctagatagatcgagatgaggatattgatcattattgactgatgatgatagcgaaaaggtaaattaaacaaacacatagaaaagaataagaaaatggtatagataatagaatcatgaattacttttacagcttgatcatttttaaaataaaatatacaatcaacattaatctgttattcaccaaaaaataaaagatccaaaacctaaaactttctttcgatctctcccttaaagttttcagttcgcacgacgctaaaaggattgtcagtcctttttctctgctcaagcactcgtagatttttaattacatatcccttttcagtattcatcaagtgcataatcatatagtctatgatttttatcaagtattatatctattttctagggtttcaaaaaaagatgctcttcgattgcagaaactattatgcacaccaacctcatttaaataaatatataattcaatcgtctagattattttctatattttaatacaaatcattcggttagctttaggttaatgaatcagtgatctcacttttctctttgcgcgtgtgacattatttttgaccatgaaaaattaaataattttggattaagaaattattaaataatccggtttaggagatgttttaagtttagattcgggagtgttgtaaactctaacgtttagtttcggtgacaacttttaaattcaattttgatagtcgtgtatctattatccaacaaaatctcacttagagatatcagatatatcgcaaaattaatcgagatcaacttcaatagtttcatcttctacgaaagtaaagttgtcgccgccggcgtcttcaatttaacgtgtcgataacgttccatattcgagtttgcatatgcatgtcactggaaataatagttaaatcatctaaatcgcatccattaatgatttgatcatcataaaatttggtaaaaaaattacctaactcaaaagtaaaatataaaaattaatcgtttgagtagttaattagtttaccggtatactagttaaaagtttttttcctttgacggcgctcatatatatgttttaaagtatatcaaaatagggatttaattcttaaagttacactaatcctaattcttaaagttaaccatccataccaatttacagaagtacagaactagtgcttgatacagaggaacaattgatctcatcgaaagttgggacctttttaaaaataatactattatatatatataataaatatacaaatatatttaatatttattctatatataaatatgtgcataataacaaatctgagtatgaatagtaggaggggtgtatagggctttcaagtcttttcttacagaaactatctataactctagcagagagctcattatagaacagaacagaaacagagctttctaagtctacagcacagaaataaacctcatttacagactgttttactttctttcctttttgagcatttcttctttctgtttctttcctctgttttctctttctttccctttttgggtgtcatctctttaagacagaagaaacgtttctcagagtttcctgtgaactcatctgtttgttctcttcttccggtttcactttttcatgtcctgccgttattacaacgaggttggtttaaagatcagcttttatcatttttccctgcatgtaacaagaaatatttaggtttcatgtctgtttacaaatatgctctgtttctaagtatgcctctcacatttgtctttgttttgggtgtttttaggattgtgtttgatccgatggaaggattggaatctgtgtacgctcaagctatgtatggaatgacacgagagagcaaaatcatggagcatcaaggatcagatttgatttggggaggaaatgagctaatggctcgagaactctgttcttcttcttcttatcaccaccaactcattaatccgaatcttagcagctgtttcatgtctgatcttggagtcttaggtgagattcaacagcagcaacatgttggcaacagagctagctcgatagatccatcatcactcgattgtttgttatctgcgacgtcgaatagcaacaacacctcgacggaggacgatgaaggaatatctgtgcttttctcagattgtcagactctttggagctttggtggagtctcatctgcagagtctgagaacagagagatcactactgagacgacaacaacgataaagcctaagcctttgaagagaaacagaggaggagatggaggaactactgagactacaacaacaacaacaaaacctaagtctttgaagagaaacagaggagacgagacaggaagtcactttagtcttgttcatcctcaagatgattcggagaaaggaggtttcaagcttatatacgatgagaatcaatcgaaatcaaagaaaccaagaacagagaaagaacgaggcggttcttcgaacattagtttccaacattcaacttgtttgtctgacaatgtcgagcccgatgctgaggcgattgcacaaatgaaggagatgatatacagagcggctgcatttagaccggtgaatttcgggttagagattgtggagaagcctaagaggaagaacgtcaagatatcgacggatcctcaaacggttgcagcgagacagagaagggagaggataagtgagaagattagggttttacaaacattggttccaggtgggacgaagatggatactgcatcaatgcttgatgaagctgctaattatctcaagttccttagagcacaagtaaaagctttagaaaacttgagacccaagcttgaccaaaccaatctctctttctcttctgctcctacatcgtttccattattccacccatcttttcttccattgcaaaatcctaatcaaatccatcatccagagtgttgacagattataaacttttgagtttcatcatcatcaacagaatcatggcgtcttgattgttttagcagttctcaagaaaggcaacttctgtgacaagggtggtgtcgggcagtgttgtttacactttccagtctttgttttgcatttctttttatataaagtttgtattttatatagaatctgtggaattcgagggttgaaatattgtgaaaaacagagccgcaagaggttaattacagtctctgcaatattttcaaccttttattactttattagagtaaagatagcgtaagataattgcaattatgaagcgatgattatcaacaaaagtgtttagaaagtgcctccatctctctctacttaaaaaagtttagctttacttgaagaactcttttggagtactaaaatataaaattaatattcatcctctttttttggtactcaataaactctgtctgtctctgtaaaatatgtataaatttcgtatatctataatgcaaggttatttaatttgtgttacttatccatataaaaaaacgattttagtggaagaacttattattgtcttataattttattttcacataagtgtttttttgtctggctcaaatacaaaacatagtttggatggagtttagtaagagttaagaatgttgaaggcgtgcaccttgagaatataacttcacctgactcgtacaccctaaaatgctcaccacatgcttctctatctcactctccatctttttattcttcttttttgtcttttggtttttgtcttatttcgtccctaaatctccttaatcacattctctttcgtttaatagtattttatgaagttcttttgatggatgtgtttttttgacttgggtacattgactatcaactttttatttattcgcaataacacttacttaattgctattttcaaaataacatgctattttgttctaagcttggtttacattaagaaagtaacatgctcttgagctggcttgttaattatccgcgtatttcaccaaacccaattaaatgaatgttcaaaacataaaacatgttatttgaatatgaaaatgtgaacattggtactctatacaaggaactatatttttgtaatgtgtttaattccgtattttaaaatgtttgtgcctattgcgtcgccaaaagaacacacaaacatataacaattttaattttgttttccgcatgtaagtatatagggcaggaatggtttttcttggagcatgcctatatttctgttttattatttgattgtctatgaaaatctttgtagaacgtgaactccatagaagagaagaaaacggtttaattaaactaaaccaagtttccatttggaagagtctcataaggcctattgcaaccagctattggaaagaattaaaatccatcttgtaatataataccatagtagtcattttttgtgttcttaaaattaaattagttatcaacccaatgaagcaatcgaagatgcaaccgactaggtctggacgtttggtagtttcttatgaaaagaaaggtaacaatgtcgactaacaacatttgaagtcaaaatgattaagtagataaaatataattccgttatttaatatcataaaatcatatattcaagttgactccaaattacaaacagaaaactctaaaaagcaattatgtagtatgtaaaagtttagtatataataatcaaaagaaaaagtcaggattcgatgggtgttgcaagctggggagataagagagattgatcattcatgttgacttttttaattgaacggttatggccttttgtttgtttccatgtaacattttagacaaagatgtcccttcgaagcaacctatttttagaaagttttgacataacctaaatcactctttatatcacaataaatccgacgtttttggtcctactaatcataagagaaatcctccaaagttctaatatggtccgcaaatcaaaccaacaaccttattagcacacacatgtccatttattaaacacatataatcaagaaaaagtatcttctcaaatcagaggataatacattttggtgacgaaagctggatatttttgatttcatcaacttggcaacttcttcacttatattggaaaaaacaacatccagttgtccacaatcatcaaatgatatggtatacctctctagtctctattatcatcctcatttgactttattattcatcaacttgttcttccttcagaaaatgaaatccatttcaacttttttttttactttaaaaaaaatatattttttctttctctttaattattccacatacaacaatacactgataatctttacgttaaatttattatgcactaaattagaatgctactagatatcaactttgactacatcgtaaattttggtggacaaatatgatatatagttaaaataaactaaaaatggaagttgttgtataaaatgtacgtgtataaatcatttgtaatgtcttattttggaactatcatattacaaataaataactgagtcagttagaaaaaccatacagagcaataggcccaggatgagtcaaatatgatttaacgtacagaacaagtcacttttatatcaaacaatgacgtgaactgagatagaagatggtcgtagcgagcaattggcaggtgcgcgcttcttcccctcgatcatatttgagtcatcccgggcctattgctatatatctagagcttcgaaactttgatcacaagaaacgtataaacatgtctcatcatttgctttgtttattccactaagattacatccatttctactacgttttcattctgcaaaataaattaaagagagttatgattggactttatcctctttttttaaccgtagatcgagtctatgctgctaatcttgattccaataaatcacattcattaatgacataaattcattacaaaacttttaaaattttcctttgaaaataacaaaaatccactcaagaaaacaaagataaaatgactcttgcagtctaacgagcatcaggggtagctccaatatcaaagttcatgctgacttctattgaactctctgagttcatgttttgactcgttcctcctcttgcgttttcatatgacaaacattcgtttaattcgataacaacttgagacattgttggtcttctagctgaagaaggatttagacatgacattgctagttcaactgctctccagacagaaccagagtcataatcaccataaagttttggatccataatgttttgaatgtctccttttgtaagcattaaccccacccattctgctatatgtggtttttcacgactttgattgatcacaagttggtttgtgatgatctctaatagtacaattccaaagctataaacatcacttttctcgttcaaccaatttgttcggtaatatctgcaaaatcaatatttatcctattaaaaataaaaaatatatatgatatcctatcaagtgatgatactcatgatagatgaaaactagcaattacccttaaaataaaatttaaaagaaaatcattgcccaacaattatgaaacttactctggatcaaggtatccaggagttccagcaacaactgttgacacatgagtttctccttcaattggaaaagatctcgaaagcccaaaatcagctagcttagcatggaggtgttcattcaacaatatatttgtggttttaacatccctatgaaccattggtggtttgcatccattatgcaagtattccaaacctatgcaacaaatttcattttcatcaagggttaagcaaatgaatagaggatacaagcaaaaattatattaaaactcatatcaaaccttgggcagactcgacaactatttttagtctagtttcccaatttagaatagatccacctcgctttcctacatttgaatcaacatataaatatgtgaaaacaccacaacaaatatgtatttgtagcaactataaatacttacctgacatatgttctctcaagtctccgttagccatgtactcgtagataagagccaagttttctccttcatcacaatatccaacgaggccaaccaaatttttgtggtgaactctgagaagaagttccacctagaggagtggaagagcaatacatcaaaatttgacatgttactctaataaaacgatagtgtttctacaaacgtttcttaataaccttgctaaaacttacctctgctttgaattctttatatccttgagaagatgagtgtgaaagcattttaacggctacttgttcagtattatttacagttccatgataaaccattccaaatcctcctttaccaagaactctttcaaagttatttgtcattgttacaacctccgaatatgtaaatcttctgttcttagtcattattgccgactctgaagatctgattgttctaacttctgatacttgagtatatgaagatggacctaaatctaatgttacaatgcaacagtataatgagactttttatacatagtgaacatatgtattgcagtattcaaggcaatttaaaggttctttttgtgtataccttgactgtttgatgtctttttctttttgaaaataaaaaagaacgccaatgcagatccaagaacaaccacaaacgcaactgatgcaacaatcggtattacaacattcattttcttggcaccaccattgccagctttgtttacacataatccatccggacaaatcagattggcgtttccttcaagactatgagttaccaatgttgaggaaaaaaagaaatttaccagtcatttaggagacttgagcacaaattttatatagtcatgaaaatattatatgagaaaagcttacattagctttagtcctttcttctgtaaaaggatttgaggaatagagccattaaaattgttcccacttaaatttctgttaagatagacacaatgttagaaacataggcaatcttgtagtgcgaagaggctaatagattataaaaaattgtcttgtttaaaacgactcacattactaagagtgattttatgtcagcaagaaattcgggtattcctcccgtcaaattgttatttgacaagtctctacataagcatttgtaagtacaaaaatatgttataaacaagatacaattaaggtgaacaaatagttttcattatgctcagttttgaaatacgaaatacttacagttcttgtaggtgtgtcagattctgaatgccttgcgcgatgatccccgttaaatgacttgacgataagtttctaaagacatatttatgcatgcacacatttcatttacagatgataaaatcatgtgacataactaatacaataatttaagattgatcttacaaggaagtgacaataggcggcgtggagttatctagattattgcagtttaaaccctcccacaaaaactgtttaggaacgcatggatctccttgccagctgattttacttaatccataagtgctttggatactcttgatagcagcaactagaataaagttattgttgcatcaaaaaacaacccatgaaattatatttatagaggaaattgattgaaacatatagacttaccatcatctggatttgtttccatctgtggaaaatcgatcacggtgaaaacctcaagagcgttcatgagaggaggaagagtagacttaggtgttttcgtcaactccaagaggcatgtcccatcttcacattgttgtggtgtcgaatagaaaatggtttcggtggctaacgttttagggctgtagcgttcataagcaagttttccattcaacgtcactttgaattctcgggtatcgagggaccgtagagtttgaatctcggcaaaatgcatgtacacataaaattgggttgtggaagatggcaataaccatgagaagttccatgttccaaaagtacttataggcgttgaggctgacgccatcacaacttctggtggtgcataaccattagaactgtttatattcagattggttgttaactctgtccactcttttgcatcaaagaatggataccatttacgatcattgacatcatcagggtacctatcaaaaatatttttgtcatgtattaaagactaacattttacttaaaaacaaacttactgaaacaaatcaaaatccatattaataaaccaagatgctagaaaaatgtctataccaaatgaacccaatccgagttttgtgcaaccaaaaacctaataagtaattataatctttaaacttcaatatatacactaaatttattaaaggtttaaaacaaataatcttcgttaaaaagtttatcctaaacggatcaaacagaaccagaaaccaaattttgttcatgattaagtgaaagggcgtgattcataccgtatgttttggcctgaaccgctgaaataatatcggaagaaatacttcagagagccactctgagtattgtaagtattgtttttaagtggtcgtagctctaacgtattaatcataggtgagcttgttcctgtcttaacaagacagacctggagagacttagatatggtcttgtggataatctcctggatagtaccattggtccgtccattcatatcaaccgttacccatagattcggaccaaggtaaagatcgaaactcgggggattgttaagaccatcgtagttaccatacacaaatacagctttgatcagatagtttgtgtcttgcgtgacattcaaggtatagcagtttcggaatccgtccgggaagtatctaagcttcaaagacggtttactgaagatcgactcgaacgctttctggattcttccagttttgccactctgcacgaaaccatcgtccgtcgagtatgttaatccggttgaaggatcgttgtaaggaggctcatttggcaatgacccgcaatccaaactaatgaatcctagtaacacaagcgaacaaaatgtatcagaaaactaagtaagaacataatttcgacgaaacattatcaaaaacaacaaagaaatgtgtatatgtatatacctttttggtcttgtgcttcaacgaggtgtaaaagagcatagaaagagatgaagatcaacgcacataacctaattgcttgaggatggtactccattattcttctatgaaacaaaagagagagacatttacaaaaagaaaaagcagaggtttgagatatctaggcaataatggaaattattgaaaactaataagcacgacgttatttttgtaggtcaacttatgaaaaaaaatatgtatacaagagtcggttgtctcgaacctaaataaaactaaactaatatgtttgatttgattaacattctataaagatttaaaaattaacgatccaataatcttccaatgccgtttagttgatgtcaatgtcctgttttttaacgttgtattcgtacgtatgcataatgcactaatatatcttattttcgactaaataaatcaaattgaagtaaataatataacttggtttttgctttttgtattcaattcagttttggttaggcgcgtttgttaggtttttgatttttttttcttttcttttagtttatatacatagaatccatattgaacaatatcttggtttggtttggttcgacacactttagttttaatttgaattccaatttccagaaactgccatccatattccatggtaagaaacaaaaaaaaaaaaaatccaattcaatggcaaatgaatagccaaataggtaagctacaacgtggaagactaattttacattgtttaaaaagaagcaaagattgtgaggatcaaaatggttccaaaggcccaacaatcacaacaaactttgataaaaaaaagaagtaaacgtagcaattggcttcgctagctggaagctggtccagggaggatacgtgcatggaacacacaacaaaaccttcttatgatttaaatggtcgttgacttttgacccttgtggttttttggacaaaaccctgtgtttttatttcatttctataaaaaagatttatctgcctttgttatgttttcttcttattaattaagttatcatcggacaaagttcaattactagttattaaaaaaaaaggttctatagttattataagtttgtaacaaaaaaaaaaatgttgtcagaatcagttgataacacatttgtctaattccttcaattttgggccaatgaaattcgaaagcccaaattacataatgggccgaaccatattattctctctctcgctctctttctttctctgtgctcttctccttcacggcgaagtgactcacttccatggattcctctctgctctcggcggctacggccgataccttcaacggcaatgcggcggatcaaattcctcctccgttacagcctccgggaacggatatgactggaatttccttcagggatcagctctggatcaattcataccctcttgatcgtaactacatcttcgattacttcgctttgtctcctttctacgatacaacttgcaacaatgagattcttcggagaagatccattcaccctctcgatctctctcacctctcgtaagctcctcctcactgctctacagatagggttatgttgaaactcataaaggtttcaactttaggtcgaattagggtttggtctcacctgggatactgttagagaaatggagatagatttaggtggagaatttagtgacaatgtttgattgaaaccattgtgattatattatgtaggaagatgacaggtctagaatatatgttaactgatgctactgaaccaaacctgttcgtctttcgtaagcaaaagagagatggtcctgagaaagtcacaccgatgctaacatattatatcttggatggttctatttaccaagctcctcagctttgtagtgtcttcgcagctcgagttgtaagtttcttcctcttttgatttgtgtgttgctgatgatagttgtctgttttagtttctgaaacgttttgttttcttctctttctcattttgtatgtttgaatcagagtcggactatttataatatatccaaggctttcactgatgctgcatcgaaattggagaccattagacaaggtaaggtttcgttctcttccaaaagatcgatggctttgtatgaaactggacgaaatatatatgttgtttgtatgaactatttgtagacttgcaagtgtgcttagttgcaatagtcttaagtttatcagttaacttaggaagctactttttgttgattttcaagctcatggccaatggtgaacaagtttatggctttaacaagttcttgtgtaacagttgccctttgctgcaacttgaggtagataaattacttcatcagtattgtgattttttatctatatgttctagttgatactgaaaaccagaacgaacctgctgagtcgaagcctgctagtgagacagttgatctaaaggaaatgaagcgagtcgatgtcattcttacctcattatatcgcaaggtacatttgtatttgtgaaaaaatctacttactgtatcactaaagatctcttgttggcatgacgaatgttactgactctacttcttatacttctcttctgattgtgagacttgcttttttgtgttgcgttgtgcagttagcgccaccacctccacccccaccctttcctgaaggttatgttagccaagaagcattaggagaaaaggaagagcttggaacacagggaggagagtcacaaccgcctcaagttgatccaattatcgatcaaggtcctgctaaaagaatgaagttctaagctcatcaaaattgtttcttcatctatgcatgtatagaatttttaggtactagcaaaggctcttctactttttcgcattgtttaatctgaactccttacacaattgttgacatgattacttctcataaagtttcgcatatgaaagtcatctcaccgcaactacctcaaggtcaactaagcaataattgcagcatgtatttatttcagtatctatcatgtagatggcttattttggtcaacggtaactagatttgatcttcttggccaacttgttcagtttacttcctctctcttccccggctatatagtcatcttcacaccatggtttcaagtttcaacagcagctaatcggtttcgttcactcacattttcatattcatacatcttaaagctgcgatgaaaaccgggtcagcaaggtctaccatcctcctatatgttttatttctcgcactggtcttgtctccaacacttccatgtcaagcagctagtgtccctctaggaggtaagctaattaatctctgaaatttctcccatctactatcactctctctgttttggtttttcatagggagaaattgatttattaatggaaaagtgaagggcgtaagatgatggcgccaccaccacctattctcatgtgtacacagtgtgcatgttgtgcaccggctccacccggttcttgctgccgttgtggctgttctggtggtccctgaagactctgacttatgctatccaatgtgctatccaaggtccttaattccttataatatgtatgaacacgtaaacaaaaagtgtattctgtgttttgaataataaaacctttgggttctgctcagtacttatatgtttataagttagttttgatgtcctccttggagagttgatgaactactgtaaaaaattaaaaatgtcgaaatcctagagttcacaacaatgtcgaagttaatctttcgggttatgaatgtaaaaccatgtttacaatacatgcatctttgtttgaagtttataaaagtcagctaaaaatggtacaaggttatttcttcatctatgcttgtacagaatttttaggtgctagcaaaggctcttctatcatcgtttaatatgaactcgttacacaaagtcatctcatgcaaactacctcaaggtcaactaatcgcaatagttgcaacatgtatttattgcaatatctatcaggtagatggtgatatcagaagatagtgtatatcaattaccgtgtgaaatcaaaatatagctgcatcatcaaaactaatggcttattttggtcaatagtaactagatttaatctcttaaatattttattgctaagtcctcttcttgaccaaacgtcccggctatataatcatcctctcaccatggttccaagtttcaacagcaaattggtttagttcaataagattttcacattcacacatcttaaagctgcaatgaaaaccgggtcagcaaaatccaacatcctcctatatgtttttgttctctcacttgtcttgtctccaatacttccatgtcaagccgctagtgtgcttctaggaggtaagctagttatctatgaatatcctccactatactgtatgtatgactctctctctctttcagttttttagagggattaatgattttatttttcactgaaaaggtggagggcgtaagctgatggcgccgtcaccaccaattcgcatgtgtccacagtgtgtatgttgtgcaccggctccacctgattcttgctgcccatgtcgttgtccaggcggcgcctgaagactgacgtttgctctcaatcaaatgggttattttgatgtgttaaatatgtgtaatctttataatatgtatatataagtaaataaaaagtgtaatctttgtattgtgaataaaataaccttgggttatgttgaatagttttactataagctagttttgatagtaacacacttttatacattgttttcttagttggtgataatgggatcacaaaagatttgatattatttggaaagaatgtttgacaaaaaatattaagaataaatgattcttgtttttagaaaatcgtgtgaaaaaccctcttcattatcccataaccgatacgtatcatttcaatcttcatcttcgtcacttacttacgaaatctcaaatgaccttttcccattattttatgttttaattgatttgcatatttgttgtgttgtgcatgtatatatagacttgactataagcatttgaatgtaataaccaatactcacttgtacatgaatttttttttatagttcttcaagatgacgagtaaacatgtttatttttgtaaaagtccactttgtacagtaacacgcagccaaacagcgcatgagaaaaaagaagtaaaaatgtattttccatcgttcatagttcaaagtagagtgtagagatgtgcctcttccggtcctatcactggttttgaagctacaagtaagagataacaaactttcatgagtgttactacagcgccgtcattcatccgaaactgagatgtgagtgacaaataagattgatgaaaccaccaaagtggtgtcgtggaggaaggtcttagctctaccactaagccaagcaagatagtcgaaacttcacataaacgagttaatccggttgcgatgacacttttttctaagagaatttgctaaaactcaaagtattactgcaattaattgtcttctacactacaagactatatgaagtgtaaagtctcttgattgagtgaaaaagttaaaacttgaaaaattaaatttttcttcggaccaatcctgaaaacgtgtttgcgaaatgttaatacatacgtgagatcacacctagttttgtagaaaatatatcaactatattttttctgtgacaaaaagttttatattatattaatttggatttccaagtagatatgcaactttgactaaaaaaaaatataatttgattaagaatataatttgcaactcgaatatgcattattataaagagttcctattatcaacaattggaaaaattcgctatgagtcacatgacaagatcacaagatagcatacttcgagccttcaattactacagacaaaagtatttaatagtatcgtacctttgactttaaacatcctttgtatgttaacaatattactgacgtcttaagataattcaagagtggcaaaaaatccatgcacaaaagctttaactacattatctcaaattaaaaacaggattcaaacaacaacaaaagttgaacaaaaagagtaaaagaccatgggaaaatgtattattttcgtcaattcttatctccttattttatctactaacattctataaatacacacttagacatataagcttatagaaaccaaaaaccatactcaagactcattatgactagctctatgaagaaaatgattcttatcattttcatcacaaccatggttttatctccgacaagttttatctcttgtctcgcaggtaagtaaactgcttagttaactgatttaatttgagaatttacctatcaatttagagttttttttatgtatctctattcgcatatgaagatgttcatgctactgaaagtcccaccgaaccagcaggcaagaacattgacaaacctcatcactaaataatcagaacattaatgagagcattttcaatattaatttatcttatttgtaaacattttttaatgattattttgtagcctctcacgttactggaggtgataaagtagcatgtcctgcttgccgctgctgtgaaggcccaaaacctccaccgggaacttgttgccgttgttgttaaatgttaattaagctcaaaaatcaacttcctcgtaaactttagttaagcctcttaattactattagggttcaatatctacttatgttgttgtagtgttgtgtattcgtacttgtcttgaccaaataaaagtgtagctagccgcttaaatccatccgttgttaggatggtgctttggccaaagtgattcgaatataccttttatacacaaatacatgtttagaatgatgtgttattgtgttacacttttaattggtctttaattttcacacaaacatgcatgaataaatattctaacatatcatagagagtgttccacatcaaaaccaatttatagtggttcatggtaaaaaaaaatcatgagtctggtataaaaaaaacttaccataacatcatgagtatgttgtgtgatagtgacatcaaagagattgtgaaaatactaagattagaaaataatttgagaaaacatcagaaaaaaaatggcggaactgttgttggtggaaactccaatcccacagcaaaagcactacgaatccaaaccattcccggcggtgatatcaccaccgtctgcttcgattccaattcctgctctgtctctcccactattcactcaaactatcaaaactcagaaacactatctcgattctctcttgcacgaatccggagcagtgctattcagaggttttccggtgaattccgccgatgatttcaacgacgtcgttgaagctttcggtttcgatgagcttccttacgtcggaggcgctgctcctcgcactagcgtcgtcggtcgtgtcttcactgctaatgaatctcctcctgatcagaagattccttttcaccacgagatggctcaggtattgatcaaaatcagatttgggtttatgtgaatttgattttttacatctaaagttttgagctttattgaatttgattgatggtgtttgttaggttcgtgagtttccatcaaagttgttcttttactgtgagattgagcctaagtgtggtggagagactccaattgtgttgagtcatgttgtgtatgagagaatgaaagataaacatccagagtttgttcagagattagaggaacatggtttgctttatgttagggttttaggtgaagatgatgatccttcatctcccattggacgtggttggaaatctacattcttaacccatgacaagaaccttgctgagcaaaggtacttcatcatcacttgtagattctcacagtgtatgttcgttgagggggcttcttgataacattgatgaaacttgctttgatagggcggttgatttgggaatgaaactggaatggacagaggatggtggagccaagacggtaatgggtccgattccggctatcaaatatgacgagtcgagaaaccgtaaagtatggtttaacagcatggtagctgcttatacgggatgggaggataagcggaatgatccaagaaaggctgtgacttttggggatggaaagcctttacctgcggatatagtccatgattgtcttaggattcttgaagaggaatgtgttgctgttccgtggcagagaggagatgttttgcttatagataactgggcggttcttcattctcgaagaccgtttgatcctcctcgtcgagttcttgcatcactctgcaaatagattatgttgtctttcatgcataaatcaaagctttggatttcgaatttagaggcaacaacaacactgtacatattttggatacatatatgtgggtacatagtaacccatttccttattctaaacatgtcttaactacactgcagcagaaactatacaacataagaagaaaccaaagacaaactcgtcgtccttcttttattgtccgcgggattgaagcttttgctttaagatcttgcaaagaaactcgactcagagctcctcgtgtagctttgaggacttagatggtttcaggcctggtttgaggaattcagaaagccattttgcggattctttctccatacgagtcaagttgttcttgaagtctatgtagtaaactccgaacctagctgtgtacccgtcttgccactcgaagttgtccattaaagaccacaagaaatacgatgtaacattcaccttgtcttcactgcaagatacaaaaaattgaatctaaatggaaaaaaacatttgtacttaaaagatcaaagcttacaacaaagtgaggaactgatctcaccatatagcttcattcagtgccaaaagatgcctctggagatagtatttcctgttgtggtcgttgagagcaacgctaagatctgtatctttatcgccaaggtcctccccgtagcctataaaaataagattccgaaaatcaacaaaagtagaaaaacggtatattataataaaagaagattttgaattctttagtaaccattctcagtgattatgatctcagggctgttgtatctgtccttaatgtatttcatgagcttcctcaaacccttagcgtagacagccatcttagcagtgttgggctacaagaaatgatagttgtaaagtaattaaatcataaattaaaaaaaaaaaaactttttggttaaggaaagttgtttacctggctaccaattttaatggatccatccacagtcttcgctgaaaatgtttttaagaatttagttttagtagattactaaagttttggttttgctagttatgttaacacattgacatatagcataatatatcatttaacatgatgtactattgtattaggtaaggaataacgaaataaacgaatcttacgttcaaattcgactagagcatctgtagcccaagtcgggttccgactatcaaccttctggtcagcctttgcaaagaaggaagtgtaatagtttattcccacgaagtctgtcgaatctttcagttttgccttttgggctttggtaaatcttggcaaccgagatccaaccgcgtctttcatagactgaggatagtccccgaacgtggtaggatccaaatgcctaaagaaaaagaaaaacacaatgttgcaattatgtatatatataatcaagaataacattaaaatatatcaagagttgatgatttgtgtttttaaccagccaatgacgaaatcaagcacacggtttacagtcgcttgacctccttccacatcttcgggttcaaaccaagctggactatgagcgattccgattttaccacctttgcactttttcaaaaaaccgaaaaattaataagtaaaacttttaaaaaagttggtttatatgtcactgtggagaaacgaatgtgattaaatagggtattctgtttttaccttttcgcattttcggaaagcatcaacagcttcagcatgacccacgagtaaattgtgactgacaacataaggttcgaatcctgaccgtccatcttgacaaagctttccaaactctttgacgtaaggagaacaacgtcctggtgctttcttcccaacgtcgtagcccgaacggctaaagacccatggctcgttgaacgtaatccagtttttcactttgtccccatactcgtggaacgtgaagtttgcatactccacaaaatcaggcctatatattcacattttaaagtaagcaattatactttgatattacgtatagtagaaaaattactattgtacgaaacaacttaaaaacaataatcaaatgtgaagatatgacatgtacacttacacaatacgttcgcttaaaaagccaccgtattcatcttccaaatcggcgggagtatcccaatgaaaaaccgttactaatggtgttatgtctgaaaaacaataatttagtgagagttagttttttgcagttactatatgttactacgataaataaataaaaatgtagatataattgtggatatatagagttagagagagtctatgaccatttttaaggagctcatcaataagatcgtggtaaaattgaactccttctttgcttattcctttctccatcctcccatctgttatattattcagtaaccagctcttgttggaaaccaatagtaattctaaaattctcgtggcctatttttatttgttgaggaactcatgaatggtttaacttacgaggaaatattcttggccacgaaatagaaagtctaaaaccatcagtgttcagctttttcatcaactggatatcctcctgttgatttagataggcatacgaaacattagttataaaattaagtaattaacatgacttcgtagagcccatgaatctaacgattcactatgaaaattctaatcgataaaacttaataaaataaataactataaaaactgaaccttatgatgcactttatcctaagtgttatatagttaccaacttttacaagattaacttagttctttttttatttaactattcatcttgtgttgttccaaattattctttatacagttttgataaaatgttttcccgaaattaattatctggactacttcaatcatcttttagttgttcgaactacacgtgagaaaatgatactatcaatgatcaaacgtttaaaaagagaatctagaagctaataccttgtagcgatggtagaaatcgacggcctcgtcagcattgtgattcttaactctatctgcagtttaaatatagtacaaaatgttatttattatcaccagatatctggttcgctacacagttacttactataatactggtcgttaacaactctttataatacctcttggaatcaaattcataataacacacgagtgatgaatgcatgttttaaaaaaaccgacaactaataagtggacatatatatgcttcgtggtcgaaataaatagaaaagaaaagagacagacgtggaaatttcttggtgtagatgtcccacaggcttggacctctgcaaccttcatttactgcaccttccacctattttaaccatataaatacataaatcattttcattgttccatttcccaacatattcttagcttcacccaatgttttgtaagtgttttaatatcaccatttctatggatattttatctattttgtatacatatacatgtacctgaaaggctgcggttgcggtaccaaacataaagccctccggaaaacttgcacggctaagagtttcggtcttcgggcaaacaggtccttcttcagcccttgtcggagagccgacaagacttattagtaaaagtaaccccaagagaggaatcttcattgttgatttttttttataagctcacgagtgtgtttttggtcaaaaagttcaaaacaaagtggaagactatgttgatttgaaaggagaaatatcgttatatatttatagatatatacatgcatatatgcatgtacgtgacaccgatcaggtgatgaatttcaaagcccaaattgtatttggaggccgccaagtgtatttacactattacatgcagattgatcagttcttgaaggccaagtgtctttttgtcactctcactattgcatgcacattgtcaattttctgttatagtctcctcgttttaaggcgtgatattcgcatgtgtttgtaatattcgcatgtgttacacattatgtgtacgtcaaataaatctcacatctggatgttaagattgagtgtacgattctgtagaagcacaagtggatattgagaccaagtgtttgatatttgaagggtcataagcggattagaattttaataagtggaacaattatcatatagagtaacgtgtgatctttagatccacaagtttgggtttgagtcagtcgctatctaaataagtctccatgtctatataaaaacgcacttgcatgcatcagtcatcaccacaccaactctctcatctctttttgtcaacaaaaaaaaaacacagaagtacgtacgtagcctctctttcttaatggttcacttcattatttgcatttattatagcgttacaagaagttacaactacaaaaggaaaacttaattctcttcacccttttgtatatattatttttcagttatcttacaagtataatgaaaatgttataaatttatctgaaaaatgaaaaatgcatagccgtttttgttttttttaatgaaaagtttaacaaccggtaagatatgatcagatacaatggcggccgcaacgatgtcttgggacgacgggaagcacatgaaggtgaagagggtgcagattacatatgaagatgttatcaactccatagaggctgaatacgacggagacactcataaccctcaccatcacggcactcctggcaagaaatctgacggcgtaagggtttaacaatgttgtaaaacctaacttttcacataaaagatatttacatgagtagcaaaaaaaataatctgacggcgttagctagtactcttcacgaccttctccatatatactacatctttcaatttatggatgttgcaatgggtttagtttggtcggtctcggtcttgtggtcttgactcttgacgggttgccttagtttgattaactgacacttaattactaaatgaaaagaaaaaatgatgggtcctgctaggtctaataatagcatataaaaatgaattagggctaggaaaattttggtctactatatttttgtttataatgatttatttattgtatactttgatcgaactaatgtaatatatttgtttttgtaggtgagcttgagcccagacgagtacataacagatgttactggctactacaaaactacaggggctgaagatgctatagcagcattggcttttaagaccaacaaaactgaatatggtccttacggaaacaaaacaaggaaccaattctccattcatgctcctaaagataatcagatagctggtttccaaggaattagcagcaatgttctcaactctattgacgtccactttgctcccttaccttcctcttcgtcgtcatcgtccagtttgagtcaagccaacaaagttgatgctcaaggtgggaaaggaggaacatcatgggacgatggtgctcatgatcatgtaagacgagtgtacattggacaaggtgattctggtgtcacttatgtcaagttcgagtacgagaaggacgataagaaggaatcacgcgaacacggaaagaagacccttctaggagcagaagtggtgagtatgtttagttcctttcctatattataactagaaagttcaaatccgttgtactttagttatattatgaccgatcttgccaaagaattaacttatttgaaatctctgtatagtttgaggttgatccagacgactacatcacatcagtggaagtgcaatctgacaggatatttgggcaagacacggaagttatcacctccttaatcttcaaaacatccaaagggaaattctcaccgccctttggactcgagggttcacagaaatatgaactcaaggacaagaatggtggtaaactcgttgggttccatgggcgagtaggcggcgaacttcttaatgctctgggagcttatttcgctccttcatccggtcgtggtaccccttcagccactcagccacctggatcagctcaaccaactggatcagctggtgctaagaaactagaagcaaaaggtggtaacgtgggaaatccatgggacgatggtcctcatgaaggtgtgaggaaagtgtatataggtcagggtgattctggtgtatcatacgtcaagtttgtctacgacaaggactctaaggaggtccccggaaatgatcatgggaaaagaacactacttgcacctgaagaggtcaaatatgtatacacatagaagaaccagcatataacctcatttctaaattattgtttcatattagattttttttttgttttttttttttgcagttccttcttgaatatccaaacgaatatataacatcggtggagcttaactatgacaaaatatttggaactgaaggtgaaatcataacgatgcttaggttcacaacgaacaagcgaacctctccaccttttggacttgaaggtgccaaaagcgtcctactcaaagaagacggccacaagatagttggcttccatggcaaagcgggtgctgacataattcaccaagttggagtccatgtcaagcctatttccaagtgaagtttgtaatattttctcaagtcccggtctaataaaaatgagctatcaaaaaatctctgttctagaaattgtcattgtacttgtgtaaatggtaataaggtctttgacaatatgctacttgtgtgtttgtttgtgtttcaatgtctccttatactgtactggattggagtctgtaacactgtttcaacggtttctaagacgtatatataaaatcttggttacgttgattcatataatcatatatctaatttgcaaagtggacagttgtgggttgtggcaaacgtggttgtggcggtcgacgaatcatccattggagaagactagtggcataacacatcactaattctctctttcttatccatggttattactttcgctctacttttaaaaactatatgatccaaaagatcatatatgatttgttaccctgcaatttaatttgaaaaccttttatctaaaaaagagatttatttcttataatatgattctgttttggcatgaaatggatcaaaattaaaataacgcatacaaatttcattttcttattattgaaaattaatggataagaatcttcataaattttaaataatttcattttataatatttataaaaaaatattctaatggtttgatgcataatggattaaaatattccatttatcctattttataaaattggttaaaatcatatattaagaaataagaaatatttttcatttatgaatattcagtcaataaaagaaaaagaatactgcccaattcatcataaactattaaattaacataaattatgtataaaactagagaaaaccttatgaaatagaataaaaataaaagcctaaaacatcttatatattataaaagccttaagtataaagctaaagagaaactgcaaatttgaggtcaatacttttacaacctttttgtgtagaaccacaaattttaaagtttttgtttttatagtgttattgctttcttattagacctttttttttctttgttacggattgttcttcttcttcagagcacacaagctctgagatcccatcaataaatggcggtaacagagtcctctgtttatttactctaacaagtcctttaaggttttaataacccagtttcatgggggttacttccttgtatctagccctgtacgttcctcttctttcatttacttatctaatcacgacgaacactttccccaatttcccaaaaatctcatcttttacaatcgatttctctacattgtaattcttccacatagtttctctggatagtttcattaaagtttgagtttttattgtttttcaattagtttatctgtgacatttattcttcttgcgagcaacatcgactgattcttacctgtatgtttcgatttcacatagacacacgagagaacgctaatttctagtcctctgttttcgtggatcagtctgttttttctatgcaattgtgtgttcttgatgttgttgacacaatgatttcaggttatagcaaggagctcgtgatcatgagtggtacagagttagatgagcctggaaagttaaaacgtgctgtcattgatgcttctgctggtggtgttgctggtgcgatttcacgtatggttacctctccccttgatgttatcaagattagatttcaggtaagtaaagagtcctagttcattggtttttgtggatttggattatgcacatatgtgtttgtgactcaagaaaatttcttggcatgttaaacatctttgctttgagaaagtaagagcaaaaggaatggttattgaagtgaaagtattgaaattttcaggttcagttggagcctacagctacatgggctctgaaagattctcagctgaaaccgaagtacaatggtttgtttcgaacaacgaaggatatctttagagaggaaggtttatcggtaagtcgttgcctagataatgttcttttgaaggtgttaactgttgtattttgttatgctgagtcatttaccaatgttgtcatcgatgcaaagtgttcacaccaattcttttcttggcaaatgatttttcatcatctctaatggtaagcttagttttgttgagttggaatgtgaagtgttataaatatcttgattacgatgcagcctcgttgatttagacttgtctgatgtttgagaatctccacggttatgatacatgatattcaactgcagattttgagcactcatagatagcctttttctctctacaattttgtggacactgataactcaatgaatgaccttattctagactgctttaggaattgatttcttatggctaatagacactttctgaattttaaatcaagttgcttatggcagggtttctggcgtggaaatgttccagctttacttatggttgtgccttatacatccatacaatttgcagtcttacataaggtgaagtcttttgccgctggttcatcaaaggccggtacatcactaactttgaataaatctgttagtgacatgtattatatatccaaggtgtgatctgtacactttaaaacgcttaggttcatgtaaatttaactcctttaaatgagctgtttatggcgacatgacttggctttatataattcatctacatatcaaaccccttgaaaattacacaaaccacaaaagagagaacattccacaatgtttcagaaagttaaaagatagattttagcatgttgtttttgacaggaattctgaattctgatcttctgcagaaaatcatgctcaactgagcccttatctttcttacatcagtggggcactagcagggtgtgcagcaacagttggatcgtatccgtttgacctattgcggactgtattggcgtcccagggtgagccaaaggtacaatatttcttcagtaaaagaatgtgatgacatagttatgggttctctgtaacgtttactcctgtaaaatcaacaatatagtttgagaaagaaaggaaaaggataaagttttgagaatgcgttgacataaataaagtcattttttgagaaagcgtgaaacccatctatggagttctctgatattcatagaaatttttattatttcactgatgtcttagttaaccatgaatttattatcagctattgacgattgatatatcgaaatttttgggttaggtgtatccaaatatgaggtcagcatttctgagtatagtgcaaactcgtggaatcaaagggttgtatgcaggattgtcccctactctgatcgagatcattccttatgctggtctgcagtttggcacctatgacacatttaaacgctggagtatggtaagctatagcttcatgaatgttctcaatttttttttcctttggaatatataacatagatacacaccattgcctccaccacaactttgtgttctaagcagcagattatcttgaagcggtatctggagttctcatctcactgttggtatacattttgcgctaggtatataataagcgataccgatcttcttcatcaagctcaacgaatccaagtgatagtctttctagctttcagcttttcctttgcggtttagcttcgggcactgtttctaaactagtctgtcatccgcttgatgttgtcaagaaaagattccaggttagttttttgccatcttgtgttttagctatgtgttcttaatgttttaccaccgaagtccatgttaccagaagcctaaagtgattttacaaagcattttagatcaaacatcaaggtttgatacaagaatgtttgtcgctgcaggtcgaaggtctgcaacgtcacccaaaatatggagcccgagtagagctgaatgcttacaagaacatgtttgacggtttagggcagatattaagatctgaaggttggcacgggctttataaaggcattgttccatcaaccattaaagctgcacctgctggtgctgtaacatttgtggcctatgaacttgcatccgattggtttgaggcaaatttgacctgaacttgtaaaattcttcaattctatttgtaaatcttattctattttgcttttgagtaataagtaatataagattccatccttctctgaacagagaccaataatgcaaactctttcttactaggaacggtagattttcactaaatctattcattcatatcagcaaagtgtgttactgctgcagttttcaaaaagaatcatggcttggttgaaaaaagctttgtattcttagctacacagttttacattattgctcagcgaaaactaaaatttaaagtcaatgtcatctttggttctgtgttactcatcgaggcacaaaactttctaaaaactggcaaggacaaaagaaaccaaccagttctgattacttctgaatatgaacgaacagagcctttacttttttattcatattgtttcttctgcttatcagtaatctcttgaggtaaagacaggaactgagtgatcttctgaacctgagagacatcaatccggtatttttcagctatctcgttaacacccattggaccatggtgatcctgagattttccctgaaagagaagcatgatgtgtcgcacttgtgctacgttcaacgttccttgaggcaccgggttttcctcatatcttgttgattcaggagttgtgttccggagctttgggagtggccttttcgatgtctcaactactgatgcctatataaatcacaagtcttatcagtttagtcagatagatatatgtcttcatggatttatacacaggaaagaccaaaacccgcaactatatggcccttttgcattatctacatttctacatttcatctcttatcctaaacttaatttacaccatcaatcactgtcagctttaagattaccagcagaagaatgagacaaaatctgttcacttcttagttatgctaactatttcattggtgtgacacaaaacgctatcaaaggttttctaatctggttacgctacattaaacagttactctaaaatgtgaacttgttcagtccaatataaaattctagattgttgccagagactctggggcaaaaaccttaacatatattccagagcagaattagaaagcaacccagcattgttcatgaaaccttttgaacccatcttatctctaataccttaaaatcaaccagtaacgaaaccttttgaacccatcttatctctaataccttaaaatcaaccagtaacgaaacctttacatgactaatgacaaaaactccacaagatgtgactaagaggcaagacaaagggttcatataccattctcaacagctacataactaagataagcaccaactatcaatgcaggtaatcaggtggatctatattaaacatccaaaagtcacatacttgtcctgatgagaggacgagaatcgaatcaatgcatcaaatcaaacaagagataaacaaagcttaaggaaacaacactacaaacctctcccatctcagctttgcctccaggtttagcttttattctcccaaccatttggttcaacattgtatcatacttggggtctcgttcctctaaaacattatcctcactggttcttcgacctttatctaacaacagatacatacccaaattcagatcaaaaacgaacaaaaatttggaaacggttaagaagcagcccatcaatctaaatgtttataacggtgaaaactttcgaatacccaaatgcgagagatttagggtttataccagaaactccatcaacggcggcagtagacggagacgatttcacggcactgagctcctccgtaggaagcgatctccgatcaatggagactcttgatggtgatgatctctcaacttctttgattttcccaacagctcgacgcaattgctgacccatcaccgcaaaaacacacactctctttcagaaacagaaagagtccaatggattacgaaaagaatcgaaatttgtaggtatttttctgctgcatccgatgattacaatgggggagaattcgaattggaatcaaagggtagtggaagtagcttcatcagctgtgttcttcttcatgtattgaatggggcagagagaagaagaacgtgttcgtgttgaaagagttacacgcgctcgctttgagagcttgaaataagtgaataatattaagtcagtactacgtcgttttgaattaccagatagtactatgttgttaacacatggaccaaaaatcaaaacatttcttgaactttcgaaccggaggatcataacatagattacatgacctttcacatgactaattaacaaaacgttgaaaaaactttaaacttttattctggtgtattatcctccgatgatggaaccggaacaagacttggaagatatgtatagccggagataaaaggccaactaaaacctagttggtgttgttctatctcatcttggcttttgatctcatcctctccaataacgtagatgttgacggctacgtttcttttatctgccaatacttcctcacaacatactacgatcctattattcttatcaatgaaatgcaccggataagaaagattctcaaaagccagcaataccgggagatcaggtcttgtcacactaaataacttggtccataagatactcactccgttcttaaccttgttagtaacccatacatcgatctttgatgtttctttgctttggtgtaacaaagaaagattgtctcctttgaaagctgataaagctacaacattatgtacatcatacctaacgggaagagagcacaagggctcaaatgtctctgtagagaagttaaagctttggatgaagatgtcgggtttacggttccatttagcaatccaatacatgtttcctttgagtgacaaacctttacaacgcaaaaccacatgccaatccaaagaaactttaaaagttttccaagaattagactttaattcataaatatcaacctctggtttgtaagagcccgtatttgcatactcgtttttggtaaaaacaccgtttacgaacctcaagattttgtagctatcccgagataaaccgtcatatccaatgccgtagcaactacaaccccggaaagaaggattcaggagaaagatccatctaacctggttcaaacatgggttccaaactgccattgaacctgtttcgaaaatgcataacaataacccgtcgcagggaaccatagtataaatctcacctttcacttgaaacttgttaggaagtgaaaaagatgagcaagctccaactaccgggttgatgatcttaaccatttgattggtccttatgatatgttcccgaacaagagctaagtgcttgtaaatgaatctcttgtcgttgaaaagagcgagccatcgtttgcacgtcaacttgagtcgtaaaagagatttagttggaaccctacaaagtatttcttcaaataactcaaaaggcaacaatgaacattctttggaatccatggccatggagaggtatggcttctggatctttgtgaatagatttatgcatgaagctatatataatttaacatgttggaaccacgccatcttataaagattgttttaaaagagaatctgattcaaatatttggaaataaagatggtgtggcgtggatcaacatttgtcaacttaattatctaattttacaaaactaaaatagatggataaagcaattaaagtaagtaaaataaagaaaaaatctgaaatatatattttccctcaaaagttccagtcaatttcctattgttccctatgagattttattccatataaactaatattagcatttggtgaactataaatatgatttgttaagatattcttaaatcaaaactttttaaaaactatattattatatagttatagcaaaagattgcgtggaccagcattccaacttgtctagttaagaaaacttaaatatatatatatatataccaattaaagcaaaatgaattagattttgtaatatatatataccaattaaagcaaaatgaattagattttgtaatatatatatattcccataaaagctccggtcaaatttcctagcgttcaaataaattttattttaatctttcatttaacatagttattttgtgttgcccacaataagatgccccaaaaagcccaaatgaaactagtcaataagatacaccaaaaggaagaagcccaacactaaggccatgattgaaacaactaaaacttgaatgagttagcttccaatttaaggagatgatgcgaatatcgttgaagaagagatattactacttgtagttcatttccactgatcgcaagccaaaaaagtagttaggttctggtggtgaggaaaagtgtaaaaatgataaataagattgagaggttctgcttagtttaattaaagtagcatttccaaaatactttttttttgctcgagtcagtagtaatagtcttttgtgttttcttcattagacataatcatgataccaaaccaaacacattcctctttcttcggaataactattattttctattttatttttgtttttttctcctcccacagattgtaacctttatcgtcaagttgtaattaaaaagattcctctaaacaattcgtcaaaaagctgaaaagattcctctaaaaaaaatttcactacacttctagattgtctttagactagtacaatctcctgtgttgacctaaatgcacaatagattgttaatttaaaatgaagaaatgcgaaaacatttttaatctaagtttgtggttggtgagtcgaatgttatgaataaaactcatgacttttatgttaaatacgtatgaaaattactatgaagaaaagtaacaagaaaaatagtgaaaagaaagaaaaagagaagaaggcacaatgtgggaaggaagtgcgacgagaagatcactagatttggtcggcacatcactttctctcttaaactcataaacacaaagcatggcccctaccttaacgtacccactttcttcttttcaaccccacaatttctaatatcctcaagctcaccctctccacatttagtgtgctctttttctttttcttgttcttttacaaataaataaataaattattctaatttattttgtacttttgttccccattggattgcaagtctacttagatcttcaatcttcgtggtcgagaggttgagagagagagagagacgtacaagtttcaagtatgagtaaagacttccaaattaagacattggtttgcaagttgaaattcagtcaccactacttcatcatatactttttgtaacccttctctttcaatacacgtatatacttgatcagtctgttctcatcaaaatatatacattgattacaaaaataatttcaattgatgtgttaatttttagatatattggccttaatcgaacatgaaaaatggacactttgaatacagccaaagttgtgtgttggtaattgtaaggaaacatcgatagtgattaacactaccctaagaccgttgaaagaaatcaaaagaatgaaccctctttgaaaaatttaggagacactttagagaacttatgaatagtttaaaaaaaaaaaaactctattattcatttggttctacttgttcaacttggttaaaaatggaggaaagatgaactatgtatagaatccaaaactacaaaatatctaacaatatttatcctaatctagaaaacattcaaccataatatctagatttttctctgcaaatatatctagatttttcgacatgtatatcaagataatcaaagaataggattcttaaaacacttaaagaggtgatgatattttatgatgtttctagagaagctctagaatttgaatttggtccaataaaggataatcggataatgaaccaataattaagtttgactcaaaaattaattcagtttcagtaacactatttgttgtggtcttgtggacacaaacaatgagatctatacaactatgggtgatatgaatcccaagtaacaaataaaaagggcaatgaactgatagtgatttgagttgaaaattcataaaagttaatatggtgatagaagttaaacatacattggcctttaccgactaactcgaactgaaatcaatctaacaaaaaataggttcgattgattcgattggaattttgtcaagaataagaaccattatcttgaatttgtgtgttagcaatgctacatcaagagtaagatagaaattagagactatggattcgagttagatgtcaataaaccttaacaatatggatttttttctccgattaatctaactaattggcacgttaggtgaatttcaactataattggtctccgtttgcttttgggaaagagagaaaaaaaaaaaaaaaaaaaaggcaaactttaggaaaactgaattttcaagaaacttgacttttaatttgtaagcattgtctcgtttcgtataccgaccgtcaataaagtgtaacttaacgaatctctttttgctggattttcctaaaacactgatcctatgacactcttacatattattttatcttttaaatgtaataaaagcaagaaaacatacataatattaatatatgttcatactatggttcatacaggaaaattcgtatcataacattttttcatcatttatttgttccatagagaggctaaagtagggataaaacgtcacctcttattcacttttcttttatttcgtttaccaataaaaataaataatatatgaaagtaacatggtagtataattggagtgaatatgtaagaacattaattggaatacaaatttactacaccaaaaactatttttaaccaaatatgtcaccaaattcaatagaatttacactaatttttattgggaacacatgttcccatcatggcctctttcctcctccactggttattactgataaaataataacattagacacttaacaacggttgattctctggtattaatgaaaaaagaatttcgaaagtgcacaaaatggaccccaaactccacaaaacctgcaacacactcaattatacgcacaacatgcaaacaataataaacatcactgaccatccaagtatttcttctatatatgtagactctcactcttttacgactcaaagagcaaagagctaaagtccaaaaccaaacacaaaaacaaaaatctaaatttctttcttggtctgctttcaatatggctcctctacctatttcttcgattagagttgggaaaatagatgatgttcaagaactcataaaatccaaaccaaacaaagttccagagagattcattagagaagagtatgagagaggagtcgttgtgtcgtctcttaagactcatcatcttcatcatcagattcctgttattgatctctctaagctctctaaacccgacaatgatgattttttctttgagattcttaagctctcacaagcttgtgaagactggggatttttccaggtattattatgttatttcaactaggaaattttcttttatcaaagtaatatctaataatctagtttcgacattggacacttcatattttcttttaatagttgggttcactaggccatataataaattttagaaaaatgaatctcatgatttggttgttgactgcaagataggttataaatcatgggatagaagtggaggttgtggaagatatagaggaagtggcttcagagttctttgatatgccattggaggagaagaagaagtatccaatggagccaggtaccgtacaaggttatggtcaagctttcatattctccgaagatcagaaacttgattggtgcaacatgtttgcccttggtgttcatcctccacaaattcgcaaccccaaactatggccctctaaaccggcccggttcaggtcttttttcttttctttctagacttgttttggttacttcttcattttaactactctttcttaagtgatcatatatataggaatagtgtagttaatttgcgagcatatgacacgtaaattcaaatagtttatactaataagtgtcatctgcgttcgaaataagggttcaagttttaaaaagctttagtggatggatcatagcttagatatatatataattttttctgaacaacgtttgagtaaattactattattattttctctatctatagtgaaagtcttgaaggttactcaaaagagataagggaactatgcaaaaggttgttgaagtatatagcaataagcttgggtctaaaagaagagagatttgaggaaatgtttggggaggcagtgcaagcagtgaggatgaattattaccctccatgttcaagtcctgatcttgtcttaggacttagtccacattctgatggaagtgctctcactgttcttcaacagagcaagaacagttgtgttggccttcagatcctcaaagacaacacttgggtccctgttaaacctcttcccaatgcccttgtcatcaacattggtgataccattgaggtattaattttaccatatcaatttcctataattattatatcacaatttaaatgaagtattttaatttgtgtaaattatatatatatatatatatatatatatgtaggtgctaagtaatgggaaatacaagagtgtagagcatagggcagtaacaaacagggaaaaggagaggcttacaatagtgacattctatgcaccaaactatgaggttgaaatagaaccaatgagtgagttggttgatgatgagaccaacccatgcaagtatagaagctacaatcatggtgactatagttatcactatgtctccaacaagctccaaggcaagaagtcccttgattttgccaagattctcaattaaactattattaatttcaccccatcaaatctccattaactagttaccacttaatttgctttctttaataagaaaaattatttgttgaacttttgtgtgtataatgtataggaatgttccccacctagggtttttaatgtcatgattaaattccccaatgtgaatacaacttgtaatattttatatgtatgtgtgtgtgtgggtggaattaggtgtgtgttttatgtatataccgaaaaggaacaacaacaaaaaaaaagatgaaaaaactaacatttcatccaattttttatgttgattatattcttgcatttagtttcattaatttgtatcattataaaaatattccaaagattatcttcttaagtctcgaatctcaatctaaataattagtctctaagagggatatacttaggacttgagtgaaatcaaatcttggtcttttattttatccttcacgggatgtgaagtagaatgctcaaagatttatttggacaatttggatttcggaagataacatcataagaaaacaagacaaaataaagaaaaagggtccattattattttatttgttttgccaaacgccaaaaggcttccattacacgacaaagaacaaaatattaaactctttttgattattagttaataatgcccccattaatagttacatcagaaatgcattgtgggttcttaattatttgtcctcattgtcccaaatgcattcactaggatgatgtggttacacgtcaggttaatggtggaaccatatactatgatagtatgatataacaaaatatcatatcaaaatgatttaacctaagattacgacttaatcattctcgtatcgaatcaaattgttcactttgttagaaaagccacttgttcagaaaattttgttgcacatgcagccattttattctcaccactttaggctctccgtatatacgaattacgagtcacttcaacggtggaaactctttcgtttttctaactctttgttgacgtgttaataaggacaaaacccctaagtcgactttatctgaccccaaaacaggaccggaccaatttagagggagtcagactgagccaaaccaaacatcttctatcccgaaatgggacataaagggaccgggctggaccaatcgacaagtcttatccactcagggctctgcttgcagtccaaaacaagaaatgtctacattacatattgttgaattcaagtcactttcaagcaaaatattttcctaattataaaaatctaaacaaaaccagaaacactggaaagtttttgatttgaagacaactatacataatgaaagcaagaatgaaatttattcaaacacgataaggaatggaactagttagtacctaataagacaatgacaatggaccgtgacgcagtcccgtctaacaaatgatgtgttacatataaataaatgtgaaatcgagaaactgttgtgagtcactccaaataaatggggtatataaaaggattttctataaggagatattgattttacaaagagaaacaagcattatgaagagacacaaaggttaagttatggttttaggattcttactttaggagggtacgagggctagaatctggtttcttatgattcccatgcacttctgaatctctgtatagatcggaaggttctgcgagcagcaaggctgtaaactcgccactgccgagtctagaacctgggctacttcacttggtgggaattgcctctctgtacatttctgcattgtgtttttattcacaaaattgctgtgttaggatcacaaactatgaacaaaagaagaaccccaatacaagatgactaatgcagcaaccacagagtgagagcataaagaacagcaataagggcttaactttttctaatatctaaatctatgaagagaaaggtagagcctaataatataattgggcagatggctctcagtacgaacattactgagtgggtttaagattttaacctgaatcataagcaatgtagcgatacatcgggacacaagatcggacgggacttgcaggtcattttgatcgggttggtttaggtgggaatcattggcaggagttgagctaggtggatttggtgtagagggaagacgctgatcctggccaccttgtgtttgctggactgatgatccttctgtttgatctattgagagctgattatttacaaaatcaatggcttcttccatatttacattattattttcgtcttttctcagtaactccaatgcctgcaccagaaacagagacaaaatcattacgtagccgaaactgttgaacttagaccttgcgaagcgcaaccaatgatgagtaaattatccactcagaagctttttcatatgtgaatcccaaacatagaaacaggtgaactcgttatacacacacctgtacagctctgtataccattttccgtgcttttattctagaactttcgacgatctcagacacatggaatccattagtgtctgatgcattattgtcttcgtatgtcaactgaccatcaggttcccctgatttactcatgcgtcttattgatgaatatggtacattctcctggtaagtatttcgttgcctcaagccaagaagtgccaatgaaacctgtgcatagcaagacacaaaatgcgatacatcagaagctgtatgtagtaaagacaacaagatgactcatatagttccttcataaactcatgcctgctcattgatttcgcttagctgaaagagaactgctgcatattgtttcttaaaagattcagaatcctttagggcattattatgtccatctttctgactttccacaacctcgtcgttcatgcattttagctccctcaaaactagctcctgtagtgttgtagatcaacaattagttgaaatggaaaccataatgtcgaaagagcatgaaaaacatggaagacatgcatgaacgagaaggaaactatatacaaatggagtgaataaacataccgaacctcaaaattttatgagtccattaaagcattagtaatatttatgatttcatattttcttattagtcaattagaaacttttattctattcaaccacatcctaatgaaatctctactataatgtgaaggaaacaaaaaaattaacgatagcacgcctgttatgaatatggaaagatataaaatgcaacccggccatagaaaaagaaaatataagagagttaaaattgtatagaagactgagaattaagaacggaaacatatcacatatgtatagactgagaattaactggccaaaccttcttgtcaagcgcacgcgttagttcagaaagagcttggacatcagcttctcttgcctggatttgtccaatacttgagggctgagaattaaacaattgtaaagcaagagcctcatcaactccgtcttgagcttgtggatttgaacttgagatatctacctgcaaatttaaggaaaagttgtatatgattgaaatatatctagcaagatttaatttagctgtagctaagatgactgtagtcaaatgctaaacaaagcattactagaaaaattggacgcacgtctcagaaagaactgtaatagaacattcacattgtattttgtataagattagtaagagacttgaattatcaaactagctctctaggtaaatctcccagggtagactgatgctagttacaattattggtccacaacttcaggcagagaaattccaaatattgaataccttagacggaaatccatcgatatttaagaaactggtaaactaagcctagttcctccaggtatgcagaaaaatgaacttccataaagaatgtagaatatagaaaagctgaatatgaggcatggtatgatagtcagaaataccaaccttttcctgctttagtgaattgctaatgttataatttggagaggacaagagatggcctgtctcacacgaaagtttgggatatccttccagcatgctttcctttgcccgttcatgcattttctcctcaatgggattctgaatgtgataatttgagaaagcatagtgccttgccagcgatgctggcatgttttctagaggattcagtggcatgcattcagtatccttcaccaaaagagagatttaaatgttatctaaaggttatgaacattcaaattcgttctaattttcaagtcatgaacttttaaattgatcaactatcaagtgctcaattacagttgtaggaaattcagtagcgattctattcaccaaaactattcgagactttggtcaaattcacaaatgtgcagtgaactgctacgattagttatcctttcgtttactttcgttttcaatagtcacagtaatttttcagaaaacgtttgagtgtaaggaagagtaccttaacaaattctacccctaattcagggttgtcaaactgaatccggtacctacagtgatcaacagttaggacattgccgtcatgaatctctcttgactttggatgcaggcaaatgactctctgtgaaacatttagaggccgggccaaatccattggaagtccttccctcatgcccgtgtttagttcatcataatgttttcttacagagtccctgtataggtatagcttttctttttcctccttcaaaaactgttcagaaaatcgccttggtttcccaagagaactgcaccaacaaagtatgattaagggaacatccatatacacacgaagaaaagtagaaaattaacagcattttagttagtcataacctccttatgacaccccattcaacgcgagttaatctaggaacatgacccaaccctacatgatccaaatactcaacaaactcttgtctggcaaaccatggatagtcaattgcactgtagaaccactcaaaaatacaccatctccgtgctcggaaactagaaatgcaatgcgaaaacttctcctgcagaataataggatatggtataaatataatcagggaactcacagactaaattccatagaaattaaagatcttaagattgaaagatgtatcactgcggtttctttatcatttgggaataaagtctgagtatcagaaagttcactcactatagtctcagaaattttcccgtcatcaatagttagaggtttctcagttactatctttcttctgctcctaactttagttggcaagttaacttgttttttaatgactgcatttgatggagctgactcatcttcttctactatgttgttacttgacgaagtatgatcatgagatttggcagatttcttttcatgtgagtttcgaatacttgcggaccgtttacctctcccaacaggcttatattcctcacctattccctacaacatcataatcagtcctaagataaaagctacaaaaggaaatcttcgatgaaaaaaagggaaataatcaaaaaatttggttgccaatgatataatacattccaaagaggacgccgatgggtactgtgtggaatactgtataaatcatacgagttgtattgtacaagaagacacataccttgctattacaaggctctatgacttgtgagcttgcagcaagctcatctttaagaacctgcaggaagagaacagcttcaacatgatcatgaattctgacaacagaacagtaatggcaagtctgtctttgctaaatatatacattttctcttactttagctggtaatgctttctgccgtctcttttggattaaagaactacttggactttttctctcgagttcagggttacaaaggtcattgctgccgtatcttctctgtttggagtttctaagagaactacttttagacatggatgccggatcagtccctttaaaatctgaaacataagcttctccagctttcttttcctcagcttgaactgatgactctgaaattaaatcaagattagattgagaaagtagataaccaatatgaattttcatgaaagtaaatcagactctgaacttaattccatatcagtgtaattatatgctatggccaataacattaacaagcttaagacactcgttcaaaattataaatgtgtattgattataggtcaaacatatgatcccaccagtatcagtggcagtttcaggcatcatcagcgatagatctgccagcgtatggagagcatcacatgctgtgtcttcatctgcagaaagcatttaaaaagaaaaagaagttgaagggacgatataaatagtaaaaaatgaaacatggcaacactaccatgaatacacgcaaagaatggctacaattattagttcaaatgaatgtcatgagttgaattccaaacaatcacaaaggagcttctatagtttgccatcgctaagaagattcttcaggaagaatgaaatcataatccattaaggatttggtttatttcaaagctcagtagcgagctcgtcttagattaacagaaacaggcagtagttactcccaaagtttatcaagaccaaaaaactgtcatggaacagaaatttaaagttgacaaacacaagacagagtgaccaccaaatacactagtaagtcaaattatgatttttcaatatactttatataataagtgtatcagctagttgagatgaagtcttatttctttaactggataactggactataactgatgttttcctaagtttaggcatgtcttcatctgcatttctaggtgtgctttgaataaaggaattgaagtttttagtaattccgttttctcctacttggatatgcattgcaaataggtttatttagacagagaagtgagagactagaacacacctgcagtaaaaagactttttttactttttctccttgaaactttatatgtgaatttcaaagccttcccttccctttcttgttcaaatttctcatcgggagcgcctaagcttggtgcttcatctgtaccactgcaggcttcttttgcatcttcttctttaatgcctactctcctcctatagtatgttcttcctttttgctgcttttccacggcactagaaccttctccatgtgtcaagtcatttctacctccagaataatccgcattatcagcttcagtgcttcctaagcttggttcacagcggacatcttccatatcagtggcatgaagcttggcaatcgccaagtcaatatcggcacgctgaatatcataatctatcagtccatattactataaaacagttcctacttacgcaaaacggtttatttccttctactttgattttgcaataggctatcatgtagggaaaccgagataagtttccttaaaatatcttcctatagtgcagactagcagcacacattttaataatcacaagcttcatgaagagagtacatgaatcataataagtaatagtagaggagattaccattctttcaccctttttatcaggggggtacatctttgcttttctatttggtgtgtgggagttctttgtagagccacctcgttgtgaagcctcagccaatgctaatgctatctcatgttccatatcatcatcagtatcatcccccttctgatttaaacctctcttaacaggtgataaatatctttccctagtatccttctcaagggtgtatgagataggaattctaggagtcctttttccaacagcacgaggcatagtctcttggcacatgcaaattacgattaatagaaaagttagcaactattagatcgtttccattagacagatagttaatgatccaataaaattccgggagggaagatcatttttatcccactatatacatttagggagggtactaacttgagttgcatcatctcaagatactgttttcaataaatttagtgtacaagataggtgctagtaaaataaaggaaagagcagttctatctaagctgattctgcaaggcatcaacaacatgcaacaccagcaagactgcaatagttgagaaaaacaaaatttgcacgaagcaaagactcatgcatatatataactgtatgtgctcacgcaactcatgcttgtgaaatggggaacagattttgaggcaaagagaaacagagaacactaccagtacgtctcttcttcagcgatggcatgaagcctgaggaggacctaaattgtaagcggtcagacagaccctctagtcctatagagggatgatctgaggattttactctagagcgcttaggggctgacctcggagtttcaatgccttcattattttcctgctcactgtcacttcctccatgctagagaagagatagactcgttacataataatatgaaaccaaaccccatactaccaaattatattccttcgcaacagaaatggaaatacttaactaacaaggctcaacaacaatcaacgtcactaacgtccgcaaaaaatcacaaagttagctggccatgtttctaagatatgcataatgcttaacaaagaaacactaaaccaaacgaatgttagaatttatctttcctgagctaaactatattttcaagtgaaaaaatctgaacaaacaagagtgctaaacccctaggtggaacaaacttaagttggcagatgttccatagaaacgggtggaagacatgtacaattgttttgagtttcaaatggaagtaagtatgctgaactggaccaagtgcgtgttagttataacatatttgaacggtttcaaacttttaccagaacagagtagtgatccgtcatcattgcagttaggccaaccacagatgcagtgccttccggaagagacaagtaagcctaaagtacagatggcataatataagtggaaaatgtttagacaaagatcacaatacaaatcaaggaggagaacatgctgaccttattcatagtgtataaggcctctaccatttctgcagaacggctatgtacaaatccagcaacctacaaccatagatgaaaaaacaccataaatattgctggttctgcaaaccaaagtgattataaaaatgacattcccatacccataacatttggcggaaactatggcagcaatttattacccttcttttggaataatgtaatgttttactacaaatcatataccaaatcgtaaataatgtctattttgctaattgaactaacctttttccattcttttccgaatttgcggtatccttcataaaagcgctctaactcttccttgctccactgaggacctaacatgtccgacaacttcctcttctgcaagtaaggagcactataagatatgcttggagaccagctgataaaattggtcgcagaataacaacaaacaaatttgctcgcacattggagacaagggtaaaacaatgtctcctccttgaaataggaattgaaacaaaaacaacaacttaaacgtagaaaatatttgagtaaatgttgaaacaagaacaaagaaaggttattacttggatcaatcaagaaacaaaaagtctagcaaataactaggtatatccttctacagcgaaactatgctaaatttcccaatcaaatctcaggctgagcaatacataaccctacctaaagttgaggtcatccagtaaaacattaggaaaaaagcttacccgttgtttagttttgctcatactttcttcgtctttgtgaggagaaacagctttagcacgaggcttcttcttgtacttagatttctttgatcttgagggcgccataagttaaagctcttctgttacctgaaacattcccaaaattgaacccaagtttagattttaccaagatacaacaaacacaataaatcataagctcaatccttgatagatacatctatttatcagttaatcatctccaaagaaactgactaccagtactaatgaaactaaagtctacatgcaaaacccacctcataccaaaaaagtgtgctcattatcagtatcaaccctactttcgctcaatagaatatgaaacccagagaagtttaagaaacaacttgtccaaattagaaaatcaatctccttaagcaactccagctagtgaaatttatgcgaattcaaatcacaagacctgacacccatcgattttgagcttcgaatttcaaaatccaaagctcaataatcagtgcgcagattccccagaaccaaattttaaactcacaaacttcgcacctaatccaaaaaactttcctaccgaataaaaaacgaaaattgcaggacgaacgattaaaaaagctcaaattatttgaaaattcgatgagaacaaatcagaattaaaaaaaaaaaaaaaaagagaagattgaaagagcttacctacacaaatccaaaatcactcggaagccatcgccgggacttgaagaagaaattacagagagaaattagagaaatccggtaagagatcggaatatgaacagatcagagcttcttcgggttttttgagcgatcgaaagagagattgaggaagatgaagaagcagcaaaaacaagagattgaaacaatttttggggatataaccgcgaaaactttaaaataaaaagaaaaataaatattagaagaatccgataaaatgtaatttttcgttatacaacttttgttgcagagagtctctctatataaataatttgcgaagattcaatcatttttttaaaacaaacctacaaattaaatccaattcggttcggttcgcctttataaattggatttggattggttaaaccaaatttaaaccacacagttcgaatccaatgcggtttaattctggtttgtaatagtcaagttgaattttattatagtcctttataggggttttcgaaatagactgaagcaacaacaccatgtctttcgcttactcaatggttatgttaaaaagctcacttcctagagaaacctcatggttctcactgatgacattaaggtaaatcgtctcaagctcggtcacgaccacatccatctttgggcgatttatcgggggatattccaagcattccgacgtaattatcagataagcttggaacgatggtctcgtgaatgtttctgcaggtatattcttatcccaaaatgtgtttgtaaaaagtctcggacttatctacaaatcacaaataaatttccaaacaatatatttttaagtacatacaattaacaaacaaaaaaaagttgtaaatggagaaagagagggtttttttttctattacgtacccattgtaaaacttcatagtctgattgtaacagtccagggttttgacaggtgataagctctagaaggaacaacccgaagctatacacatcaattgtctcctctgaaccacctctatagaaaatattcataagaacatatttgttaggactttgaaggaatgatgtaacttatatgatcataagtgaattaattaataccttggattagcgagatgaatatcacttgcttgaagcagtcccaacattgccccatctgataccttggcattgaggttggcatcgagcaaaactttactcgccgtaaatctcttgtgttgtactggaggatctaagttgtgcaagtgtagtaaccctgaattgaaaaacagagagactttaatattagtttttagaacaatcaatgtgagttttggatcatccattttgatttacctttggctgcatcaagagctatagatattcttttcttgaacgttaagtcgctagactctactcaataaccaaaaagagagatgatcacataaaaatgatgtatggatcaaatttcaagagtttactataatgcattacttaccacctagataatctcggacgctaccgttgaccatatactcaaagacgagcgattggttctcgtcgtcgcaacaataaccgagcagattaaccaaatttttatgttggatgtaagaaacctgagacacatacaacaatatgtcacaaatacataaattattttcaatgaaatcaccaattttttgtttgtgtgtacctcatccaagaatctaggttggggactacaccactcccttttgatcacaacgggcatgtccttgatcagcccagtgtaaactgttccgtgacttccatgcccaatagtattatccatgtcaaaattgttcgttgcttgccttaattcctccatcgagtactcgatcaggcgttgtggcgtcacttgtagacgtgaattacaagagcatcaaaagatgtaattactttcatgatcagcacattaactaatatgtttaaattaaataataaacccaataaaacttaatatttgtatatagaaaagacacatttaaaagacttgtaaaaaacttttctttgtctttttattacatcaaatgtattaaaaacactaagtgtggttataatgtcaagattagacttaccggttgaactcttgagggagtttttgccacacagtaatatggaaatccagaaaagagcgattagaatcgctatgatcgcaattggtgcagcaatgtaaataaccaacattttgttatgcgtcaacatcgaggagaatctgttggtgtttccagaccaaaaaaaagaaaaaagacaacattatgaatataaatgatcattaaattatgtttgtttcagtgcaatcaatgtcggaaacaacatagatattagtcagataaaatctgtaaggtcaaaatcaaatctaacaaccttcccagtcattttcacttgacaattagaattttgtggtgaagcgaaggtgacactagtgcgaaactgaaaatcgcatttgcattcatttgaaactaaaattcgttggtgaaacgacagctatactagtgagaaaatcacagtcatatattatcatctactcgtgagaaaaaaaaaatcacatacctttttcaatagatttgaaatcaaaagcgttggtgatcccgttgtagtatatctcttcggataagataatatatagagaacatagattcgataatcgtttgtcgttcaatttatattctatacatgtaatcttatttggaaaagttgtttaaatggtaaaatcaaactaactaagaaatgtttgacgacattgaaaagttattgttaggaaaaatatctgaccaactggactataccaaatatcgaaaaaatctccaatattaaattggtattggaaataatcttcactacaaattagaactggtaatagtgtgtttaaactgcttcaatccagctcattacaaacacattgttataaaggaaggttggtacatgaacacctctttatggattaatttgtctaccatatatgctctaccattattcaaacctcaagagcttgcaaaattttttcaaatactaaatttaactatttgtaatatctcaattatctatccagacatatatatatacaaagtacaaacttctattttgccatctaaaatgattaatatggagaatacaagcttacaaagccttaactaattgggcttaccaaaagaaaaacagcccaagaatttataacataggatgtcactaagaaagagatggaaagaaactatctagatcatatacatttgtattgaaccttaacaaaaactaagactccgaatggatttcgaacctcacagtgtggtgtggttccaacagtaacaaaaaaatatatatatatgtgtgtgtgtatgaatatattttggtactattagaccatctttattgcacaaaaaacatagtgtctttaaattttttttaaaaatgaaaaactaaaataaaatgttatttaatgcttttaggaggaagacccgtgtcttccatgtctctgcaaagacattttcttacttttaaagacatcacacttgactaataaatgacttaaaattaaaataatgttaacttttacaataaactatagtaaagacatctctaaaaagtcaccaatgaggatgctcttagaaccgcttcgaattttatccgtagttgaattgcacgttttcattcataacctaggtgtgcaacatgtgttagaggaaaacagtatgggcttccatcagttattaccgtctaagtaccttaaatctacaaatagccttaaaattgtagatcagttaaagccaagagaagaaatcgacaaatgaaagacaaacaagttataagagacggaagattagctggaaagttgtcgccaagaaccttcgcttgtggattaaaatggcataaacttgttatgatcatgagtttgattcaatcgtttgcaaagaggtatttggtcacttagagaaagttgcatgtatttttgacttgtgaattaatttgtaaggagtaggaaataaaacagaggtttatgcgacctcgcccataatgggttatagttaatcattaaatcaacctccacatagacatatttaattactctcaatacaaagtagttcctcttcacatatgctttaattaaacgtacataaagtgaagagactttcaaaggtcaaagtaaagatcaaacgagtgctaaagccacaaagcaccagcctccttgagcaatattttcaatgatccattgagatgaagagtcatgacagtattggccgttcctacgaatttccctccaacaaaaaccgcaggaaccgtagggctacagcctaatcgggccaaggcccactcgatatctttcccatacatgtcttggtcgatctctacaattgccgggctcacaccttgctcgtaaaacaaccgtttaattgcatgagacatgcaacacgtactcttgctgaatatcaccaccgctctttgcgacgctaatcttgctaccacatccatttgtatagtaatactcttttggtatgtatattattttctttgaagtgattggagatttaatgttgttttgatgagtttgttttggagaggtgagtcttggaactctatatatacacatatactcgcatgtaatctttatgaatagaggtatcttggtataatgatggagcaacgctaaagggagaatcttattttgtggggagatagattgtggataagagaagctgatgatatgatgctcgagagttgacaaattgtgagtaagaggatagagattgatatgcatatagtagtaacttgtgatcatgatgatgtatgaagagaaaaaattccaatatttggggatcaatattacgtgttaagggaatgtcaactttgttgattctcgtcgatcatcacttttcttgccgcaaggggatttacgttgccatttatgacaagtactgaactagacagaaactcaaattccaaagtagattaaatggattgcttctttttattaagttaaaccatagtagagttctcacactccatgcacgctctcagttttgtaattgcatttttttttctttgttttggttaaagttttgtaattgcatgttgggtttactatgtaaaacagttcatattcttagtatttaagatgatgggacatagaattcgtagtgactcttgagatatcaaagaagccataatccaaaaacaaagaaccgtacggcaatgcaagtggcgagatgaccattgtacttaaggcataattaaccacgtcatcagcaaaattcctcaactagctagctactattggtttagtgtgtcatcgtcattgtcggtaagatttggactcatcatcattagtgattttaatctcctgttgatattgttcgaaagaatgtttgatgtaatcaccaaatataatataactgcaacaattgatgattaattggctaaaatattatctatttggccatatgatgatcgacaaaaacgttaggaaccaattaagcaccttagctacgacggattcttctgaatacgaaagtggtttgcgctattagtttcggacccgtagttagaaatcttcctttcaagttgaagttcattcactttcttttttttcaaatctttggttttttaattacattcattataaaacagttttttttggtgaatacaattttatatttatacaaaaaaattggctaaaaaatggcttgaaggacagagatctctgtcacaacgagcaatctaagtatgctttgatgattaagtaaacacatgattagtttttattttatgtacttaattagttttaccttttgtactaccatagttatttttggaatttgaagtactacactgttctgactttgattctcgaaacgtgtaatctgaatttgataccaacctagatgcaacgatatgtctgttggtgattaattggctcaaaacactatatacttaattctctttaccatcctaactttgaatcgaaactaaagctgatgtaatcacaaaatcggatgtaaccgaaaccgttgatgattagcaatattctaataagatcagtcagataaatcacgctataatactagtggacgatctttggaattggacctcctgaagcatatatcgtcatatatatgagcattggcgcatctagctagatatatagatatattcttgatatactatgttcacctactagaaaattctatatccatttctcatattttttttgaaaacaaattataattttggagttgacattttgcaatttgaaattcacttgtttgggaccaatattttaaatataaaatctcctgaaatttattgtttctccaacaccatagatgtaagattcttcattataacataggaaacaatgttgttaacattgtcttaacatctttaacattcttacacaaatccatatcattgtcctgaatagcgccaaaatgatgtattaatatggaaaaaagttgatgcataatatgtattatgtatgtatcgagctttattcatttaactaaaaataaaaattataaaagatgtaatatatgcatggaataggatcaagggaatatgatgacagattgagagtaacgtgatcattcatgaatgggcctgttggataaagctatcgattctcccaaagataaacatatatcaccacttgttacaatctcattaccgacttgccgtccctaaaaccaaaccaattaatacgtgtcaatatcctacttacaccattctcattcaacaatttttctgtttttcatggtctgaaaaaaaaccttaatactaaatttgaagacaccttaacaaatgaggataagagcatattcatcatgaaaaattcaaaaattctaccgagcgtcgttagctcaattggtaaaattcctagacgaatcttagaggttgccggttcgagtgacgcttgggacgaaactaatattatatgcggtggttttgggcctggagggattacaagattcggcccaaaacctcctgatattcaaaaaaaaaaaaaaaaaaaaaattcaaaagttctttcaaacaaaaaaattattagatgtttttgaattttatataactaaattatagttattaaaataaaatcaaaccaatgtacaagagaaaaaaaaagtgtggtgtggtgtatatggtggagagaaaaaaaaagtgtggtgtatatgtccagcgagaactaacggggtcatttattgatgaataacaagtttctggggtgttttatgaaaatactattttttatggggcaaaatccgtaaaccctaaaaatacagagttcttgcgtcaaagagactgatttgttcttgtgacactgaaccattggagttgactgatcccgatatcatgcaatatctatcgcactctcgtagaatcgctcgggctttgaaaccactagctctcgtcgagaccgatgtgagatttgtatccaatgctccttctcatgttgttcatcgatctctttcccactctgtatttccaggtactatcttcttcatttttcacactttgtttgtttcgtcgttgaagctttgaaaaatgggaactttttggtttataggaaaaatggatacttgtaatcagttatatgctcaatcacctatgacggggttgatgatgttgagagctaacttctcctctgaagcaaaacatgttgagaatcctacaggttgctaaattttgactctttagttagaaatggaatggcttttgacacttagttagaatgtttcctgatcgaatttagctgtgtgtgttgcagaggctgtcaaggaattacatagtaaaatacttgattctgtgaatgtcaagagatcgatgcctccaaatgcttggttgtggtcattgattgacaactgtcggaacgaggatgacattagttttctgtttgatgttctgcagaatctacggagatttgtgagtgctttatttcttctcccttctgtgtcccttgttctgttagagaattctcactaccgagtctgaggtttagtttctaactgacgcttttacatgttggattgtagagattgtccaatcttcgtattcatgacaactttaattgcaatctatgccagcaagttgctaagacttgtgtacgtgtgggggcaattaaccatggtaataatccaaaccttatagttttaggagttagttttgcttcacttttgttcccacaaactgtcaaggctaatatattttaatttggaccacaggtaaaagggctctttggaaacataacgttcatggtttgactcctagtgttgcatctgcacaccatttactggtattgcgagccataagttggttggttttttctttggtgcacagattttttaaggttgtttgatggttcgttgtagtcatacgcattaaagcataaggacgccaaactgatggatgaagttatgaaactcctgaagatgaataacctgcctttacaacctgggacagcggatttagttttcaggtgtgtaggagatcagtttgttgctcatttttcagcagatttagtgctctgatttccatggcttattaattcaaagagctttagtatcatgcaatgaacttccactgaatgtttgcaggatctgtcatgatacagataactgggatctattagttaagtactcgaagaaattctgcaaagctggagtcaagctcaggaagaccacatttgatgtctggatggaatttgctgccaaaagaggtacattttgtgtagttggtttccttagtcttacttccaacgattctttggtcgatagaggagcttgttacaaccattccgtaatttgaacttgtgaagtggtcttgagatatgtctacgtaaacatcagacaaagatattaacctatcatatcaaaacagatatgccaacataactgttagcaaaaca

SEQ ID NO: 59 - DNA, 6184 bp, Arabidopsis thaliana
tttctaatcccaaatcacctaaaatcactcaaatttgagctgaatcataacattaagtaattagtttcatcaatttgaagatcaatttgtcaaaaattggattcacttcccaccaacgaaaaaccacaattcacaccagatccgatacagaaacgttgtaaatagagagagagatcgagaaaggaaccagatttcgaatcgatgtagtggagaaaaggcttgacattttgaaagcaacgtaagcgcttaaacgcttaatcaaccgaacgatctcttcagtaggcgacggcgacgacgattccgccattaatttcacctttccttcaaagccaatttcaaatacgtcgtcggtttaaacacgaacgtccagattcttagcttcagctttcagatatggggcactgttctcgagcctcctccctgaactaagagagaaaagaggaattttacttttccattagaacacaactaggcaaagtcaatttgtttggacacgtgtcttgttaaacacgtggtggtggatgagcgtgtgagaccattgttttttatcatagggtgcgatggatctgatctgtacgaaacggtgcgttttgctcttatgtaaaggaaattttacacgataaaccgaagacgattggaggagtaagaaaactaggaaactagaattggattttggtttgttgttgttggatacttaagtcatcatggagtatcattttacagtgaaaagaagaaaatagagagatgaacctgaagaacaaaacaacatgtgcaaaatgtaggaaaaaatagcttatatcatttagttgaaatctacaaactatttaacttaacagatttacattgtaaaatctctagtatacatagtttgagatttcaattatttttctctagcaaaaatttgagataatttcttcaaaatataaataaaatttcgatagttagtgcgtaaactttttctgtcaaccaaacgcgttcagttaaaagttatattaaaaaaattcatatacatatatcaaacatataaagatgataaagtagatgctggagagagactttcttgcattggttgaatatctttgagggaagaaacggcgtcgtttagttgcatctctttttcgaggtgaaagcaatagctctcgaaaactctaaaactcacagtaactctaaagtcaagaagaaagagaagctccaactccattttgttcaagtctgcattgcttacgcctccaacccgagcatagaactcgttgttgtagtgcctgtgaatatgaaatttgttagaaaaaacgaaaacctctcttatctcatccaatacatgttgaaaccttgaaatcaataacttaaaaggggcacttaacatacatataggtacaaagtttgtcctcattttatattggttagatataaaatgtatctttcattttgttaatcaattaagatacaactatgatctatagtttcatgattagtctaatttcaagatattatagaaattcaagaaaggcttacttacacgtcatctagtatcttggcagcaatcatgacacaagtgacgaggagtctatgaacattcaaggagacaaccaaagaaccaggatgcttatgagccaaccggtctatgtacacatacccaacaacgaaacatgccgggctacattttgtgtacttatatatcctctcaaggtatttagctatacttatgctcggcgctctcacgccgtgaaacgcctccaagctcttcccaaatcccttagtttgcttagctaaccactcgtttcgtgccacgagcttctccatcacatgggagattatagtcagcactcttggagtggctgcttccgttgccgattctggtcccacgaccgggtccagttcatcgtctccggctgcggttaacatgggttctcttcagttttcgttaatgggccatgttgtatagttcgttttgggtatatatggcttgtagattgggtggttgagatacgatgagcttaagatgttacgtggggatgttatcatgtttcgtctgactttggacgagtgtgagatggttttgacacgtgtcacttcgcgagaagataggattccgatgatttttgtataccttgagcaatgaaattagttatcatttatcaaacaaataactttattttccacttaattttctgcatattactagcattattacccaaaattaagtttccgggtcttggtccataattttctcgtccggtacaatttcctttgaaaagtctcacagtacacaaattttactacatacgctggaatatattcttgatgtaaatactatatatagatgtaaattaatgttagatacattatttgaaaaaaggcatacgcgttgccggtcactgcatacatgtttaatgttttgataaggagagtttatgcataggtcatataatgttatgtggccattttttcttatctctgttttgaagttcatttatctttgtttacgttaatagttatcatgtttcttacttttatctatcaaatctatatatcattttctttgcataaggcatttttttcttaaattgtatccttttaaatagttaggttggtgtgcaacttcttaaaaagaaaagttagttctttgaggattatatcaaaagataattactagttcaaattttacaattttcttttagaaacaaattttttacgaaatagctgacaacattttttaggttaggaatcccaaaatttgagggtagcctgatcaaaaagttagaaatgctaacaacttatttctattcaagagtcaactgcatagccattatacatgcatgtacattaaactgatgataatatagaagttgatgtggcctagtctatttcaaatgaaatgactcaatgatctcacatctatatatcaaatgttagagataccaaaagacatcacacaattcagaaaaactgataactctttcaaactagttgagaacatattttcgaaaaagaaacgtacgtggctcaatattcaagtaaattacgacatgtattacacgtataaacgatatcaataaatttattgggaaccacaagtaagtaacactagtaatagctagtatcgacccgaaacaacgagttttaaggtttgccacagagcacaaaatctatcgagcaagaaaaaaatcagatagtactatcttgacaagcgatataatcacaattacctatgcatgtcttcataataaatcacgtcaaggctcataattacgccacgtggattttaaccgcgtggacacacgttttcacaaggtataaaagaagcaaccctacctctctttcttctacgtgattcgcacaccactgtaaaagtgtaaaaaaactctttttttgttcttcttcacatttcattcgattcaaaaaatattctgttcttagattgtaatctgtttttttttctgtaatctcccattattgggttttgaatttctcgtcattttacgaaaaaggttgtgaatcggcctaatcgatctcggtcgtcataagtgagtgcttcttcctccgtattagctctcaaaaacatttgtgtttctatttgaaacgtaacaatttacgatatttttcctcacaaattaatgtaattgaaacacaaaaccctatcatgcatgatgcacccatatattaccatctttaattccaaaatcatcattttccttccatgatttgtatctgaaatggtcatgcatctatgttgcgcaggatcttacgtgtgttttactaatcgtgaaacaatatcaacgtcagattcttctctatacacttttctttaagtttacccaatcatcatgtctccaagtatggagccaaagtgtgaccattgtgcaacctcgcaagcattgatttactgcaaatccgatttggctaaactatgcctaaactgcgacgtccatgtacactctgcgaatcctctgtctcacaggcacatacgctctttgatctgcgagaaatgcttctcacagccagccgcaatccgctgtctcgacgagaaggtttcatactgccaaggatgtcattggcacgaaagcaactgttcggagttaggacacagagttcagagcttgaatcctttctctggttgtccttctcctacagattttaacagaatgtggtcttcaattcttgaacctcctgtctccggcttgcttagtccgttcgttggttcttttcccttgaatgatctcaacaataccatgttcgataccgcttattccatggtaccacacaacatcagttacactcagaatttcagtgataatttgtctttcttttccacggaatctaaggtaataattaaaggagtgaaaagtgttccttataagttcttgatgaaaaatacagttcttatttgtgtgtatgttccagggatatcctgatatggttcttaaacttgaagaaggagaagaagatctatgtgaagggcttaacttggatgatgcaccattaaactttgacgtaggagatgatattatcggatgttcatcagaagtacacatagaaccggaccatacggtaccaaattgcctattgattgacaagactaacacatccagctttaccggctccaactttactgtagacaaggctctagaggtctctttcgcttttttgttgtcgttgttgtagtttctagtacctcaagaaagtttctaatataaattgtgttattctgtttccaggcatcgccaccaggtcagcaaatgaacatcaacactggacttcagcttcctctatcacctgtcttgttcggacaaatccatccatctcttaacatcactggtgaaaacaatgcagctgattaccaggattgtgggatgtctccagggtttataatgagtgaagcgccatgggaaacgaattttgaagttagttgtccacaagcaagaaacgaggctaagttgagatacaaggagaagaaattaaagcgctcgtaagtttattactaatcattacaaaacagagtttataccaacttggatcaggtttaatggtgtttttctttttttttaattgtagttttgggaaacagattcgatatgcatctcgcaaagcaagagctgacacgaggaaaagagtgaaaggaagatttgtgaaagctggtgacagttatgattatgatccatcatcaccgacgacgaacaattgaaatttacaaaaataatgtacagtcttctttcccaaacagacttaaaccatgcttcatgatgatgataaaggttggtaaaaacagtttcttgtcgggaaagtaatgtattgtttgtcttattgtgtatagtttttgtgaatcgaagaaatcaacatgttgaggcatgggaacgttggagaactaaataaagttggtggaaagccaaaatggtgaaaattatttagtaacttcttttatttacagaatctcttttgtttttgattatttttaagttgggtttttccttttataggacaaatcctaatttatctctttataaataaatttcctagctgtttttttttttattaataataaagtagcagtgattacaatctgctccattacagagctcgcgtttaacgtgtttcaagagaacaattctctacttattaagcattgcattatgaagatgtttcacttgcaaaaagtttagttattaccccactggtttagaaccaattggttcttagttttgaatcttaaccttattttaaattaaaatgttgtttttactaagttaagaaaagttaggaggaagtttaactaatttctatttcaatggttaagaactattggattcttaaaaaacaacaattcaaaaatgtctatccactcaaaatacaacacatatactcttcttagttttaagaaaacatcttaattaagatgtttatcttagctaaggtttgttgtttcattaaatttaatcacttttattgctaagaatacaaggctggagttgcttttatgtacctttaaattaaggaaaatgacaagtccaaagaagtagtgagaaagatttactacactaaaataaatatctaacaaaataccaaacagagagtttggtgagttaatttttttttacagcagttttatggaactttttgtttgttggttacaaacattgcttagtagaaaaaagcaaaagattcgaagaataactcaataacaacaaac

SEQ ID NO: 60 - DNA, 82348 bp, Arabidopsis thaliana
gatccttgtttcttccctttctattgcagatattttttgctatttttagtcactacccatttcttaaaattcttttttttttttcattacacatttcttaaaattctaagcttcataaaattaaaattttcagatttttcttaaaagaaaattgcataaaaaccctagaatatttatagcttacaccaaaaaaatctaataatcagagaaaaacaaacggaacctcatgattatcttgttcacttctattctccacggtggtttctccgaccgtcgtcaccgacggtaaaacaacgtggaagtcatgatctccgacgaggcaccggcgcgtgagtttctgacaagaagtgcatagcacgcgccttacgtgtctccaagctagaaaattcgctccatgaacccaccggtcacattttctacagaggaacgccgagtccgcttcacagaacacggaggcgtctccgtcgcaaagctcacaccttaccggaacactcggtctcgtgcagagactccggcaacctcctccgtcacttcttctgctctcttcattattcaagcctctacacatttttctcaatctctttcttgatctgtttcactttctctttcttctgggtgatattgaggaaagaagatttgggaataggagaaacgtttatacatttatataggaatcttatttctttaaaactaatgatgtgtttgtgttgtgttgttgttggacacgtggatgaatcttgccctgttattttgacgtaaatgcccttatgagggcaaaatcgttaatttcaaaattaaaaacgcttctcctccaagcgatctctcgacctcatattggacgcacaactttaaaattttcgaaacaaactccgtttttttttttttgcaaatcgaaacaaacctctagtacgacttcttttggtttatatcacccaccacttcaatgtgaatcattgttttttttgttttttgtacgatatgatgttatatgtatcttattgtaatgtgattacggtgtacgataaaccaaactattgagaatttaaaattttaatagatgcaccgaaaggttaacaaacaatcgattctataaacaaatatgaatgattgcgaatttagttaattacgatggagtttccttgtccaaagcgaaaacatatatagtcgtgtagtttatctctttttttccaaggtataaattttgagacatttacatgatatttaaggttctagaactagttggataaaaaaaaccggcatatattatcattcgtttcttagcacaccttcattttcctattgaaatttgtgacagaattttctaaaataattaagggattgtttagagaaaaaaattaaagatactacaagtgattagtggaggatagggggtacgcataagaaacggctagaatttagggtgatatcaagtatcgttgttattggttgtctttgggacattgtgtggttgttagtcagtcaactcttaattaattatataagcttactatcagaacaagcaaagaggacttcacttgtatggttcacatttaaagatttttttttgggttgatttattagtcatttatttgtttaatattagtgaaagctaccccacgaattacgaataatatcagttaattaaaaaggtttgattattttgaattgctatacattgcgtgtgattgcttagtagtacgtatataagtaatcgaaaagcattttaatgtcacaatattcgattttgtagttagcatcacattattcgtaaacagtgtttgtaaaatagtgaattcatttagtaagtgtcttaatctattgttaaagcaacctaataagattaattacatactacagttcggacgaaataaaataaagtaattagcaaaatatgttattgaatctctttaaccaaaattataatatagttattcgttgttgctaaaatatatcgtatcggttaaaacatagcagcacatcatatctatcgccatcgtttagacatgtaatgatcggagtcatacatttcgttaacttaaattctactaatagtacaaaatttacgtgaagatagagataattataaagcattaaatgatcaaaaatatcttcaatgatgttattagattttttaactgcatatatatgtttaatattgaagattaattagaccaaattaaaaccttgacattatgtaatatataatttgagtaggtattttccattttggacgttcaactagagttgttgttctttatgcctccaatcttgcttcgattcggatataatgcagaaagttatactgaatcaaaggtaggttacaaatatgtttatgtgaagaaaaaaatttcagtttttgaaagaaatataaaagcttgagaaatagaaagactagagtatatatgtacatctcattatataatcggtacataaccaactggtttctgttaaaccacaacctgtaacactctgtctctaatacaagtaagatcgggtattggcggactctactcagaatagaaaatacacatattgtcttataccattttatgaagactatatatctaactttttacatacacaaagtatatatataacaaaaaaaaaacccacgacatttctctacaaaatttaagataaagtagtgggtcgtatggattattgactgatcaaaaatacgcacacttattagacggactgaaataataatgagacgaaaatattattatatttgtatgtttgatacgttatggaaaaaaaaagtgatgttgttgttgtccacaagttgattcagtgttgatgcataagtccacttgtgtggatcatattggttcaaaaatccaaaagctttttattttctaattttgtcctcagatttttctgtctgttctttattgttgcctgttggtacgagaccttagccgtccaatctttccaaaagtatgtgaccattatttttttgcaattttaatattcagatttttttttagttggtacgtaggacatattatcacatttacgcatgtatacgcgtaactataaccctggctagtttataaaatatctttttatagttttgatcgaagttgaagaaacttggacggtgatatgaatatgatatcttatgctaaatcattttgttgtctaaacgatttgcgttagtaaaaacgattgtccaagaaaaatataagctatatatgagcctatatagtatgtaatgaaacaaactatttaacataaaagtatatatagactaaaaaaaaagagtatatatagagttcggggtatgttgtaaaaaggccattgtaataacttatttatcatcaacaaaatccaaaaagctaatagatctttgaattagaattagtaacttaaataaatactatcattgtcttgaaatcaaaacagtgtgtatataaatatatgatcacaagtttgggagaaacatcgttaaggtaaagtggatacgagagattgcaattttaagagaaacattagttggatacatgaagaaacttatatcaaaaattcatcttcaaaaatgatgaaacaaaaggtgtgtatggaagaaccagatggtcaacttgacacatattccactgatattaataactgtttaatctatgactttggaagagcaatgattcttttttcctatagaagtgagagaatgttcatattagagagaaaaaaaatctttgataacaaaacaaaatcccttgtctagttgtggtctcaagtagaaatttttgtttcactcacttccaacttgtctaagacattatatgttcccaagcgtttaaaccactgaaaaacttccattcattaaataaagcttataggaaaagatgcaacaagtgtatgacgttaatgtctacacacccaccttacctagactgttgttagaacactagtttaatatttttccttggctaggttattttactcaaacttacctttaataaaaaaaatttaattattggatagttccgcttaagggtttgaacccaaatacttatcggaaaaccgatcgaatggattcaatttttctatatccgatgaaccaattccgaatccaaaccgaaaaagagaaaaaattgatgtagaaagtttctttgtaaattaagaatatatttgaccaaaacctgaatccgaaccgaaatcaactgtaccaaaccatctattttagattacattttcagtttgaaaccattattcatataccaaacatataaaaacccgaaccggattggaaaagcgcattagccaatcagtaggcctaatttatcagtccccgtaggcccaaattatttaataacgtaacatcaaaactcaattactggaggccatatgcaggcccaaattagtgtttcgcttgctagggctttaaagtaaggttatggattcttgtttgtaggatcttctcttgcttagccaaggcaactatactctattactagatgagtatccgtactacgtgcgagtttatgtattattatttacaaattgttttatataatgtatgttcatataaagtaaagttgaatgcatcggttttgaaacataaatataatttgtaattgtttttgaaaagtcctactatattagttcatctgaaaaacgaatgtgcttgagttattttttattgttgttttaaattctcaggttttttttaatttatatatccttgttttttggttctaagtgtagattgtgagacggtgaaattttagaaaatttatttcttacactaaaaatataacatgtctttattaaccatgtctctgcatattcaatctaagcttattcaacttgatgttcttgaaaagtttagttaaaatcttgtcataatcttatatctcacgttttagttataaggatagctcatcaaacatctttcaaattacttgttttcttagcataaatctcgaaaagcatctgcatattcatttagtttctttcataataattgtctaatttttaggcaagtctaatttttaggcaagtaatatatgtagcatgtttggattttatgatcactttagccacttaagtggatctcaaaattaaagaagatatattgaattaaaaaatatagaaaaagtgatggttcaagttctgattaattatatcctttatgttgaattaattactaattatgtattacttattttatgaagtctaggtggcaagctctcatgtgctgatgtgtcaagttgtgggagagagttagcctcctttcatatatatgattctacctgttccacattaagctccagtttacaggacagtactcagaccgattttagatgcttaatagcttcagctctgtgacagttctccacactatatgtctatatcgggtataattactccatgttcctctcgttcagtctgatccaacgctgcctagctaaactaaggcagcatcaacgtcactactttccgattctaagaaatctaaattcagaaacacttcaaatttctaagcagctcagactttgtttacctgatgaaacccaggttcatgagtcaatgtaacaccaagctcatgtataatagagtataaactggagcttaatgtggaaataacctgatgaaacccaggttcatgagcttaatgtggaacatgtagaataatagagtatagttacactcttactttgatattttcagatgaaggctccacgtcgccaatgctgtgacatctctccatcatatgaggaaacaaaaggctaacttttcatggttcagaaacttgtggaagtctgtatccgaagatctctcgacattctgacaatatttgtcgatgggtttggtcgtttttgtgtaataatatgcaacattgtttaaccagtacggcttctcttctcttgttattaagttttcctagttaaactattaaatgtataaaatgctaattgtagatgaaactgaaaagttgaaaaagaagaagatgaaactgaaagtttaaatcttatatttgacccaaaataaaataaaaacagagaagcttgtaattatagaaaataataattccttcatttcaggttgtcaccataaaaatggtgtgactgtaagagtctgaactcagtcacacctctttactttttcttcggccttcttgtagccgcaaatacttctctgtcatctccgttacaagctctaaacatttatttgaatttatcaatagaattcgtataatgtaaccaaaaaccgtaaactaaatatattttataaaacttatctccattcaacatccaaatccgttcgagtctcacacaaaaatccaataaaatgtactattcatcgccgacatgcttcgttttgatcactatatttgccgtggtggtaacacaactgatctttatgcgcaccgtttcgtccttgaacatgaccaatgcctatctgaaccacaaatgcttagccaatcaagggaaatacaagccgggaagttggtatgagaaaaaactccaaagtattatagtctctatcggtagcggtgatggttttacccttggttacgacatgatggcccttggtaaggattctgattacgtagccgtcaccaaccagtgccgtggcgactccaacgggtccatgtgccgctcctgctttgccaccgccatcgcaagggtaacgctatttcattattgattagctttcacgtctttctttattacatgtataaatttgtgcacacatatatgtcagttttggcgttatatcttatattttatatgtaaattactccatgcaatgttgatattgattttggcgttaatatgacaaatgtatatgaccgcttcgtatagaagatgcccgcgatataagggggcaataatatggtacgaccaatgtactctccagatttctccgttcgatactcaagggaagttcgacaaagataatgatttctgtatgtccaacaagaagaaaatgaacgtagattcgtttggagagaagtggatgacattcctcgacaatttggtaggtatagccctcaaagatcatttgtatgccgctggggatacaaggttcgggacaaagaagttgtacgggatggtgcagtgtaggcttgacatatataataatagttgtcgagagtgtgttggacacatagccgtaaaatttcaagattgctggcatggtaaacaaggagctagagtgttgggtagtggttgtaactttaggtatgagctttacccttttgttggtagtaacaagcgcggtcgtaatttaaactaattttaaattcttatgcatttagatattttttttccgtaaactttaaattatatatatataatttattattattattattttgtttagaaaaaacaatgtcacgtagtttaaataaattttctttgtattatgctttagaaacattttaaataatgtatttttgaacttctcgtgttaaatttattttctgtaaatttctaaaacgttttcatgaaatttatagatagtaatcaaggaaagcattaaaaaaaagaagaagaagagaaacattgcattattatgtttgaaaaactatatttaaccgtggttagttagttacaaatgattgatattttaataggaaaaaataaccagcattaagaaagtcatcaaaatgaaaacatttccccccaatttggattctaacacacgagggagaaatatggtaaacgttttgcatcatcactattataaaataaagaatgaggaaccgataatatgtctaaatgagaacagcgaaatctatatgaaaacatgtaattcattaacatctagtaaatatcaactcagtatctagtacatagttcaacacatgtttgagttactcagcatctcatgatcttgctttagtaatataaatatctgtttgtttgttgttgttttaagaaaaaataaataataatctagaaacataaaaaccaaacactaagttgtatagaatcttataatattcgaccaacaaaaaacaaagaatcttgtaagttgtaattatagaaattagcaattttttcattgtcaccgtacaaatcttgtgattataagagtttgaactcagtcacacctttgaacttttgctttttcttcggctttcttgtcgccgtaaatactaatttcccactcctgtccgttacaaacttatactctattagaaactttaattgattaaaaagatttctcataaggtatcaaatccctcatcatatacatcacagtctcaacactttatctacaaaataacactcccgtttaaaactaaaacatccaaaacaatgtactctttatcttctgtatcaaaacaccttattttggtccatatattggccctggtggccacacaactgcttctcatacgtagcgtttcgtctttgaacatgaccaattcctatctgaaccacaaatgctttgtcagtcaagggaaatacaagccaggaagtgcacatgagaaaagcctagaagctatcatccattccatctcggttggtgaaaatgttaatagcggttacgacatgatgtcatttggtgacggtccagatctagtctgcgttgtcctccagtgccgtggtgactcctacgggtccaagtgccgctcctgctttgcctcagccatggccggggtaatgtcactttaatattatttttttagctgccaaatagttacatgataatgcgtacacatatctcagttttggttacatcttattcttagcgataaataaaatataacagactagaaaactatatcttatatgtaaattagttcatgcagtgttgatattgattgtggcgtcgatatgcaacatgtatatgacagcttcgtaggagatgtccgagatataaagggggaataatatggttcgaccaatgtcttctcgagatttcttcgatcgataatgtagggcagctcaattacggtgatagtttctgtatgtccaacgcgaagaatgtgggagatgatccattttctttcatactgaagtgggatactctcttcgacaatatatcacgtatagctatcactgaaaagaataaaaacttaaaagataccaacaaaccggcactatacggggcgggggagaagaggctcgggacaaagaagaagatgtacggaatggttcagtgtacagatgacttatctgttaaggcttgtgaggagtgtctggttgctaatatcttgaagtttcaaaattgctggaaaagtggtaaacgcggtgcgagggttttggataggagctgtaactttaggtatgagctttacccttttgttaatgccaagactggtcctaattcttattttaagagttaatgattttttttaaaaatacaggttttagagtttgtttgtttttgtaaattatcaattttattttacattaattaattattttatgtagaagaaatcttatgatgttgttaaaataaagggaaccatcccaaaagtcacttgtattttggctttattgtatttcatgatatctccatgtttttattgcactacatgacacttcttaaaattttataccattttgcctttgataaaatacacgatttatattgtacgtgccccaaataattctaatatggaaattctaaattgttgacaagaaaaaccaaaacaaatctaaaacatgtggtgtaagtactatgacagatcattacgtacatatatcaaacaaaacctctaatacatttgaatgaacgtttttttatatataatatacgtaaatcttaaattgaataccaaagcattatgtacgtcaaaactaaaatgacatttagtacacgacagacaaacactgtatttattttgttaagtactgtttttcattattaattaagtgtattgtctataaacccaccaaagtgtgattgattccaataaatactcatggttgtcatgagatgtaatttacactcttcatcaaatacttcagcctaatccaacaccattcagaataatttggaagtctatacccggggatcctttggaattcttacaatagttatttccttgatgggcttggtcatctttgtatataatatgcaactattggttgaatggcctttcttctatttttatagagttttactcgttaaattattttagtgctatctcagggtctatctttgaaacattttgaatcaaatttatcaaaaagaagatatatataacttaaagcaattttcttatctggagagacacaaacgtaaaactaataacagttgataatgtttgaccgaaacaaaagaatctataattatagtaattaacatttccttcatttcaggtcgtcactgtataatcatgtgactgtgagagtttgaactcagtcacacttttgaagttttactttttcgttggcctttttgtcaccacacatacaaataaaactaacttctctcaggtaaccaaaaactgtaaactgtaaactttatcatttaccttaacccgggaattcgccttttgtctattttttaaaccactttgtttgattttgaattgtgttagtcttatgcatactgttttcttttgctttgatttgtattgtttgattttaattgcttggtgtgcacaaaaaaaaaagaagatattaattgcttggtttagttaagtttgtattagaaaaccagaatcaaactcttgttaaccttagattatgtacttgtgtattctcgatgagttaattcattactccttgtggttattagtgcattaggaatttaattgactaaaaaaccatatcaaagaacaaactcacttcttttttttttgtaaactgaacaaactcactttaacgtgtcatcttccttcgtaagaggcggtcagagaagcaaaactgtaccaaattaaatgtcataaggagtctgattcgattattcccttaatgaaagagtcacctacttgatgctctactgttatctacgagcatccaacattccctagatgtacaacttcaattgtttggactttggaggatctcgaaaataggatccgagtaaccgaatattcaaatgggaaaaagatagccaatcgtatacgatgtatatcacataaattctgattttttttattaaagttcaattttctatgggtttggccattttttgtatgatatgcaaccatgttcaacaaattatggcctctgttctcttgtttgtagagttttcctcgttaagctgttttagacttctagttccatctcaggatctagcttttcaatattttaaattttagcaattttccttaataaatatataatatagaaacacagaaacatgataaattagcaaatatatataattagatgaaatctgaaaattggaatcgaccatgttacgttggacaaaaaaaccaaagaattttgtaattatagaaatcaacaattccttcatttcaggtcgttatactacaatcgtgtgattgtaattgtttgaactcagtcacaccttcaagcttttactgtttcgtcggccctcttgtttccacaaagttcctcccgagtctcctacataaacatcagtctcaatgctaaaaatttattttaaaacaccccacttggaaacacaaataaataaaaataaattcaaaacaatgtattcttcatcatctgtatcaaaacgcttcgttctagtccctattgtggtcgtggtgaccacacaactcctcctggtacgtaacgtttcttcactaaaccttaccaattcgtatcttcaccacaaatgcgtagtcaatcaagggaaatacaagccaggaagcaagtacgagaaatccctcgatgatatcatccaaagcttttcgaataaagataaagattcgtatggttttcgtaccggttacagcatgaaggcctacggtaaagaacctgatatggtctccatcacctaccagtgccgtatcgactctcgtgggcccaagtgccagtcctgcgttgtcacggccggttatgaggtaacatacttgagtgttactaataaggtagctttcacataatgtataaatatgcgtgcagagtctaccgacacacactatatttatgtttagatctaacacaaatataaacgcgagaaactatatcttatatatgaaattagtccatgcaatgttgatattaattatgggcctgtgggcctgtggcgttaatatgctaaatgtctatgacagcttcttcgtaagagatgtccgagatataaagaggcaataatatggtacgaccaatgtcttgtggagttttcttcgttagatacttctgggcagatcaattacgacgacaacttctgtatgcctagcgcgaagaacctgatcggcaattcaatctctcttgaagaaaggttgcatctcctcaacaatcttacaaagatagccgtcacgaaaatagataaaaacatagaaggtataaaaaaaccagtactgtatgcggcgggggagaagagactcgggacgaaaagtctatacggaatggtgcaatgttcggctgacttatctgttcagggttgtaatgagtgtatgttatattatatagtgcattttcaagagtgctgggaaaataaacaaggagtaagagttttgagtagaagctgtaactttaggtatgagctttacccttttattaaccctaagggtccttattatacaaagttctaaagcaatttgaatatgttactcttataatgttttttcttttctttttaacttcaaatttccccttacttaacgtgaattgttttctattatttagtaaaatatcatatgatgtagtttaaatttctatcagttagtaaacgattctaaataattaatttttgaattttcatatcttaccatagtggctagatagacttgttattaaggctttttgttcatttgattgtctttggaaattgttgatgattcattgattagtaaatgtgttcataacatggaaatgaattagtcttgtttagtgaattcataacatgggaatgaattagcccaaggatcacacttgttagatgttgtattaatcgccataaaccacctctcgatcatctttatcatttaccttaacccgggaattcgccttttgtctattttttaaaccactttgtttgattttgaattgtgttagtcttatgcatactgttttcttttgctttgatttgtattgtttgattttaattgcttggtgtgcacaaaaaaaaaaagaagatattaattgcttggtttagttaagtttgtattagaaaaccagaatcaaactcttgttaaccttagattatgtacttgtgtattctcgatgagttaattcattactccttgtggttattagtgcattaggaatttaattgactaaaaaaccatatcaaagaacaaactcacttcttttttttttgtaaactgaacaaactcactttaacgtgtcatcttccttcgtaagaggcggtcagagaagcaaaactgtaccaaattaaatgtcataaggagtctgattcgattattcccttaatgaaagagtcacctacttgatgctctactgttatctacgagcatccaacattccctagatgtacaacttcaattgtttggactttggaggatctcgaaaataggatccgagtaaccgaatattcaaatgggaaaaagatagccaatcgtatacgatgtatatcacataaattctgattttttttattaaagttcaattttctatgggtttggccattttttgtatgatatgcaaccatgttcaacaaattatggcctctgttctcttgtttgtagagttttcctcgttaagctgttttagacttctagttccatctcaggatctagcttttcaatattttaaattttagcaattttccttaataaatatataatatagaaacacagaaacatgataaattagcaaatatatataattagatgaaatctgaaaattggaatcgaccatgttacgttggacaaaaaaaccaaagaattttgtaattatagaaatcaacaattccttcatttcaggtcgttatactacaatcgtgtgattgtaattgtttgaactcagtcacaccttcaagcttttactgtttcgtcggccctcttgtttccacaaagttcctcccgagtctcctacataaacatcagtctcaatgctaaaaatttattttaaaacaccccacttggaaacacaaataaataaaaataaattcaaaacaatgtattcttcatcatctgtatcaaaacgcttcgttctagtccctattgtggtcgtggtgaccacacaactcctcctggtacgtaacgtttcttcactaaaccttaccaattcgtatcttcaccacaaatgcgtagtcaatcaagggaaatacaagccaggaagcaagtacgagaaatccctcgatgatatcatccaaagcttttcgaataaagataaagattcgtatggttttcgtaccggttacagcatgaaggcctacggtaaagaacctgatatggtctccatcacctaccagtgccgtatcgactctcgtgggcccaagtgccagtcctgcgttgtcacggccggttatgaggtaacatacttgagtgttactaataaggtagctttcacataatgtataaatatgcgtgcagagtctaccgacacacactatatttatgtttagatctaacacaaatataaacgcgagaaactatatcttatatatgaaattagtccatgcaatgttgatattaattatgggcctgtgggcctgtggcgttaatatgctaaatgtctatgacagcttcttcgtaagagatgtccgagatataaagaggcaataatatggtacgaccaatgtcttgtggagttttcttcgttagatacttctgggcagatcaattacgacgacaacttctgtatgcctagcgcgaagaacctgatcggcaattcaatctctcttgaagaaaggttgcatctcctcaacaatcttacaaagatagccgtcacgaaaatagataaaaacatagaaggtataaaaaaaccagtactgtatgcggcgggggagaagagactcgggacgaaaagtctatacggaatggtgcaatgttcggctgacttatctgttcagggttgtaatgagtgtatgttatattatatagtgcattttcaagagtgctgggaaagtaaacaaggagtaagagttttgagtagaagctgtaactttaggtatgagctttacccttttattagccccaagggttcttactataccaagttctaaagcaatttgaatttatttttctattatttagcaaaatatcatatgatgtagttgaagtaaaaatttttatcagttaagtaaacgattctaaataattcatttttgaaattttcatgtcaagttgttttctttaaattgttaaaactatatatcaagattaaattgcattaacatgttaatccgatccgaacatcaaaataatcattatgaaacttttagtaagtgaaatgaaatatatatttattgagttctacattacactacaaaaaaatacgtccgttacatttatggtttacgtcagattttcggtaactataagaagtttgcgttagttaaaactaacgtctcatgggctgacgtgaagttaattaactctaataatcactgtcaatatttttcccatttgtcgattttacgtcatttacacaagtgatgttaaataagtgatgtgttcaagcattttttttcaataagttagaaagtattcatttttccaaacataatttgaaaagtaattattttaatattcacaatttgtaaaagaaatacttttcactatttgctttgtacattaaaatttgtacaaattatttagtatacatatatacagaaatatacataaattaaaaaatatttttatttgtacatttcattaatagtacaaatgtacacaaatttatatttttattcgtatagccaatttaatatatatatatatatatacataaataaaatatgtatatttttatcattttaccaggattttacactgaatcttgtaaaaatataactacgtaataaatcaataatggcttcatctgaggtcggcatcgtataaattgtgtgattgtaaaagttatgactcagtcacgcctttgaacctttactttttcatcggcccttctctcgccgcaagttccaagtattaattctaacctctctctcctctcctccattacaaactcgaaaacattttttccgaaaacctaagtggtcaattgaaaaccttactataaggtaaccaaaaactaagactataaaaaggaattttttttttatctccactcaacatcctaattcctcttagtctcgacggttcatctataagaaacaatcttttggaacgaaacaaaattacaaatccgaagcaatgtactttccaccatcgtctgtaccaaaacgccttgtcttggtccatatctctgccgtggtggccataaaactgctccttatacgcagcgtttcttccttgaacatgaccaatgcgtatctgcaacacaaatgcattgtaagtgaagggaagtatcagcctggaagtgtatacgagaaaaacctcaatataatcatccgtgcctcatcagccggcgattttcgcagtggtttcgatttggttttccgtggtaagggttccaatttcgttacattaatgtaccaatgccgtggcgactcctactggtcaaggtgccgctcctgctacaccaccgccctctcggcggtaacgtcactctaatattatttattacctatcacacatttacgtatgaatgcagaagcacacatacacatgtaaattttcgttacatcgtagaagtacatattatagaaaaaatatatgttatacgttaattattacgtgcaatgttgtaattaattgtggtgtcaatatgcaaatttttctatgatagcttcgtaagagatgttcgagaaacaaggggggaataatatggtacgaccaatgtcttatggagatttcttccatccgcaatgaaggaaagctcgattacaacaacaacttctgaatgtccaacacgaagaatgccagcggatcgcctctggagttcaaacagaaaatggtcgatttcctactaaatttggggttgaaagctaccagtgaagacaacatggacaagtacaaccaggcggtgatgtatgcgatgggggaggaaagagttgggacaaagaagctttatgcgatggtacagtgtacgaaagacttatggttgaagacttgctatgcgtgcttggaatggattatcctcaaggaatcggactgctgcgatggtaaactaggagggagagttttcagtaccagttgtaactataggtatgagctttacccttttattaaaccaactgtttgatgagagttcatgtatatgcgtgtgtgtgttacgtatgtgttgtgtttgaataaatgttttgagagaacacgaattttgcttttcttgtttgtttgtggtttgttttgtataacacatgttagagagttgatttctacacgcactatataacataatttgtttcataatatatagttagttctttttgtttcattttatgtaatggcttcaagctacacacatttccaagtatatatactttgtacgaagcgaaagtttttaacgttgttagtcaatcgctaaattaataacaaatttaaagatgtcatgttttagaccaaaaaaaaaaaaagaagatgtcatgtaaattgaacatcagaatatcacttccaaaatttcacatgaataaagtatatatatcagttagttctcaattaattgaacaacaattctgatccgcccaacttccgtcatgcacgctaacagctgcggtatagaccattggtaatgttttagacaatattaacatcggatcacatgtaactagctagatgaattttctcagcgctatctagctgttagcatctaaaagatgttagaatcgagtgcaaataaatttagcctctttgaatgaaacaacataacaacttgaaaataagtgtttgcattatcaatgataatgcgacctttgtggtacgtagcgtgtttagttaaagaaagatatatgtagttaatgtgtgtataaggataaatagaggcaactttgagatttgtttttaatatataatgctagtgaaatgaagctgcaagttgaaattctctatcaaaatttactaaatctacatgtcgtaattatatataactatagaatcaattcaattaaactagacagacctttgtcaactaaaagtactaaaaaaaaaagttactgcaaccattctaaatttctaataattagcaattttgtttaacaccatctccactcaatatcgaaaatccctcgagttctcctatataaacatcccaactcctaaaaaaatccccctttcggagaatataaaattccaaaactatgtattcgtcagtatcaaaacgccttgtctccgtccatatcttggtcgtggtggccttgcaactgctctttatcccaatgttttgtctttgaaccagaccaatgcttatctgcaccataaatgcgtcaacgaccaagggacgtacaattcggggactccatacgagaaaaacctcaacagtctcatacgtactatctctaccttaaatttaaacttcggttttgtccactcgtccaatggtgacgctcccaactctgtcttcattaagcttcaatgccgaggcgactcttacttctccaagtgccgttcctgccttgccacagccaactccgaggtaaagtcatttcaatatttttaatttgttgtcacatatttatacaaaggtcatcttttttatcagtgatccagatactctactagattggtgttgttgaaaaaatactgcatttaacactagtataaaaagtaaaaaatttattaattgtcagtgcaatattgttcttgattttggtgtctatatttatatgacagattagaaggagatgtccaaaaaacaaggagaaaataatatggtacgataactgtgttctcgagatctcttcaatcgatacctttaacaagattgattaccagaacaatttctttatgtacaacgcaaaggatgtgagcggcgatattgagttgttcaacaagaatacaagggatctccttcatgagctgaaggagaaagccaacattaagagcaagaaggatttcatgtatgcggcaggggagaagggtcttggggaaaaaaagttgtatgcgatggtgcagtgtacgaaagacttgacacctaacaattgtaatgtgtgtttaaattggattatggcgaagcttcctaaatgttgcaagggtaaacaaggaggaagagtcttgagtacgagttgtaattttaggtatgagctgtacccttttcttatgatttgaagactactaaaagaaaggacctttgttagagcctctaacttagagggtttcgtttggattgtgttgcaaatcagaggacgtgcttgaaatgttgcatctcttcacacaaaagcttcaacccttaaactgaagctgttatattgcattgtaattgatgaatatatagatgtgatcatttccttttttcaccgttgatccaataattttactctcttagcgacctttttattttatgtgttgttggttgaattatttgtttgttctagtcattgcactactctcttaattttttgtcatcatcaaacaaatataataaaatctagaagatttgaatttaatttccacggttagttaaaatatcaccaagaaagcacaaaacacgtataattctacaattaatgaattaattacatcataaattagccgttaatctatataatgaaactacaattgacaagttcgaatggtttctaggtaaattaaaatgacacgaataaatacacttatacacagcccagagacaaagaaaaatgctttctcatgtaattagaagttcaatgtattcttgcgtacgttgactttcacagtttcacctctctttaggttgtaaaaccaacattacgtattagctccactcaacacattccgtacgttctttgagactgcatgaagggtgttagccatctggctaatttgcagcactgaatatgaaatctatgaagctattttggaggtcttaacaaaattaaatattagtacaaatcgtgtgatttaaagagtttcaaaatcctaacattaataatagactaggagtcttatgtataaatgctagggagaagatgttgatgttgtaatctccatcatatgataatttaaccaaaaatatgaaaaaccttgtaattttatttaactacgttatcgaaactatattgccttcattattgcataattatgaagtatttaaactagacaaaccttttttagaaaaaacaaaactagacgaacttttgaatattgactttttcatcggcactcctctctcatcggcgcaaataccaagtctcaactcctaactcccctctcatgtcctttacaaaccaaaaacatttcttttagaaaatttgtcatgtataaccaagaattgataacaaacattctataatgattagaaaatagaacttaaaaatcatatccactcaatattcaaaatccccgagtcttcaatataaacatcactcaaatcctttacaattaacctaatttaaaaaacatccgtcgttggggaaaaaaggagaaaaatcaaaaacaatgtcttcatcgtctgcatcaaaacttcttggttcggtccttgtctttgctatgatttccgtacaaatcgtttttatacactgtgttatgtccctgaatgaaaccaattcgctgaaccaaaccaatgtttatctgcaccacatatgcatcaacagtcaagggacatacaaaccagggagtccatacgaggaaaacctcaaccgtgtcatccgtgcaatatctatcacaatttctaactatggtttcgttcatggttccaatggtgatgctcccaataccgtttttggaaagctccaatgtcaggcgactcttacttgtccaagtgccgctcttgcctcaccaccgctttctccgaggtaaagtagtttgaaaattattaagtttcatgaacttctaactctacaccggttggcaatgaatgcactgtccaatgtccatgccccgtatatattacgttttgtccatctcaatgggatcttaacacatctttgagatgataactcttatcagctgttgattacaacttgaaaatctcactctaaaaccgacaataaaccctactttgggatttatttgggtcaacaaccatattaatatcatttgttttttttgtcaagcgcattcattgatctccgcaatcatttgcttaaaattcatcataattggcaaaaacagttaatatctcatgtcctttttttttttttttgaagtctactttagtttccttgttactcactatatgagatcccaacaaaaactattgattaattgtgacatatttacattggttgacattttaggacttctacaaacaaaaactatttacatagtaattggttaattccatatttctcttgattttggtgtatatatattatgacagcttcgtggaagatgtccgaaaaacaaggggagaataatatggtacgataattgtcttctagagatatctccaattaattctttaggcaagattgattacgagtataatttctatatgtacaacgagaaagatgtgaacggcgatacaaatttgttcaacaagaatacgagggctctcctctataggctgaaagagaaagccacaagtaaagaaaacaataacggcaagcaggacttacccgagattgggggaaaaaggctcggaatgaagatgttgtatgcgacaggagagaaaagtctcaggacgatgaagttgtacggaatggtgcagtgtacaaaggacttatcgattaaagattgcattgtgtgtttgaactggattatagcgaaacttccgacatgctgcagtaataaacaagggggtagagttttgagtacgagctgtaattttaggtacgagctttaccgttttgtaaagacttgagactgtttgatgaaacctccatatgtatattttgttttctacttacgtgttttgagagaatataaattttatactctttgtgatttgttttctaacactttttaaggctattggtaattttcactttgatttttatgagttaatttttttttttttttataaaaataaaaattaaattaaataaatcagtagcaacttccaagtgagaaattcatgttttgtcgactcaagacacattctttgaggttcattcgttgtagattgatttaaaatttatttgttgtttactgtaggagtggactggctttacacatggtttatgaacaatcattttcgaattttttttttttttccaactaatcattttcgaatttttttttttaaatatcaacacagttaaacttatagaaaatatacctaatagtacaacttgtctcaaaatatcaattaatcaactaaaattttacatagaaaaataaaaaccataaaaactattaaacattaataaaatgaaacccatgggcaatggagtattcgacgagacgatcgagaagtctaaaagctaatgagatgaactgaaagttggtatatgtttaccaacaaaataaactatatgtaaatttagtcaccaaaattccttcgctcccgtgtttttttttctttcttataattatcgagtgatcctaagtgatttaaatcagacaaatgattttggtcagtatgtaagttattctaaatatatattatttgcatggagactgttcgtgtacaaatatgattaattttgacttgttcattggtcctcctcttcactcgccgcaaataccaagtcacaatcccccaacatctctcttttgtccattaccgacaataaaaatatcttctaaaaactgaaatgaggaatcaaattttgtataatgcagccacaaaataaaaactaaatgaacccttctcataattatcaaataaactaacatcgccaatgaatatcccatttcctagaatctcctacataatcatcccaactttttcacaatctgtataacaaagcaaacatcctccttccggtaaacatatcaaaatcaaaaacaatgtcttcatcctttgtatataaaagcctctttttggtccctatcttggccgtggtggccatgcaactctcatttgtacagagtgttttgtccctaaaccagacaaatgagtatctacaccatttatgccttaatcgtcaagggacatacgagtcaggtagtaaatacgcgagagaccttaacaatctcatccaaatgatctctatctcaattttaggtgacgttgtcgtctttagcggtgacaattccatctacgtcaagctccagtgccggggggactcctccacatccacgtgccgctcttgccttgacaccgccttctctggggtaacgtaatttgaatattgttgattagctgtcacgtacttgcaaatataaatgtacacacacatgcatgcacactagttttttggttgcaccttactatcctgtactatattcgggtggtttagttgttgattggcattttgacaatagtaccaaacgaaaccataaatataatatagtaccaaagaaaacaatagagcttgatttatgtgccaatatatatgtatatatgacaggttagtaggagatgtctgaacaacaaaggaagaataatatggtacgacaactgtgttctcacaattttaacatttcatacgtatggcgagatcgattaccagaacaatttctatatttcaacgcaaaggatgtgagcggtgatgcaaaatcattcaacgagaagacgaggactctcctctataagctgaaggagaaagcaagtagtaaagaaaacatccccaacaagaaaaattacttatatgcaacaggggaggaaagtctcgggaagatgaaactgtacgcaatggtgcaatgtacgcaagacttatcaattaaaaattgtaatgtgtgtttgaactggattctggggaagcttcccaaatgttgcaacgataaacaaggaggaagatttttgagtacgagttgtaattttaggtatgagctttacctctttgtaaaacttacgactatttaacgagagcttgatatgcatatacttgttgtgtttgaataagttttctcagctaatatatagatgtaatttactctttgtgatatcttttgtaacacacctttttaattagtctatttgcattagatgttaaccaaaaaatgactatgcgcttaataaaaacggactactaagaatgtaagtgggtaaaaatcaatacaagaattttcttatcaatatcgataaatgatacaagagttttggtctggatagtgagtgagagagcgatattctaaggttttgaaacatcaccagcggctggcctcaggctggccgttgagaagttatttctccttcttccgatggcactagccgcatttccaactgtatgattgacattccttctatctcaactttaaagttggacgttcatatcatgttttataaaatacaaaagtaactttcaaaaaaaaaaaaagagataaatttttacataaagacaatgaaaataaattaggattcaaactcctatgcgatgtcgcaaagaaaatgtggtaaaatttgtcgtatcaaatttatttcaatcatctattgtatagttagtgtactatatattaaatattatatttttgaataaacatatactgaaatcatctaataatcttcaccacaaaatctgatttagcaaataagtttaataacataaagagaaactttaaaggaagcaaattacaacataacctctaaaaatttactcgataaatcgtcatattttttcagtttcaaattatttctttggtacattaataattctaaaatatcagtcttgacaatgttaatttataaaggttttacaatatttgttttgtcggcaaaataaagaggaaaaattttggaataacacacacagtaaaaaaccaggtccttccatatctttcattttgttgacccatacgaatcttcttcattaataaaaacaactttcaaagatttccatgatccatatgtcttgtcaataattcatgtattcctaaagatcttattttttcaccccttttgtgtttatatatatgtaccccaatgtcgatattcatgattacatctgatcaaatcaaattgtgatatttagagactctctcatgggtgttgttagcatgaagggtggagatggagaacacagttatgcaaataattccgaggcgcaggtatgtacttctctataacatatctatgaaccataattaagcttcggcaattatatattgcatatcaataattcactatactattagatgatctgaatgataatttctctgatctatatttagtagataatgtcccacgctactttaaattatatttttacattttctggttgaaaacgataatatattcaatctatatgttggttagatcaagagtcgagtttttggtttacaaataataatttttaatttaaagtatatatagttgtataatagaattctcaaaatttattaaatatgatagtgctcatttcattagtggaattcttacacataatattaaaattgaattgtcaaatgatattatttaccaaaatgttgtttgatattaaaaataatgaaaatttgtttttgtttaattttattgataaactagtatgttttggttataaagatggaggagaaattaatctagatttttttttttttcttctggtatcaaatgtgtgtgtgtgttttttgtttctttcttttgttgattcaaaaagcttgaatcaacaaatgttaaaaagtgtgataaaatttcgctttttaacttcttagaaaagtattacttctgatgcaaaaccggaggtgatgaaaagcgtaaacgaaatgatagtgaaaatggattttcctggttgcatcaaagtggctgacttgggatgctcttccggagaaaatacattcttggttatgtccgaaatcgttaacacaatcattacaacataccaacaaaatggtcaaaatctaccggagatcgattgttgcctgaacgatcttccagagaacgacttcaacacaactttcaagttgatcccttccttccacgagaagctgaagatgaatgttaaaggaaattgctatgtctcaggatgcccaggctcattctacacaaggcttttcccaagcaaatctcttcattttgtccattcatctttttgtctccattggctttctaaagttcctgatgggcttgaggaaaataagaagaacgtgtatcttagaagtccatgccctccaaatttgtacgagagttattggaatcagtttaagaaagatttctcaatgtttctaagaatgcgtgcggaagagacaatgcctagtggacgcatggctctcactttagttggcagaaaaactttggaccctttatccaaagagtgtttcaaagattggtcgttggtttctgattccctcctcgatttggtgtctgaggtacttactacagtcacacttcttaatttttttggtaacctaaaagttctgatcgtagttataataatatactggaggagtattttgagtgtgcagggagttgtgaaggaatcagatttggaatctttcaacttgccgtattacagtcctgatgaaagtgaggtgaaggaagttatcgagaacgagggctcattcgagatcaaaaattttgagacaatatttggacttctcttttcatacaaaactggtcatagtgaagtgaaagatgatgatgatgatgtggaccattcacgtcgatttgaagtggttaaaacgagggctaatatgacaagatccatcattgaaccgatgcttgttgctcattttggagaagccattattgatcggctctttgacaagtatatatatcatgcatgtcaacgttacgataccttgcgcaacaaaccaaccgttaatttctttgtttcgttgactaggaagtgatggatcgtcgctctattgctgccaataattgatgaaaaataaaggataataatgatccttggtgatgactggctaccccagccaatattaatatgttatttattgtgcctttaatttccctgttatgtattggtgtgctttgaatgtgtttgaatttcattatctgtctcaataaaaccagctacatccatttatttcgtaaggactcaattttatcacccccttgtatgaaaacgttttttttttccgatgtatcaaattatttttagatatattataagttgtgtttgaatttagaaatcttttttttttcaaatttatttaggtgtaaaaacttgcacagcatttaaaatgaaacaaaatgagtaataaattaatcttatttaggttttgttatgtattgtgatgactgaaataatggggtttggatctagacatttctgatttgtctagtgtccatgcatcgatcatatttttcatataatattacataaaagaaaagaacaatagagaaatagtgtggttactagattttgtttaaaatttatttgtgtgcagttttatttttggtgtaaatgttaagacgatatttgtgtgtagttgtggttatgcgattctaaaatatatgactttttctttggcccttcccctcccctcgccgcaaataccaagtctatagcccaactcctgtcaaacaaattatcagaaaaacaattaaaataaacctctctatgtcttttacaaactaaaaacctttcttttagacactacaatcattaatcgaaatacatattatgcaatcagaaaattaaaaacacaacaaagttttaatgattatcgaattagaaaaagagaaacaaaattttactccgtatcaaaaaatcgctaaagtctcctatataatcattccaactccatgattgattttaaaatccccatatcaaatccgatacgatgtctttatcctcttctgtaacgaaacatcttatttcggcctccatattagccatagtggcaatgcaactcccttctgtacacagtgttttatccctaaacgagaccaatgcatatctgcaccacatatgcattaacggtgaagggacattcaagtcggggagtccatacgagaaagaaatcaaacaactcattgattttttgtcatcgtttatcaaagactatagttttgtccacggcgttagtggtattggtcccgatgatatcaacgtcaagttccagtgccgaggcgataccttacaagccaagtgccgctcttgcctcgccaccgccttctccgaggtaatgtgataattttctgtcatatatatacgtatatatatataaatgtacgtcactcgtcaggtttggttatatcttagcattctgataatattggatttgtttaattgagataatactaattagcaatttaattgttgtaaattatatattacatagtataaaaaacccaatagttcttgattattgtgatatatatgacagattcgtagtaaatgtccgaacaacaaagggagaataatatggtacgataactgtcatctcgacctttcgtcaatctatacatatggccagatcgattacaagaacaatttctatatgtacaacgcgaaggatgtgaggggcgataaaaagtctttctacaagaacatgaaggcattccttcataagctaaaggcgaaagcaagtagtaaggaaaacaaaccctacgtgaaagactatatgtatgcagcaggaagggaaagtcttgggacggtgaaattgtacgcaatggtgcagtgtacgcaggacttatcgcttaaaaattgcactgtgtgtttggactggattatgacgaagcttcccgaatgctgcaatggtaaacaaggaggaagagttttgagtccaagctgtaattttaggtatgagctatatccttttgtagaaaattaaggctattttaatgagagttatatatatatatatatatatactttttgtgtttgaataagtattttgagcagataatttttttcttagctcttttgcaatttagtttgtataacacttttgagagtatttgcattagatgttcaaccaaaaataaaaagtacgccctagctagatatattgtccaagatggcttacggttttgtgtatgcatggtttgttattatctatcaaccaaattaattaaaaaaaacaaaaatcaatttcatttcgtcttatgctttaagagttcatccgatatcatgcatccaatccattatctgctaaagctcaggtctgcttctattttaattttgttcatatctagccaatctttgtgtgcattatcggaacccattgttcatgaactgcaattggtacgatatgtctcattgttgctatggttgttcgaaagctttataagaaccttgccacttgattcacctatggtcattggtcttgaaataataagattgattattgaagtttttagaccgaagaatatcggcattatgatcccgcctctaaggagcggtgattaccgatgttcttccaatccctcttgttcgttttatctgaatactaagaccaagcgattgcaaattaacaactttatgggtattattcaagaaacaagaagtttgaggaagaacggcattatgatcccgtccccaaggagcggtgattactgatgcttcctcaacttttcatccccttatttcctgataaccgagcccaatcatgtgcatattatcaacttcaaggataacgttctttcacctaaaagcttgaagctcaggtttggttacctttttcatgtgtcaagccgaagacaaactttgtgtgaaattcttaatctccatggtcatgtgagagagaatccacatgttctgttacgacttgtctcccatcctctgtgaaccatgactctagcttccatatgctatgttttgtctaagctgaatgctctatccacgacaactctagcttgcaatcttaagcatcagatcaccatcaccttagctcgattctatgtcaaagcgctacttcgtgtagattttctcgtgccggcgagatcgcagactttgatcccatctttaacgccactctgtctcttgactgcggccatttgttcatctatcgactcgttcttggaagaattgtcgatgacctttgatcttacatgtaccaaaaagctagttagctttcggctcaaagctctcaaggatctcttgtgtttttaccttatctatccttctttctatcttatgttggcattagggaatgcttttattagctgtattgtaaacattagaatctcagattctgtctctgtacttggtttctatcatcactgaatgaaatcaagcctttgttcaaaaaaaaaaaaaaaaaaaagactttgccctagtaattcttaaaaagagaagttcctttaaaaaaaaaaaaaaaaaaaaccctagatacatacaaacgtaacagtaataatagacgagagaatatgtctaaaggtaacgagatgaaactgaaagttagaatcttatcatatttttgccaataaataaagacttgcattatcgtgtgattttttggtgatagttgacttcatcattatcatgtgctttaagagatcaaaatcagacaaaccttatcagccgttacttataggcttataactccactacacattcagtcggtacgttattacttattgattaattccatggaaacttatagtgtacgaagctattacaaaaggtgtaaaaaattgaaaattcagtgtagagtaatttcacattttaagagttttaactttgactttttttcattggtactccttttccctcgccgataatacctagtctcaaccccaaattaactcatctctcatgtcgttagactattgacatttattcttgaaactgaaataagaaatcgaactttgtatttggtaaccaaaacacataaatactacaacacattataatacttatccactgtctccaagattgatgtgataaaaacagaggccttctccggagaaatagaaagatgtcttcatcctttttatcaagacccctcgtttcggtctatgtcttcgccatggtgaccatgcaactcctttttatgcaaagtgttttgtccctaaaccagaccaatgcgtatctgaaccacatatgcatcaaaggtgaagggatagtcaaggggagttcgtacgaaggatcagtcaaaagtgtcatcgatcatatgtcaacctatcttgactatggttttgtcaacggcgccggtagtgatggccccactaatatctatgccaaactccagtgccgggcggatgcctctgaatccaaatgccgctcttgcctcgccaccgccttctcagaggtaaggacatttcaacattatcgtttagatgtcatatatacttacatatataaatgcatgtaaatatgtcagttcttattgtggctaaatatatgtatttatgacagattcgtaagaaatgtccgaactacaaagggagaataatatggtacgacaactgtcttctggacatttcatcgatctatacccttgctgaaatcgattagcgacacattttcaatatgtacaacgcgaaggatgtgagcagcgatacaatggcgttcaacaagaacacgagggctcttctctatgcgctgaaggagaaagcaattagtaaaaaagaactaccttataggagagactacttgtattcagcgggggaggaaagcctcgggaaaaaaaaagtgtacgcaatggtacagtgtacgaaggacttatcagctaaaaattgtagtgtctgtttgagttatattttgtcgaagcttcccaaatgctgcaagggtaaacaaggaggaagtgttttgagtccgagctgtaattttaggtatgagctttacccttttgtgaagacttgagactctttgatgagagccccatatgtatattgttgtagtttgaagaagagctttgagcaaatagatagtactatactttttttattgcttatactaaagcacaagttaattttattttctttgagatgttgcaacgagaaaatatttaagagcttttactttcatccaaatgaaaaatgtgtgaataagcttaaatgtgtaaggtctagaggatttgtaattcattgaactttctgattcaatgatgattatctacaacatacagcaataaaaggagtaaaaatttggtactatcctctgttttttttttccttcccgactccaatccttagttttcaccagtgtacgttcttgcaattttgccgctatacactctgacgtcttccctaatatcccctcttatatcttctccgatattttcaccggaatggctatggttaatttgttatgttggacaacaaaaggatggaaatatttgcagagtttatattttcaacttcttatcagcgagtttgctttgttaatcttactttcctcacacatgtcagtataaacgaagacttcagacaagagaaagtctatttactatagtgtcttgtgtcccattcgggtgactaacatgtttagacttcatagtcctgttttgcattttaatcagataccaagatatgattttaatgtgaataaaataaaagtattttacaagtttatgtaatttttatgataatatgtgctttaaatcaaaatatcttataaagtgaaacggtgaaaacataattttccacatattattattttctatgtaatggtacaaaccacatatattttccaagtcccaaagttggattatttacatgatgactttgtattttttgttgtaatatatccaatctattttaagaaaaagggattcttgtcattacataactacataataaactaataataccttcatttcaggttgatagtgcgaacgtatcgtgtgactctaagatattaaaatccgacaaacattcgaactttgactatttcatctgcgctcttttcttggcgcaaataccaagtctcaacgtccaactcctctctcttttcttacagactaatagaacatgtgttatatatagaaataaaatgatcaatcgaatttgtatataaggtcaatatttccaccaattctaatattgttaaaaaaaaaaaaaaaacagcttcatttaaggtccaacatccctcatcatcaagtctccattataaacattcgaactcctcgacgatttatctcataataaacaggaacaaaacacaatctccagaaaaaaaaatcaagaaaccaataatatgtcttcaaatatttttggatcggtccctattttggtcgtggtggctatacaacttcttcttgtacacaatgtttcttcccagaacgttaccaatgactatttgaaccaccaatgcaacaacacccaagggagatacacgcatgggagtacgtttgagaagaacctcaaccaagttcttcataacatctctaacctcgatcttagatacggttacgcctacgtctctaatgttgtggcttacaaagttagcaaggatcccaacattgtcttcgttttgctccagtgccgcggtgactcctttgggtccaaatgccactcctgcctcagcacagccgtctctggggtaatttcacttcaatattatattagaagtcacatatttccatatagaaatgtgcaatcatattcaaatcatagtggtgattatataaaagatctatgatgaactaataacgtttaattaataaaactaatacacatttaaggctagtacaaaataaatacatgtaaattagtccatgcaatgatgttcttgactgtggatctctaattaacaaatatatatgacagcttcgtgagagatgtccaggaaacagaggagcaacaatatggtacgaccaatgtcttttggagatttcttcggtggattccgaggggaggatccattacaaacgtatgttctatatgcaaaacccgacgaacgtcaccaacgatcccaaacggttcgaagataaaagaagggatctcctccacaagctaatgctggaagccaccaaggatagcaaggaaaacggcgccaagggactgttgtacgcagtgggtgagatgaggattggaagaaataagatgtatgcaatggtgcagtgtacgcaagacttatggcagactggttgccatgtgtgtctagaatggattacgcagatgaaatatggagagttcttctaccgtaaaccaggagggagagtttgtggtaggagttgtagctttaggtatgagctttacccttttcttagaaggtaaatgacttttttctttctatttagtctgagctccatttctctccccctctcactctctcatatattgcgaagtgtttaaataaagtcaatgggtgaataaaaaatgtctactctttgtggttttgtataacacatattctaattaactctacttgtttgattttattttttctctaaaagaaaaaaaaaaaaaaaactcaggagaaaccgtatggtttggagaattcttccaactatctatttgaagtatgtaacacaaattcaaaactgtatgttattattagtttttataaacagatcatggtcatgttctaatctacggtcatgttcatggaccagatcactacattgttgaaatcgtcggatttgaacatatttagattagcgttggagtttagttaagtcgttatactaaagatttttctgcaatatatttccgacgtaataaaattttcattatttatccgtaaagatgattgcaattccataatttgatagtgacaatggttacctaaatctttatatttttttatttttttatcaatcttatatacttctgaatagctaattaattggtgggctaaaatagaatttctcactacgtggacgctaaaacgtttttgaaaaatatcactattcgaccaagaaaaaatatcacgtttttgaaaaatatcactattatacttatgacaaaaataggtcacaaaattaattcaaatccaccccttagctaaatataaaatataataatgtgtaagctaatttcatactccagatatatcacttccgaaatttattggatgaaatgaagaagcatgcataaattctgaactaatgcaacaactacatttcctaacagcaaaattacgacatctcatcttccctcattttcgtaggaagttaggcaatgtaaagactacttggttccggaccgaaacttggtcctccgagacatcatccacatgcatggatcagctacacttggtattaccttgacgtcaatagttgtcgacgtattgaaataatggtaactaaatcatccgtaaactcaatctgaaacttaagtaaatattctacaatttctcctttcaacaacctttttgaatgatgaagtcaattcctctttgtgactgttcgacgacaaagagcacaaatccgttgacagtaattagaagatgtggaaagaaaatcgagtttccacgcaccctatgtggactggttccctctagtttggaatgtatgttcaaacaaatttgaatttattttgtattcatgtacgtagtagacatttaaatttattagtagacggaaattcatatacatatggactacggataaattaaacactccctttctttcaggcagagaccgaacgtattgtgtgattaaaaatacacaaacattcaaactatgactttttcataggcgctcctcgtccttcgccacaaatacgtactattaacatttctttctttttaaatagctagagagtaaaatgatcaatcgaattttttgaaggcaacaacagaataagaaaattccagcaacatcttcacttaatagccataatacctcgagtctcctatataaacattcccactcctcaacgtttcatctaatgaaaaaacaccatctccggttaaaagatcaaagatcccaaacaatgatttcaaaatttggatcggtccatatcttggctgtggtagccatacaactcctaattataccaagcgtttcgtcccttaaccttacaaatgcgtatttgcaccacaaatgtaacaacaccgaaggaaaatatagccacgggagtgcgtttgagaaatatatcaacttagctctccgtgccatcgattcagacaattatctcaatggttttgcctacatcgagagaggtgaggatcccaataaagtcttcgtcatgtaccaatgtcgcggcgactcctacgggtctaagtgcaaatcctgcataagcgctgccatctctggggtaattgtcacttcaattttattagttaaccgtcatacatttacattttaaaattgcgagcacaaacacatgtcattttgttttggttaagatcttagagatatatccaatgatcctgacactctacatagatggatgaattgagactaaaaatgataaaagattgtgaccataactaaaaaaatgaagattaaacaatgcaatattgttcttaaccgcgatgtcacatgtatggatacgtatatgacagcttcgtaggagatgtccaaaaagcaagggggcagtaatatggtatgaccaatgtctttttgagatatctaccaatcaactccttcaataagattgattacgagaacgatttctatttgtccaacccgaacgacgtgaacgataaggagttgttcaacaaggagacctcggctctcttggaggagctaacaaataaagccactgataaaaataacatgataggcaataaatttgtgctgtacgcggcaggggataagagaattggaacgaagaatgtgtatgcaatggtgcaatgtacgaaagacttagtgactacaacttctgctgcgtgtttcgaatggattttcaagatgttttcaaagtgctgtgaaggaaagcaaggagggagagttttgggtacgagctgtaactttaggtatgagttatatccctttcttagaaattaacgactgtacagtgagtgctctacataaaataaaaggggtccagagccaaaatatggtcttatacattggttgtgtttaatagttgagcgaataaatgtatttcctctttgtgattcgttttgtatattttcgtttgttagcataactcattaaaagaagaagaagttgtatttaggtttttaaactaactaatttgaaaaatcaaagtatttctaattcccacttcattattttcatttttcacccacagtctccttctttcacactatttggtttataactaattagatagatagtgaaataaatctcaccctttcacacgaaagaagaagccaaaaggaaggggagaagctcatatgcccaaaatacatttttttaattctaaatctgaaatgatgaatcaaatttggtttataatagccagaaaatgatatggcaaagtaaatgtattataattatgaattaaaatgattttcagctttttttcttctttttgtaaaattatctagttacagacaaatttaagagtaatagtaaacgaagaagtcatatatacaaaatgctaaagagatgaaactgtatgtttagaatgcaattaaatctgagaattaagttcattttcaggttacaaaatttgactttttcataggcaatcctcttcccttgccgaaaataccaagtctcaacggccacctcctcctctcctgcattacagactaattttttttttttttttttttaaatagaaattaaaatgagcaatcgaattttgtattatgcaaccaaaatttgacaacttccagaaattctaataactatcaaattaaaaaaaaaaaaaaaaatcgtcacttaatagccatgcatatttccttgagtctcgtataaaaacattaaaactctttaagatgtcatctaatgttaaaagaccctctcctaagaaatagatcaaagatccaaaacaatgttttcaacttttggatcggtccctatcttaaccgtggtggccatacaactctttcttatacgcaatgttttgtccctgaaccttactaatgcgtatctgcaccacaaatgtaacaacacccaagggatatacaagcggggaagtgcgttcgagaaaaatctgaacatagccctccgtactgtcatttttaatggcgattttcgcactggtttccgatatggggatgtaggtgaggatcccaataccgtctttgttatgtaccaatgtcgtggtgactcctattggtccaactgccgaacttgtgtcactaccgccctctcaggggtaactataaattcaatattattaatttatcagtcacatgtttacctgtataattgtgccagtacacacattaatattttttttggttaaatcttagatatcaaaacaaaagatttatacatttaaggctagtacaaatgcactattatatgaaattcaaccatgcaatattgttcttgactgtggtgttgatatttatggatatgcatatgacagcttcgaaagagatgtccaggtaacaagggggcaataatatagtatgatcaatgtcttttcgagatatctactgtcgattcctaccataagatcgattacgagaacgatttctatttgtccaacccaaagaacgtgagcaatcgagagttgttcaacagggagacatccgctctccttgagaagctaacaactaaagccactgataaaaagaacatagacggtgccaatcaattggttctgtatgcggcaggagagaagagaattgggacgaaaaaggtgtacgcaatggtgcagtgtacaaaagacttagtgtttacaacttgctcttcgtgtttggaatggattttcaggatgtattcagactgttgtgatggtaaacaaggaggaagagttttgggtacgagttgtaattttaggtatgagttatatccttttcttagaaattagcgatacaatactgaggcttccatattaaatgaaagaggtccatgagtacacggtcttatatatatgtacattgtgttgcgcgaatttgaatactgcacaagatacgttaacttcactttgctttattttgtatattatagacagcataattcatgaaaagagactctatagtaagggaaaaacataatccaagaataatatacatcccacatactgtagatcacaacaaaacccataaaaggtaaactaaactctctcataattgtgaaataaggttagcgaaagctcttgtgagttgtgaccattatttttagcaaatgccaattatggccggaatagaccccaaatggatacgcacaaaccaagggatgtttactaatagaaaattgctttttatactgcttaacatgcaactatagtgtataaaatcatcttaaaaccacattaaaggaagaccaaaaactgaagttaaaagtttggaattcaagatgagtacaatgatgtcatgggtagaaaatagaaattgtttaaatgttttattttcgaatgcaattgagcgatgtccatcattgagaagccaaacaaccggaaaaaatctcactcactcatccgaaagaagtttgctaagaaggccaagccaaagggaagaggtggaactcagatgacctagagagatccccatatggcctaaaaaaaaatattctaaaaattgaataatcaacaaattttatataatgtgaccagaaaatgaaaagagaaactatgtaataattatcaaatataatgtttttagcttttattttcttctcaattttctaggaacatacaagcataacgttaatactagaccaaaagtcatataatatataacatgagatgagatgaaactgtacgttgtcgttgtataattacataaactactaataacataacactgccttcatttcaggtcgacacctaacttattgtgtgatttaaatcagacaaaccttcgaactttgactttttcattgcctcctgtcccttcgccgcaaaatactagtctaaacgctcaactcctatctcctctcttataaactttttttttttagaaaatgagatgatcaatcgaattttattgtgtggccagaaactgacaacttccagcattgtactattaccattttttttatagaaaaagatgaacttcactttagagcaataacaatccctcgagtctcccctatataaagattccaactctttaacgattcatctattgaaaaaacacacacaccaaaaatatcagatatctcaaacaatgtcttcagtttttggatctgtccatatcttggccatgatagccatacaactcctccttatacacagtgtttcgtctctgaaccttacaaatgcgtatctgcaccacaaatgcagcaacactcaaggaaaatataagcaggggagtgcgttcgagaaaaatctcaacttagtcctcagtaccatcacctcgattggaaattttcgtgacggtttccgctacaccgaagaaggtgaggatcccaataacgtctttgtcatgttccagtgtcgcggcgactcctactggtccaagtgccccccttgcattagcaccgctgtctctggggtaattgtgacttcaatattataaattagcagtcatatagttacatgtaaaaattacgatgagcacacacgtcggttatttttttctgtcaaatcttaaatatgtgtccaatgatcctgatactttacataaatgattgagttgagacaaaactgatagacattaaaggctaattcaaaaatactgattaaacaatgcaatattgttcttgatatatatgtatatgtatgtgacagcttcgtaggagatgtccaagaaataagggagcaataatatggtatgaccaatgtcttttaaagatatcttcagtcgcctccttcaataagatagattatgagaacgatttctatttgtccaacccaaaaaacatgagtgatcgggagttgttcaacaaggagacgtcggctctcctggagaagctggcaaataaagcctccgatagaaacaacttggatggtaaacaattggtgttgtacgcagcaggggagaagagaattgggacaaagaaggtgtctgcaatggtgcagtgtacgaaagacttaatatttacaaagtgctttgagtgtttggaagggattttgaggaagtttccagagtgttgtgacggtaaacaaggagggagagttttgggtacgagctgtaactttaggtatgagttatatccttttcttagaaactaacaacaacagtacaatgagagctccatattaaatgaaagggttctagagataaacagtcttataatatacactgtgttgcattttagtacgtgaacttaattgagcgaataaatgtactttcctctttgggatttttgtttttttttgtgaacttgagttattgagaagaaatgttcaagtatctactagtaaatacatcccacatagaataccaaatagctcagctcatacaaactctctcataatgagagaaaaaaaatcctgaaataagggtaagaaaaactcttatgcctcaaggttttagtaaatctcataattttggccgaaccacaaaaagagacgtgcgaaacaaaatagtagaaaattgatttcccgaatcgacaaacatggactaaactataattatgatatataactggtagtacttacaatgatgatacttggtttcacgaagacgagggagcctggagatgaatgatggtgataaggccatgtggcatcatgtcttgtgccggagtcgacgtatgtagaagtcggaagaattagtaaattcacatgtatcagcttcatgataacttcatttgccaacaatttttagtatgtgctaacattaatacgcttgcatgtatatattcattatttcttaacaaaaaattaaaaattcacaagtacataaattagtgtttgatcgaaaccaaatattaaataattacaatatttttagtcacttagaaatctatgtaatatgcctaaattaatcttttactctcttctcgtagcattatacatcatttttttaaattttttttagactctcagatgaaagacaatgctattacagtgtcgaaaccacattatcttgaatagtctaattcttttcactgcaaccatgctctacgtgaagtagagttacaatatcattggattaaaaatatgagctcattgcaatggaaatgatataactacaattgaaaattaaccttcttacacagggtcactacgcatgaaagttaaaacatctattgctcctggcacaaaaccagtggcgcactacaagtttggaattgggtgattctattttctcagagttttaacttagtaaagcatttgaactttgactttttcatatgctctccacatccctcgccgaaaataccaaactcctctctcttggttgttacagacgaaaaaaaacttctcaaaactaaaatgatcaaatccagttttgtataaggtaaccataaaggaattgtataccgtcttgaaaaaaattagttaatctagttaccaatgaagccaatcagctaaatccttcctactctcctgtatatataaacatcacaactcaacgcttcatttataataaaaaagaaaaacaaaacacacctaactcttgaaaaaaaacaatcaaaacaaaatacaatatgtactcttcatgttctcttttacaacgtctcgtttggttccctttcttagccttggtggccacacaactcctatttatacgcaatgtttcgtccctgaacctcaccaatgagtatctgcatcacaaatgtctcgttagtgaagggaaatataaaccaggaagcaagtacgagtatatccttaacgattacatccgttttctcgcagccggaaattttcgctcaggttccatgcacatgactagtggtctaaaacccaatgctgtaaccattctctaccagtgcagcggtgactcctataattctaagtgccgctcttgctatgctgccggcatctccggggtaacattatttactctcttcatatcatattaaatgttattttagccaaaacaaattgttttaaataagaaatattatgttctgtgattatttgtatacaacaatttatgtttgattcaagattttcttgtgcccaacagccctcaaggcttttaagtctgtccatagcgaccaattcaatgaccctagcgtacaatttatcaaattaggtaaataggaagggtaatgaatggtattgtttttttatgtctaacagattcttcattcacattttcaacttatgaaagcctattttctaatacagattcatgaattagttagaaagcacaaacgcacaatgattgtttcttatatatttatatttatttaataatattttagctattatttcataatttaatgtattaattattttaacacgtcaaaacatgaattaattatgtaaaatgtaaacgacagcttcgtaggcgatgtccgagaaacaaaggtgggataatatggttcgatcagtgttttgttgagattacttcaatcagtgtcatcgacttcaacatctcaaagatcaattacgagaacaatttccccttacacaacccgaacagggtaagtggcaatataaagtcattcaacaatgagacaatggctctcctcaaagagttggcgttgaaagcaaataataaagacaacatggacaatggcaagatggcactgtacgcatcaggggagaagagggtcgggacaaagaaggtgtacgcaatggttcagtgtatgagagatctagttaagcctaagatgtgtaaggagtgtttggaaagcattataaaggagtttcccgagtgttgcgacggtaaacaaggagggaggattttgggtacgagctgtgattttaggtatgaactttacccttttctaaggacttcagattcaaaaactgtttgatgacgatgcacaacacattctcttgacaccttacttattttacttcagttccggttttttgagctttttactagtttttatttatattgtttattcttggatttccctttgtgctggtttagatcacatgtgcctatgactaagatcccaagctgtgtttttcctcactctttatttggttattaattacagttgttggctatgaataagaagctctattattcttgacatcttaaatttgttaacatagaactccgttttctaatttattgttggcgactaaatagcgtcacgtgtagttaatttagacgaatatttccgcgtcattgcttaatctgagtcatgatcctacaatttccaagtcattcaacgggtaaaactactccctgattgacaagataattttgtgattatccgtagctctatcaaacctgtaattaagataatgcaaacttctaacaagcaagaaatatttaaccgatcataaagattatgtactggatataagcgtcagttatggtgaatatatattcagcataaataatttatcatcacccatattatgtcgttcaagaagattcatgatgtatttccgttgtgttacgtttatcctattgaaaaaatctgtgatgtcaaatgtatttggatcaacgaatcctcgtagcgttagaaagtttccactctatcgcaatgcatgggttttagctaatttccatggaacattttcttttttaaaggaagtctacgttactacgtatgaaagttaaaacagcttcacaaatcacaagatcccaacacccaaaatcatcctgctccttgcacaaaaccggccagtgcgtatcctatgattatgttttctaaaagttttaatttagtaaaaggcgttgaactttgattttttcatctgccctccccatccctcgccgaaaattctaaaatcctctctcatttctgttacagccaataaccattttttctacaaattgaaatgattaaatctaatttgtaaaggtaagttaaacaaacaaaaaaaaagattacagttgaaattattagttaatttagatctaatgaatccaatcagctaagtccttttgtctcctatatatatatagaaacatcccaatcttagcctttcatatatggaaaacttctaactctggaaaaaaaatcaaaacaagaaacaatgcacaattcatattctttatcaaaacgacttgttttggtccttttcttggccgtggtggccacacaactgttccttatacgcaatgtttcgtccctgaatctgaccaatgcgtatctgcaccacaaatgcctcatcagtcaaggaaagtataagccaggaagtcagtatgagaaaaaccttaactctcacatcgatttgattattaactcgacttttcgcaacggatttggtcacatgacaactgctatgggaagtcccaatatggtaaacatcatattccagtgccgtggagactcctaccagtccaagtgccgctcttgctttgccgcaggcatttccggggaaatgtcacttatatttatccaatatccctcatacataatttgcaaagtcattttcgaacagaatgtttacttcgataatttcggaggaatttcaaaaatatggcattgatttgtatattgttataaaactataagagataattaaaagcaatcttttcgttacaaatttaaattctagtttttgaaacacgttcatttataatattatcacttttaataaacttgttttttttctttttgcaaaattaccattacaaattatttagtccataaataccatagataaaagtgatttaattttaattttttggtttgggtttatgttttagtttttaggttttgttgtttagaacttaaggtttggtattgtggtatttttgaggaataaaaactagtgatggcatttcattttagtgattttttgagatttatcctttttgttttgattttcatctacttattaattaatttctcagatttaacgcttggaagaaaaaacaaacataacttcgattgaaaaaaatcagtgtcgttcagttttgttcttaaaatggcaataattccgataactcttgatactctgctttggtttcttaattgagacaatatgtaaaatattgttctagattgttgtgttgatatgtatttatgtaagcttcgtaggagatgtccgagaaacaaaggtggaataatatggttcgaccagtgttttgtcgagattactgcaatcgaggtcatggaggtgaattacgataacaatttttatatgcacaacccgaacaaggtaatgggtgatgcaaagtctttcaacaaggagactatggcttttctagaacagctggcgttggaagcaacccgtaaagacaacatggaggacggcatgatggcactatactcggccagggagaagatggttgggacgaagaagctgtacgcaatggttcagtgtacgagagatgtattcatgtttaagacaatgtgtaaggagtgtttggaaaggataatcagccagtatcccaaatgttgcgacggtaaacaaggagggagagttttgggtacaagctgtaactttagatatgagttttacccttttcttaggacttaaaacattttttgagaatgatgcaagccacacatttctcttgacaactttccttttttgatacctttaattttttgggtttttgggttttcactccactttcgtttttgttcgttaggtcctcgttgtacctatgaatatcaagctttattcattacagcctttaattttataattagtaaagagatgatataatgtatatcgtctcctcttttttttttttttttgtctcctcttttcatattcttatattcgggatatttttgagagaattggtcaaatgactataaattagagaataactattaatatgatcatcaaatgtgttctagtaacttaataactgtcttatggaaagttttgttagcaccactcacatacatcatcgaactttcagcataccacaagcaagacttctctggattatcgacaaatatgcgattttttttaagtaaaacatttaaactttgactttttcatcagccctccctatccctcgccgaaaaatacccaaaatcgtctctcctttctgggatagacaaaaaaaaacataaaaaaactaaaaacatttcttctacaaactgaatgatcaatcgaattttgtaagaagttctttttaatattagttcatctagttacgaaagaggacagtcagctaaaaccattccgagtctcctttctaaacatctccatcacaacgcttaatttatctcaaaaaacatgtactcatcatattctctattcaaatgcctcgtttgtttctatatcttgggtatacaagtcctcatacatagcgtttcgtcccagaatcttactaatgcgtatttgcaccacaaatgcctcactcgtcaagggaaatataagccgagaagcccgtacgaggaaaaccttaattatctcatcgatcatatctctaagtatcattttcgggacggtttcagacacagcgcatggtgaggctccgaattccggcaactttgtattccaatgccgtggagactcctacgggtctatatgcggttcttgctatgccaccgctgtggccggggtaatgtcacttccacattattaactagtcgtcatacatttacatctataacatagataaccatatatacatttacatttatattttcaaaccatgaatcatttaccatgaaaataattaagaaacgctaaacatatgcattgaaatttaaatcatcgtttagaatgaacaaaatatatatggatatgtatatgacagcttcgtaagagatgtcagagatacaaaggagcaataatatggtatgatcaatgttttctcaaagtaagtacgatcaactcccctccaacgaagatggattacgagaatactttttctatgcacaacccaaacaacatcaacggggatactcagttgttcaaccaaaagatgaagaatttcctctatgagctagcgctgaaagcggataaacccaaagcggacggtaccggtttgctatattacgcggcagggacgaagaggctcgggaagaataaactgtatgcaatggtgcagtgtactttagacatatttcattgtaaggtttgtttggaatggagtattaaggagctttcaaagtgttgtgaaggtaaacaaggagcgagagttttgggaacgagttgtaatgttaggtatgagttatacccttttattaggacctaaagactttgtaatgatgtagaacacattctcttgacaactctttaattttgttttggttttgttttcttctccattttagtctttgtattgtttcttttaagctttgctttcatatatttgtttacatataccaactttgttgttcctcaccctttcatctaattggatgattgttgataaggagacaacgctgataaatggtgtattacatttttcatgatttcacttttgaaaagtgattccgttacttttactattaagaatatgcatgcatcaacgatttcacgcttttaaaaagtgattctgttatatactataagcaaagcataatagtagagtgtgccctattagagtcatttgagtcgataaatccatcagatgtatgcaaaatagtaatgcatgtatttatgtgactctacacaatcagatgagtagcagagaagaaagcttgtgtttttttgttattcaccaagaggctagttggttggaaatagggttcttctacgggcttagaagtcagatcgtgtggattggtcgaagacaatacgtgtgttctctagatgaatccagagaccattactcctaaggttccataaagctactacttgtggtagtggtgtacatcttggctctgggggattggtcgaatgcatatttctcattatggaataaaaatcagtttttaatgtactgagacaccgttttgttttactctttaatgtaatgtatttctcattgtgctttacccttttattaggacttaaatactggtgatgatgcagaacacattctcttgacaacttccaaattttgctttggtttctttactttctagtttctaattctctttttcaacccttatcatttttttcccctcgttcgcctttttgttttgttttgttgatgtcctacctatgactatgattatgaatagggtccaaaacatcgctatccccatagagatacatttcttctccactctgtctcttatatccagataagttcttagaaatatagctacaaagaaatcaacatgttccagcatttcaatactttggcaacgtcatttgatgagatttgcatacttttgtaagtgtgacgaactcgaacaacaacattctatgatttggaaagcaccaagtccgatgttattcttcactagatatatgttcagttaatttttacaatgctaatatttaatcagtgatacacagttttaactaagctttagattgtgatcccaatggacttctattataaacaagcttcaccacaatgatctcacacaaccgtgaatcaatggattgaacacccacctccaaacttgctatttgaaaagattcaagatatgcaatatctccacttgcgatccttagtgttaacagctcaatctcaatcctcaaacctatatacattaatcgccaaaaacccctaacttaatcgtaaagcaatctttgttaaatcacaaacttaatctccaagtttcgttccaaaaccaacgtagaatatttgtatttttgcaagtctatccctcaagtctatccagcttagcaaatattcatctaataaaaacatcctaatggtgattctattttctacgattgataaattagtataaatttgaactttgacttttaccaaaaaaatttttttgaactttgactttttcataggctctccccatccctcgccgaaaattcccaactcatctctgtcctctctgttatagacaaaattccttctacaaactgaaatgatcaaaaacaaatatagctttgagttagagaaaaatagttaatttagttactactgagacgaatctgctaaaatccttattctcctctagaaaaagaataaataaaccaaaacaatgttctcttcatattctctatgcaaatgcctcgtttctttccatatattggctatacaagtcctcataagctgtgcgtcttccttgaatcttactaatgagtatctgaaccacaaatgtcgcgtgatcaaggaaaataccaaccaggaagtgagtacgagaaagaactcaacactctcagccgtagagttgctacccttgactttacagatggtttcacacaccggtccaatagtagagataccaaatctgtcaccatcatattccaatgtcgcggtgactcttacaggtccaagtgcaactcctgctatgctaccgccctcgccggggtaatgccactttaacatgtttgcatatgtgtagtctatatcttgtcgttcgctataaacaactaccttaactaaagccaaaagaaaattgactataagaaaccaaaattcaggttagagttagaattacctagctgaaacaaatgtgagttggtttatacacatcaaccgataacaattaacataactgttatatacactatacaaccaaatttgtggtgtgctaggtgttggcttggtgttggcaagattatttacccatttggaaaagattatttacgtccaaaactttcttgttaatatatatttatatattaagtcatctctctttaagtcacaactatttgatttttcgttaggtgaaaacaacaaaggtgcaaggttatcttgtattgaaatgttaagattgctttttaacttgatttatttatcaaaacatttattatgattggtatttagtatttacatatcatccagttagagatatcttctatatcatatcatttggtagattattacgggacaacttttaggtacatatgtcaaaaaaaacttttaggtacatttcgccattttgcatacaactgatttcgtgtacatctcacggttcctacaaaaatatttatgaatatgtatatgtatattacagtttcgtagtaggtgtccgagaaacaaaggtggaataatatggtatgaccaatgttttctcgatgttagtatgattaatgacaattccccaagacggatgaactacgataatattttttctatgcacaacccaaacaacgtgagagggaatgtaaactcattcaacaaaaagacgactgaattcctctacaaactgattggaaaagctgatagactcgacgtggacgggatcaactttctatattacgcggcaggggaaatgaggcttgggaagcaaacattgtttgcaatggtgcaatgtgcgaaggacatattgagttgtaaggattgtttggaatggagtatcaaggagctttctaagtgctgtgatggtaaacaaggagcgagagttgtaggtacaatttgtaatcttaggtatgagctatacccttttcttaggacttaaagcctctttggtaataaagcagcggttttgctgtctctctagtatctcttttgagctttttacaaatttttctgtttattttactgcttatacttctttttattttgtttgtttaagtcctaactatgtctatgaatagggtcccaatcaaaattcagtaacctaattttgaaacgaaagggggaaaactatgtacgtagcaaacaaaatgcaaatcaatcagtcccaccttctatttcaattattaataagagcaaacttggtgaccctaaaactgagacaaacgacatttttgttttttcaaattgcccgttaaacatattgacgggttttttattggaccgacgatgacttagtagcacataagttgcccgttttggcatgctattttaggcccatgacaaaaatccgattcacaatgcatggagtatgagctaatagccgtggaatgttagtttatcaatgttttgggaaagaaaaaaaatcgtttggtaaatgaaaaatgaaagactttgatttccataatccaacttagttataaatagaaagggaatgaattatttatagcattcgaagctaaatatattagcatttttctttctcaatctagatagttctgttattaaatcatttttatattacaataatatagtcatatagattcctaggtattagcatttttctttctcaatctttagatagttacgttctctaaaaatgtttgaagaggtggagatgtgaaataagtacagagaacctctaaaactttgatccttgatcaaaactagtggtgattcaattctctcagacttttaacttggtaaaacatttaaaatttgacttttccattggccatcctcacccttcgccgaaaaatacccgacccctctctcctgtctattacagaccaaaaataaacattttttctacaaactggaatgatcaatagaatcttgtatacactaacaaaaagagagaatattattttagatgatgtgtgtccatcagctaaaattcttctgactcttgtaaaaacatcttaactatataaaaaaagaatccaaaacaatgtactcttcatattctctatccaaatgcctcgtttctttccatatcttggccatacaactcttcatacctagcgttgcatcactgaatcttacaaatgtgtaccttcaccacaaatgccgggttggtcaaggtaaataccacccgggaagtagatacgagaaagacttcgactctctcaccagtttcgtcgctgctaataagtttatagatgggttcgtacacagctctaatagtgacggtcccaattccactaccatcatattccagtgtcgtggtgactcttacaagtctaactgtcgaacctgctatgacaccgctctggccggggtaagtaatgcctcttcaacatttttgcatgaaagaatttaattatcatttgaaatataccttaacattaacatgtaagtatatgtatttaacagtttcgtaagagatgtccaagaaacaaaggtggaataatatggtacgaccaatgttttctcgatgttagtatgatcaatgacctagccccaaggaagatcaattacaaggatacttttgctatgcacaacccaaacaatgtgaggggggatacaaagatgttcagcaagaagacaaatgatttcctccaacagctgattgtgaaagctgataaacccgacatggacggcgtcgagttgttatattatgcggcgggagagatgagaatcgggagggaaaaactgcatgcgatggtgcagtgtgcgaaagacctagcggactgtaagtcttgtttggaatggagtttcaaggagctttctaagtgctgcgacggtaaacgaggagcgagatttttgggtacaagctgtaatcttaggtatgagctatatccttttcttaggacttgaagactcttttgttaatgcggcaggacacaagttttcaatttttttgttttttttactttctaattctcttatttttagcatgttacattagagtttgttttggtatctgttatatctacacatgtgaatagggaccaaaacttcgttaccactcaatgctctgttatttgtaataaggacccctcagtactctttaaaattattaataaagaaacaatagcttttttcttcactcttaacttctttttctaataattacttttaaaactagagcagacttaagaaggtttgataaaactgatatacaaaacaattaaagagcaacgtcatttgatgtgtgttctgcataattataacaacagtcataattaatctacaatataatttttgtatgatttttgaatcagtttttggataaaataaaaagaaatgtactcttttgttttgtttaaaacggattttttatttattttatctgttaaacatttgtataggctaggacgtgtagcgttgtgattatgttaatgttttcgtttctgtcctactatattcaaatacgcaaattgtacattcttaacaaagaaaaatatttcaaaagaatttttatgcttgagccaaaattcacgaaaaatgatataaagctttggttaaggctagtgcaaaaaacaattgtaggaaactcatgatgtgatgcaaactttggaatccacctaagatttacgattttcggtttctcggcctacggcttgaatgattcgatagaacgatggtagagatggaagatggaagttttgtcattgaatccacaacaacacacgaactataatgtttgaatctcacaaacacactagaaacgcaatcaaacaagactatggaatttccctaatagacttgaactgacaaagactacttgctccttgctacttgcactttggaaagaaaaacacacttttattactcaatttgaatgacttattacaaataacgatatgaatgaccttttatagaggaagtgaatgatgatacagtttaccaatatctcgagagtcaaatcctacttgctccttgctgaaaattggtaatacatatatacaccacaaggtttgtatcgtgtgattctattttctaaaacttttaacttaggaaacatttgaaatttgaccttttcatcggccatccccatttctcgccgagaatacccaaactcctctctcttgtctgttacagacaaaaacaaaacatgtcttccacaaactgcaataatcaatcgaatttgtataagggtcactagaaaagattatcctttagagataaatagttgatctagttactaatatgagaccagtaagctgaaatccttccgagtcttcttataaaaaaaatctcaatctcaacgcttcaaaaaagaaaaaaagaaagaaaaaacctctggaaaaggaatcaaaatccaaaacaatgtactcttcatattctctatcaaaacgcctcatttatgtccctatcctggccatccaattcctcctcgtacgcagcgtttcatcactaaaccttaccaatgagtatcttaaccacaaatgcttcgtcagtgaagggaaatataagcatggtgataagtacgagaataacctcaacgttctcaacaagaatgtcctttcttatgatcttactagcggttttctacacgtttctcatggcgagggtcctgattccgtcaccatcatattacaatgtcgtggcgactccttcgggtcgaattgccgctcttgctataccaccgccatcgacggggtaatgtcactccaacatgtaaacgttaattagtaatgccatcgaaatgtatgcatatatttttgggtatgataatttggtttaatttttatatttctacttttatttgatttttagaaaatggtaaaatgattgaataatattcaaatttcatattaaggaatattttcatatgataaaaataaaaaaggaaaaatgaatcattttttaatgtaaaacaactatgtatatgacagtttcataggagatgtcagagaaacaaagggggaattatatggtacgaccaatgttttcttgttatttctacgatcaaaccccaactcccaaggaagattgatttcaaaaacactttctcaatgcacaacccaaacaacgtgagcagtgaaccaggatcgtttgacaagatgacaagggatttcctctacaagctggtgcagaaagcctcttatccaaccgtggtcgaacaccagtctacatattatgctgcgggggagaaaaaactcgggaaaaggaagctgtatgcaatgatgcagtgtgcatcggacatattgcaatgtaaggtttgtttggaatggtgtatcagagagcttcccaagtgttgtgatggtaaacaaggagggagaattttgggtatgagttgtaatcttaggtatgagctatacccttttcttcggcgttaaaagaccgtttgatgttgatacataacacattaacttgacaactttcccaatttttttttttttttttttttttttttgctttctaattctgtatttttggtaaagtttataattgttgatcttttcattttctcaatgactgcaagttaattagttggctctttgtaaacattttatgtcagttgtgatacagatttaatcaattcaaaatgcaaagggtttacacatgagtgatttgaatctgtaaagtgtgataatttagacctttttgtaataactcgaaactctctcttttttaaaactcctatgaatgtggaatgacctagctgatgcatgaatcagtaaagacttccatatcccgtatgaagttaataatcactagatgagtacccgcactacgtgcgggtttatgtattactatttacaaattgttttatataatgtatgttcatataaagtaaagttgaatgcatctgttttgaaacataaatatgatttgtaattgttttcaaaaagtccaactatattagttcatctgaaaacgaaagtgcttgaattgttttttattgttgttctagattctcagttttttttttttatttatatatccttgttcttttggttatatatttagtttgtgagacggtgaaactttagaaaatttatttcttacattaaaaatataacatgtctttattaaccatgtctctacatatccaatataattatattcaacttgatgttcttggaaagtttagttaagttcttctcataatctgtattagttataaggatacctccttaaacatctttcaaattacttgttttcttagcataaatctcgaaaagcttaaatatatttaatttgcatattcatttagtttctttcataataatcgtctaatttttaggcaaggaatctatatatacatttttgcagccattttgtgaaataaatcctgtagttggacttatttacaatggttgccactggattttaatgtttgtttttgataattaaaaagaaaatcttcgaattaaatatttgacatttaacaatcttcccaaaatctctccacattaactacacgattatttactaaaatattacttccaaaatatttagtatcatttaattactacaaaattatcatttttgatattggttctctccataattataacaattcgattataatcatcaaagcgcagagatataatctgatagcatttaattactaccaaattacaaaatatttagacaatgattcataaacatatcataaataagatcaacattaataaaataaatggttttttttttacaggacgggtttggcaggacgttacttaataacatttgtaaactataaaataaaattattttatagatagatacaatttgtaaacttttatatatactaaatttaaaaaataaattgttccctcggtataccgcgggttaaaatttagtatgtgtaacatgtttggatctcaaaattaaagagaatatattgaattaaaaaatgtagaaagagtgatggttcaagttctgattaattatatcctcctattttagttattatgttgaattaattactaattatgtattatttattttatgaagtctaggtggcaagctctcatgtgctgatgtgtcaagttgtgggagagagttgaccaactttcatatatatgatttatttccatatcccgtatggagttacgaatcaactaaaatgcatgaatcagtaaagacttcttagtttcatagaattaattcgtttatacccgcaatttccatatacacgacaacaacactaatcacataacagaatgttaacctttttccatttggtgatccatgaatgatacaatttaacaaaactccgagagccaaaatcttattgcttcgagctcaaaaccagtggtgcacaacaaatttggcaccgtgtgaaaatatcttctaagagttataacttagtaaaacatctgaactttgactttttcatcggccctccccatccctcgccgaaaaatacccaacccttctctcatgtttgttacaaacaaagaaaaacatttcttctacaaagtacaaactgaataatcaatcgattttttataagattactaaaaagaacatcgttttgagataatcagttaatctagttactaatgaagccaaccagctaaaaattcttctgagtctcctatataaacatctatcagcacttcatttatcaaaaaagaccaaattaaatccaaagaaaggtttacatccgaaaaatgcactcatcatattctctatccaaatgcctcgtttgtttcaccatcttggctatacaaactctcatacgccgcgtttcatccctgaaccgtaccaatgcatacttgaaccacaaatgcctcgtcatcatcaagggaaatataagcggcagagcgagtacgaggaaaaccttaactatattattgatcatatctcatctacccaaaaatttccggatggtttcacacacacatctcgtggcgaggctccaaattttgtcaccatcgtatttcaatgtcggggcgactcctacggttccaagtgtcgttcttgctatgccacccccatctcaggggtaatgtcacttcaacatcaatatgattttactctgcattttacgaaattatcaattaaccgccgattttaaacaatacaaaaaaagacatcacaatatatggctatcaagtgccattactatatagagaacaattgcaaaatatgtatccaattctaatttcttttaaatattaaaataattaattatttcttataagatattttagaaacaaatgaatagggtttttttttatcaaacgccaagcattgaaaacttgaatcatggcttaaactgaaacacaacatatgtgaattgtatatgacagattcgtaggagatgtcaaggatacaagggagcaattatatggtaagaccaatgttttctcgatattagtacgatcaattctccaccaacgatgatcgattatgagaatactttctctatgcacaaccaaaacaacgttaacgaggatgcagagtcgttcaacaaaaagactagggatttcctctacaatctgatgctgaaagctgataaacccaaaagccggtagttatgcggctggtgaaatgaggcttgggacgaaaaacttgtatgcaatggtgcagtgtgctctagacatatttgaatgtaaagtttgtttggaatggagtatcaatgagctttccaagtgctgccatagtaaaaaaggagcaagatttttgggtacgagctgtaatattaggtatgagctatacccttttctttcgacttaaggactctttgatgatgatgcataacacatgaactcttccaattgtaattttggtttgtttactttcccattttttttgtttttttttgtttttgcctatctcccactttgtttgtttggtattgtttagcttagcttccctgctttgtttgtttaggtcacacctatctctaaaacattatttgaatataaacttccttatgtatcgttttgactaatagttttacaagattagtgactcaaaacagaattaacaaataaatatatacaaataatatcattttttatttaaaaatgagtagctagtcttttctcacgtatcatgcttataactagaacttgacaaaatactcgtacccgaagaaaagaacagcaacggaggcatcaaattgaagcagaaccgacacaaatactcgaattgattttttaaaattcttatatccaaaaaaacgaaactgaattgaaaaccgaatgaatatccaaaatatacatggtctaatcaattaatcagtaagcatggaagatgagataattgccatgatacagtttagcaaaatcccgagagccaaaatcatatcgaacaagtggtttacaatatgattctattttgtattttctaagagttttaacatttttacttttgactttttcatcggccctccccatctctcgccgaaagatacacaacccctctctcaattctgttacaaacaaggaaaaatatttcttcttcaatctaaagtgatcaatcaaattttgtaaacaagaatattgttttgagatatatagttaatctagttactaatgagaccaatcagctaaaaactccttctgagtcttcttatatgaacaaaacaatgtactcttcatattctttatccaaacgtcttgtttctatccctatcttggctatacaactccttctcatacgcagtgtctcgtcactgaaccttaccaatgactatcttaaccacaaatgcctcgtcagtcaagggaaatataggcctggagataagtacgaggacaacctcaactttctcacccgtgaagtcttatcctataattttccaaccggcttcatacacatctcttatggcgaagctcccagttttgtcgccatcatactacagtgccgcggcgactcctacgactccaagtgcctctcctgctatgccaccgccctttccggggtaatgtcacttcagcattattaattagccgtcgcatatcgaaagaaacaccaaaaaatgttttctattgtgattttactcggtatgatttcaaatatttaaaaattaaatcatcaaatctatctttaacatatataaacatgtatatctcttgcatgttaagatatatatttgcattgattagttaaatcattactcaaaaaatgaaacaatcacatgtatgtatatggcagcttcgtaggagatgtcagaggaacaaaggaagagtaatatggtacgaccaatgttttctcttcattaattccatcagatcatccccaaggaagaacgattaaaggaatgttttctctatgcacaacccaaacaacatgatcgaggacacggaattgttcaacaagaaaacaagggatttcctctacgagctcatgctggaagccactacacccaacaggacaatgatgctttacgcagcaggggagaagaagctagggacaaagaaattgtatgcaatggtacagtgtgcgcaagacatattgcgatgaaagggttgtttggaatggagtatcaatgagctttccaagtgctgccacggtaaacaaggagcaagagttttgggaacagagtgtactcttaggtatgagctatacccttttcttaggagttaaaagtttgtttggtcgatgatgatgtagaagacaatctcttgacaactttcctattttgtttggttttgttttcttaattttgttttatttttggttacaagtcaaaacttttttggtttgaaataatataatgtataaatcccttttaaattagtgaaaaccctcaaacaagaaaaagaacaaaaaaaaaaattgatttaatatatttgagcagttaaagggagaaaattatcatttagataaaatacatttaaaaaaaaagaatttatgtccacaccgtacatatcttagtttcactcagtcaaacctttgaatgttgactttttcattcaccgcaataccaagttcccctcaactcatggccctctactttacatttctaatttcatctagaagcttgaaatgaaagttggatcaaatgggacaaaaaattgttgttttgacataattgcttcatcttagccaatcagctaaattgacttcttttttgttcaaaggaactctcgtgattggaaaatgaccaaatcccaattgtacaaaaatgaaaacttcaacccattctaatatttattaaataaataaataacttgtctcaccacccaaagaccaaaatcatctagccactctataaaacatccttacctcaacacttcttctatcaaaaaaaaaaaagacaccctccacaaaatatcaattttcttccaaaacaatgtcttcattaaaacgcatcgtttggttccctatcttggccatagccatacaaattctctctatacataccgttttgtctcaaagccagaacaatgcgtttctcttccacaagtgctcagacatcgaaggaagctttacctcaaaaagtctctacgagtcaaatctcaacaatctctttagtcagctctcttacaaagttccatccaccggttttgccgcctcctccactggcaacactccaaacaacgtcaacggtttggccctttgccgcggtgatgcctcctcctctgactgccgctcttgtcttgagactgccatccccgaggtaaccacacaatatttacataagtttttctacatcttagtgatatatatagaaaccgcagattaagtacaaaacaaaactaggttataattagtttatttacatttctaatgccaattttttaattcatacccttttcttttttgaaactacaatctataattagagactggctaaatttcatttggaaaaatgctattctattgataaaaaatagttggaaaaaaagatattatatattggaacggcaagagaagcataaatagtatatcgagttcaatgatggttcttgacgttggtgtcacatatgacagctacgtcagagatgtccgaacaacaaggcgggaatagtatggtatgacaactgtcttgtaaagtattcctcgaccaatttcttcgggaagatagatttcgagaacaggttctatttgtacaacgtcaaaaatgtgagtgatccatcaacattcaactcgcagacgaaagctcttttaaccgagctgacaaagaaagcgactactagagataaccagaagctatttgcgacaggagagaaaaatatcggaaagaataaattgtacggactagtgcaatgtacgagggacttgaagagtattacttgtaaggcgtgtttaaatggaattattggggagcttcctaactgttgcgacggtaaagaaggagggagagttgtgggtgggagctgtaactttaggtatgagatttacccttttgttaagactgcttgattagaggtccaagttaaaagggggtccaatgccaaacacggtcttaatttgtgattattgtcaatgtgatatgtattgtatgttgttgtttgtataatgtgttgagccagtaaaatgtaatcttctctttgtgggttatttgtacgatagacacgattatagaggcttgactcctataaataaaaacattccctttgccaaatattttctagacttgaaccacaacccacagaagcaaatatcatcgttcataatgcttagactgtatggcagattcaactgtttcaaagggaaatctatttgtctactacttcaaattttaattgatgttaaaaacacaaaacatttttcaatatatatgtttatattgacaatttgtgtgccaaccatttaaaaaaaaatagtaaatgcaaaaactctttatttttttctgtttgtatcaatagttttgaaaaatatatttgacagaaacctggaaatatactgtatgtaaataaataaaaacacaccagtaatgtgtcgtattgctataaacttgaccaaaaaatcattaattttttttttttggaagtcgtcttgattttctaagttcatttacatatatttgtcttctaatcaagtttagttatgttaatgtttttggatagaaccaagtgtcgttagctcaattcgtaaagatcctacgcaaagcttagaggtcgccggttcgaatgacatttagaacaaaactaatgttacataatgtggtttcgggtctgggattacggacttcaacccaaaacctcctagatttaaaaaaaaaaaaatgcttttggatagaaaatctaaatttcatcaaagtatatatgagagactcagaaaatgttttacattatgaggtgctgattggtttgttgactaaaagattttaaacgtcaacggataactaggagaagatattggtcacatgtgctatgctgagtcattgcgatgaagacaggtcaacgaaggaggagaaccacgttgctccttcgctttttcccaatcctttctttgtgcgtaagcggcgaccactaccacgaaaatcccgcataatattctgaaaaaattctcacagttttcggataaaatcgtacactcaggacaaaaataagaatgcaagatacaaatatagaaaccctatatgaaaaggacaacattaaactaaattctaattctattgatattaaggacctatattttcaaagtttaaaggactgctcattaagaattacgaaacaataaaattgtttgtcccccatcattggtcaaatcaaagataagcctatacgcacttccgtatacttaaagtttgacttgataactatacaaatcatgttcaaatggtaaggttgctgtcactcctcgagtccgaaacttagggatcggtcaacagagctagtgttaatcagatgtgaatctcttataataagcataaaatcaaactattagtatttattgaattaaaaactcaatgatttgttctccagagctagatattttaatggtacagagaggcagacgtttttcttttggtaatcaaggtctgacccatgtaatctagagatcagagcaagttatataagtcttgtcttccttgtagatatcggcactcataaccttaaaagttctttttttaggtggccactggccagcttgccatagtcagtctcagtccaattggtctacaggtttaaagcaaatttatcaaaattagaccaataaatcaaaatattttaatgtactttttctatcatatcttcaaccattctagaaatattttaaaatatataaattattcgttcgaagttttaaactttaaactagtaacctattttatcttaaaaattttaagtgtagtttgaaataatgattagcaaatttattagattaacatacataagagggaacaggtttatataatgttggaactaaaaggaaaatattaaaaaatgaaaaaaaaaaacatagggacaaaaagaacattatatgggaaagacaaaccatcaaatgtaagaacaaatggattgtacatttagggtatgaacccaagcgtggactctaagaaaagctcaacccctttctaagcccagcaatatacgtatatagttgggaattccacgtgaagaacaacacatgtattaaaggtcaggccaaatgtttgtaagaattttacccaaaaaaaaatgtttgtaagaagtattcactattcagtatcacaaataatagtcactttataagaatcagattccaacgataaaagcgttgtcacatcgacaacaaatttttagtcttgagcccatttagtaagcccataatataatattttctttgacatggaactggcccatagtaaaacatctaaaccgagatgctagtaatttagtatagtttttaataaatacacataaaagcagataaatcataaatgtttgcttcgtttaccaaaaaaatgtttgcttcgtttaccaaaaaatgtttgcttcatttaataagggatttcagaaacgctcttgcatgataaatagttaatgcaccaagtcatcaacatcaagcagatgtctctgtataatatcaataaataaaattaacatagtagtagactgtatttaacatgtataacatatcaaattcataaatgacaaaatcatgaaataacacccaactagttagtagttagtgtagttgctaacaaactatggaaacaaagaacagaaagataaagtaaagcaaacgaaaaaagggattaagaattacattttgtacggaacacaagactaaagaaagttactataattttgcaaagattgaaggtggtcaaaaattagccagacaaatttcatgggattcttaacccattgacccacatcatgtctctgccccctcctcactagtggtttttcacagttacacacttttaaattatttcaatgtagtatgataataatgttacaattatagtactatatcatagtgccagccaaaaaggagatttgactggtgagtggattaagattaaagacaatgatactcttttagttaacttcaaagttaaaacaaagaaagacttaacttaaaacaaaatccattttttggtcatcaatcctatgataaagatagaaatagacaagtctgtccccataacatcattgcaattagtaacaattaacataagaaagaagttttaaattctattccatcggtgaagtatgacacaagattaatgaaaatcagaattaagtattcaacatgattaaagattaagattagagaaaaatgatctaagtaggaataacaaaaaacaaacgaatcaagttcaagaactgggaaatgtgaagtaaagaaaaatgtcggaatttacaaaggttttgtctttaatcgttgactagcttggcatgcacaggagcaggactagtgacgacggagctcggcggagttaacggcggagatgctgatactggagccggaggtggtggtgggattggtatatccgttgaaggcggaggaggtgcggtggttgtatctaaatccggcggaggaggtgaaaattccggcggaggattcggagtggatggaggaggcggattcggatttacgatcggagccggcggatttggggaaattgaagtagatgatgatgaatcagttggagatggaggagaagatccgagaacaggcgggttcgggtttggattcgggtttgggtttgggaatggagttatgaaaggagaagtagaagaagaggaagaagaagaagaagaagagggatcggtggaagatgagcaatagtcgccggagcagtggtgagagtgacggcggagaacaccgaaggctacgacgaggccaatgacgaagacgacggtgacgatgaaaatgaaaatcttggtggctttgccgacatagcagagcattgttgtggatattcagaagatcggaaaccaaaattctgtgactattttttttggatgtttgttttattttatttttatagttgttgtgaatgaatttttagattacaaaaatgaaatgaatctctctattatctctctttcatctcctttattttcacagtttgtgtgcttttatataattatttttaaagatttgtaggaaaagtaaacactttttcaaaaataatttataaattaggtaatttttaaaaaaaatagagaaatagactttttttttttactttttgtgagataaaagatttgtgtaataaagtacaagacaaaatatagagaaaatgctaaaatgtcctttgtatcaagagataagagaaaaatttatgagaccacttttttttacaaaaatttctaaaatcatttactaaaattatttattaaagacaacaaaacaataaaaagttatttaaatcatttattaaaatatttattagaaaaaaaagttatattagagaataaagaaaaaagtgtatatttttcctctttctaacaaaactatctagtttataaattatttttgaaaaaaatgtctactttacaacttatctcaatttttaattcgaagttaaagcgtgggataatgagagacatgcggatggtgggaatgaaaagctaggatggccacgtgaaagccaacaatggcacgtaatttgttgtagcttagtttttattttttgttattaccaatattgtattggtgattagttttctcgttggtatatatatgcttagctaatattaaaacacacacactcaaatggctaagaaaaattaatatatgatgaaattttcactatggtaatactgagttcattatataagcttgtgatgaaaaaaaaaactgaagtctttggatcagacttttcacttaagtttattttttcatataatgctatatttattttagttattttgattgatagagtccacaaaacgacgaatatagttatttttagttttttggagttcttagaaatattttagctattttaaaatccttttttatactttagtttagtagggtttacattattttccttttcattgttacgtctttgagaaaaataaattttattattgccatacgaagaaaagagtaaaatgggcccaaaaagatatatatggaagcacagaccacaatgtttcaactttcaactagttgtcctcaaggccaggcaagcccagccgtgcataaatgtaccagaattcacaaaccttatgagtatcatcaatgaatctaaatcgattgggtacaaaaagaaaatattcactaatttttttgttcctgctaatgtcacacgaaaacatgagtgtctctgtttcaactttcaaggacatggtcaaagacaagataacatgtctctaactctgctgaatcatttagtacatttttttaaatcctttttgaacccaatgaggagagtttagataatgaatttgtaatcgatcgtagaaaccatttcaaattcaatctcttaactcaaaagtatatcttgttcaaaaaagcctccccgagcttagccttaagcatgctgcatgcatattcattgaatgaaaggagcaaaatgaatatatcagtctataagaatagtctctagagatcttagaagataattaagaagcgtaagaaacagatcactgtatcatactaagtaaatgcacggtacataactgaagttttaaaaggagagcgctgcttaaatcatggaaggagagaattctgcttcagaaacaacttcaacatcaatctgcacttttaaagtgtccttgtccaagtaagctttaggaatttcagctagagacacaaattttctgtatccccaagccgtatttgagctggtgtaccaagacgaaactacaacaaaaaaaaatcgcatatatgaaagcatggttatagcttagtataaatctagaaagagtcccagctccaatcacacaaaacgttaggaaataagaatgtagtacataaaatgttgttagtacacctacttttgtgtgtcacgtgattggatccacgtgggtctaaaactcgcaattgagcttgcacgaaaatcttttcactttcctttagtgtttcactttgatcgagatatagataaagggataaccattttcggtctccttttacgtcccccttgggatacaactttagaaccctacatgtgtaataacttgcacatgttaatctctagaaacaaaattttcttgtatcatatatatactcaccatttcctttctctcatcgaaaaattgcctgatgtgtaaacattattgttcagctcagagaaattcttgaccgtccaaaagaacttgggttgacttagtgcttcatgtaaagtgtgaatttcccaattagtaggaggtgcagcaacaatgacatcaacaccaaactcgcattgatctccctcaaaaatatatccgtttttaggatcagtgaatgtatcaactggaagcacttgcgccaatccccatattgttctgaatgcattgaatagcttcgactctacatctagatatatatatatatatatatatatatatatatatacacacattattggataatatatagaagtaagaaaatatatgtgtaacaagacatgtagacacttacgttgaatagtatagtacttattttcttttttgttaaatacgaaaaaccgtagatcggcaaacacctcagtggtaggtgtagtcaaaaggcttgtgctatctatttcaacatacattgaaataaacccacttccatcgtctttgcgattccctttcgggtatatgatcattctcctgcataagttaagatgatgcatgtttatcaaaatataaggacaaaaaaataggactgaaatattgatatttttatggaatgatgaaaaaggtgcatttccttggatcttgtgggactaagtgaatatacaatacgtaccagttgtatccaccagaggagaaaagacgggattgatacttgccatcagagaagagagttgatttctcgacttgggagatgttttggagcttgagtgagtaagaattaggagtacgttctctccagcttcgaagagttgttgaagatacgcttgaacacatcattgaacctgaagcgagactagagagaatcagaatctaccccaaaaaagaagaaaaaaaatcgtgtatatgtgacagaagagaagagatgaaagggaactaccaaagtttagaatttctgttacatatatcctaactagaaaataaaatttaactactaaaccaaaaaattacccatcgaccatatatagcaaaacatatacaaaatcaaaagattcgacgagtactgtcttttacacctaaagaaaactaaagaaagattcgacgacgaatcgagctatattcaaagtatgtgggacagggagaaaatttgatttagaattcacaaacattaaacaacgtacctagagctagctcgttttatccttgattctctaaagaatggtgaaaagttgagagagctagagaaagactcgacgtacctgaagcaaagagagagaagaagaagaagagcctttggggtggggttaatttttgtttgccccacttatttctagggtttggacaaggaataatataatctatatacgtattgaaatttttatttagtgagatagttatttaaatttaattttgtattctgtttacagagataatgatcatcccttattttttggttattttgccagtaactttcatcatattttaccggcactgaactttgatgactagataggttcacctctaggctctagtttattttatgtgcattcaattgctctttctcgtttctttgttcataatcatatatatacataccaagactaaagtttaaagtataacctaaaaatattaataaaaagattcagatttaaataattcagaaataaataactcaataagccattatcaaaacactgcattgtattgtctttgaatcaaatggtagatatataattgtcttttctaaagcagaatttagttaacaggagagtatttggtgctagaaacaactgcaaattcaatctctatgttcaaagaaccctcattgtccaagtacttctctcgcactttatctaaagacgcaaaagtaggccaaccatagccttggtttttatttgtatttgtgcgccagaagttgcctgcaacaacagaggaagaaatataagcatgcatattgattataagtcaaatataattacaacttataatttaaaatagtaaacgagggacgaaaaagagcaccaaatgaaacattatgtttcatcaaccagtgaagtaaaacaactataagatgatatgatatacttattgttttggaaacttacattgcccggcttggtgaatggatccaaacggatctaaaactctaagatgtactcgcgtgtagattttctcctctgcattgagtgtttcactttcacttaaatacacataaatggataacgagttgtctcgtgctttaacacccttaggatgcacctttagaaacctacagaacaattttgcacttgttaacatagcatatgtaatatgaaaaagcaaaacaagttttttttagactcctcaccattgccttcctcctactaaaaacttgtctgagttgtataactcctcttttaactctttaaatttcttgagagaccacgagaacttgggatcaaggattttctgattaaaggacacgacttcccatttagtaagggatggagcaaccagaacatcaacaccaaattcacattgatctccctcaaagatatatcagtttttagagtcgttgaaagtttcaagcgaaagcacttgagacaatccccacaccgttctaaatgcattgaaccgcttcagttctgaatctatgacatcgtgcataaattgtcgatgagtaaagaaaacgagaagtgaatgtatactaaatggaaaacaaactagcaatagatcaatgtatatgtgaaatatattagatatatacaaacctttaatagtaaagtatttgtctgttttcttgttgtagacaaagaatacgagatacgcaaacacgccagttagtggtgatgacaagaggtttgtgctatcaatctccacatacattgaaataaatccactcccttcgtcttttgcgtttccttttggataaatgaccaatctccttaaaaagttgccaacaaaatcatagagggtaaaaacatgatcattcttcatggagtgatatgtctcacaaatcacatctagcaataaaaaatttattgtctccaaggtccaaactactcactaccgtgagctctattatgttcagttcttcatctttcttggaaactttgtaaggtaattaaagactagattcgaaataagttagattaaacatatacatagtgctaaatttaggtacacaattagtgaaacaaagagttgtatttgtaagtatacataccagttgtacccgccagctgcgaaaagactagattcgtatttgccatcgtcgagttctgcgatattctcaaacttgatggaatatgaggaaggtggatgttctcttaaggttgacgggtttgcgtccaagacggtgctgcccatccttgttacacaaggtaatccagagagacttattagagagaagacaaaacttagggttcctgataaagatcaatcttctttgttatataaaaaaaagaaggattaatctttgatttataaatatttttgcaactgcaaacaaacgtaaacggacgtggaatatggaaagacgaaacttacggttctttggttaattttcctttttttctttaaggccttttaattttccttttttatatagaaaggttttgctaattactactttaacaaaacaaaacaaaacaaaacaaaaggcatatttgagagttattactttaaaaaaaaataccttcaaatagagaatctagatgagagtttactttatacatttctgtaaggaaaatccaaaagcccattttggtttacaagtttgagtgtttgtcgtgaacgtagccatatttctttcttttccaaattattattattatcatttattttatttatttttattttgtagaatccaaaatctgtaatctaaaggccttgaatgttttgtagattttgtaagagtttttggtttttgttttttaaaaacttattttcataccaatcaagattttaaaattttggtttccctacaatttagtaaaactatgttactgtagttttccattcatgattttagttttttagttttcctaaaatttagaaaatctagtttttattcaatcaacattatttttctcaaaaactaaaaaccaaattttttgggttttctaaacaaaaatataataacaaaaatctaaaactaaaatctaaaatctataaactaaaatctaaactcaaaaactgaatctaaattagcatccattcatggtcttagttttgtttttttgagcttttaaaaatctataatctaaaaaccagtttaaaatgtttaaattatgattataaaaaaagagagatctgaacgaacagtagagttttttaatagcttttatttactatctcatcaaattgtgcttgtgtactattatattggcaacgtttaatcttgttcatatttcgcattttcaattttcggtttagtttatttttggtttattatattgatcttgcttccatcttcttctagaaccggttcaatccacgtcagctaaacaaatttacaaacaatttcgtactccgtaaaataaattgatacacacaagcacaaatcgactcttattcgtttcttcaagctcaaatcccaacgacaatggcggttccgattcacttcctcatcaactctccacctgaatcatccgacgaagagtacaacggttccgaaatttctaattcatctgaagacgaatcaatggaagacgaatcgtccgagttagtaaacacaaacgaaggatctctctccaatctcgtaaacgaaggttcatattcaccatttcctctgtttctactctgaataagcttgaacgagtcttgttatgtcgagattgttgtgtaatcgattcgtatctctgatttttgtgttacagaaactgtggaagggttttgggttaagtatccgtatttgaaggagttagtggagattattgtagctcaaggtttgatttctgaagaagttgcttttgagagagtcaagcttattggtgatgataaagctaaagagttgaatgatggatggaaagctttgtgtcttaaggaacaggatttgggtaatcagatgcttgagcttcttcttgcttcttcttctaccactaaaccctgaggaatttttcatgttttgattttgtctttgagaactttatgtatcgtttatgtttgtattgaaaccttaatgtgaaaaaattgcaaagtttctcatatagttcgttctttagaatatcatcaatcaaaccaaaacttttgtacattgaaactgagaatcaaaacgccattaaaacgctatgtagaagaaacgttaaacaaaacaaaaacagagagcttttggtgtttcttcaaacgacgtcgttggattcagaggtttctcgacattgtcttgagagagagaagctgttcataagagaagacacaaacaccacgagaggagagtacgtttcgtgagcctggagaattcgcaagaacctgaagaatctgttgacgtgtcagagatttgagcaaatctgtttctcctacttcaccggcggtgttgtagacagattcgagaggcatccaacggagtgaagcaatctgagattgaagaaacttgatgtatttgtgagattcttctagagtcatcgctaagttcatctttctctcccacggcatgagtttctccagggatctgattttgtctgagatcttccgtcgtttggtaataataccaccgtcgtttgacgcagttggagatccagaggttgttgaagaggaagttgagttaagcttctgacgtttggcggcgggaagaggaggagagagagatggaaacagcttcatcgtcgtcggttcttcaacggcgtcgatggatttgagatcaggaaggtggagaaacggtgtggtggtggtggtggtgtcgtcgttgtgaaagagctgagtgtgagtggagtcgtaaaaaatctgttccaagcgagtggactcagagagatggtgccgattgaggagagacagagtggagtcgaggaaggaaaagtcgaggttgtggtcggggaaggtgaaggcgttggaaggagtgaaatcggaaggaggaagcggtggtaagtcagtgagtgagtcgaaatcgtaagctggtgtctccattttctccggcgaaagggaaaaaacagagagaggagaaaatgagaatgatgcgtgactgtgtgaagaagagaataaaacagagagatatccacgtggcttgtgattattgggtggagatagaagaaagaaataattaagaaaagagagatatacacgtggattgtggtgattgggtgttgaagaggaggcggcgacacgaggaacgaagacgattccgttatatgttttttgtcgactgtttgtcgcgcgaccctcgtcaggcggtttcagggtattgtacttatggaatctgggccgttggattgtttcggggtattgtactgattgaatatggaacgttggattatgtttacgatcagatgatactgatcccatggacagggatgtttgtcaggttgcgaaacaaattctgatttacggattgtgccatcgtaatgatgttactgaaaagttttttttttcgggggcgatagccacgttacttttctccaaccgtgactgcaaaagtttctgttaaagagatttgaaatgtattttttttagttactttctattcgtgattgtaatcaaaagaatagaaattgctcaaaatgtaaattactttccacaaaattagagtgcttaatttgctttgataatttgaatttgagaacaaagtgtcaaagacattaagtattaatttcatgattttatcttttttattaggatttttatccagaaaaagaaagaagaaagacactaacaataattcaacgttttcatctacaagagaaaaaaacaaacaaaacataatctattaagcctttttccaaccaaaataaaaaatgctatattactgactttgttaaaaaaagaaaagacatatacagattatataatatacataagaaattggagaaagcgattggcacagataagaacgtgttttcttgggaaggggaacttggtaaataaaagagaaagttacctaactgttgtaaaatggatggtgtgtttttaaccactgtaacaaatcttgtaaactttgagatggtaagtggtaaataaattcacaaggtcaaagtttgactcatttatgtataaaacttccatgacgggttttaacaacaacaaaaaaaacttccatgacggcaaaaatgatattttttgaagtcgaacggaaagaaaatgattgttactatttgggccaagaagcccactaattaaagcaatatcatctggggtcgagattattgatgacaatagtttaaacttatgcattattattattattgcacgacatttgtgttatctaaattcatttttttttgttaatgctctaaatgcagtattttaaaagtatgtaaacctgaacacatatgattaggaaaaaagctattgttggttttgtagtttttggcgatagtgactagttactaagggcatctccaaggctcaacaccattttggtgttcaaattacaccatttttagcattaaaacttgtgttctctccaatcataacaccaaaaatcacactaaaaaaaaaaatactattatattatctatttaaaagatttcttttattatttaatagttttgattagtatttattattagtatagaattacataacattataaacatagtacattgaaatatatatttaaaaatacataaaattgtaactattttgagtattttcatacataataatataaaaatatcataactaaataaactatttcaagagatataatatattaatgtatccattcatttttatattttatatctattaatcatttgtaattttatatttgttaattgaatttttattgatataataagtgaatagtgtttagagttgtgaatagtatcagaccaaatttgatgtaacactgtagcattacactaaaatggtgtgaattttagagttccattggaaagcttttagtgcaaaaattacactaaaatggtgttttagagtcctattggagttggcctaaatcatgtatgttttgcagttgcaagaatttaatgccatgtttcagtgggtaaaacatgtcagtataactttcatcattgacgtaatccaaaatctaaactgtaattttcagtttttaaaatttattttcttattgaccatttatttattttcttattgcatgtcttttagtcgattttatagatttctaggtgctcttttaagtgtctttcaaaatgggtcatatgtttgttgggggggaaaagagctatggacgagtgtttggatcgaaaacgaagagatttgggccacaatgcccgttaaatttagcaatatcatctttacatttcaaatttgtaatttgtgttactaaagcattttcttttggtttcttttttttgtccgtgtcgtccattttctccggtgtaaaaagagagagaaatacatttcccaaaacattttttttggtcgcacttcccaaaacctttgacatatttttctgaagaatattcaattcatataacattcttaaaccaagtaaaagtgtgatatccgcataatgacataactagatgttacttaagtatatggttgtagcaaaatatgttcgtttaataactcaatatctctcctaagatgctccgtttatccaataccaccttgatttaatccagtttcttttcaaaagcaagttatatagaatcatttcacatcattcatgagcaacaaatgaagcaaatatgcaatgtgttctgtttttaattacactcagtgttctgttacatgaataacatataagttgatgataaggtgtgttatttttaatgtgattgtgagaaatgatcgtcattttcataatcttaaaatacgtaggaacaaaagtaggaatccgatccctccaaagcatattcaagcaaaaggtaggagatgacatgaccacatgacccaaaactcatggattattatacataaaatttctttttctatcacaaaaacaaaagaatacatatggactgatcgatgtggccactacacacaatcacacatatagtagtgtcgtacaacacaagggttcattagtttaatttgatagagaacgtcgtgacttgtgagtcactgcaatacattggttgatccatttagttttaaattggtatattgttaatgctataccaacttactaagtaaattaacagattctttagtattatatatcttgatgagcctttttaatttctctaacgtacaaatgataaaattgcaattactttattaggttttacaccacgtgagcaatattggtgtctcacgtaagcacctttaggtccttaacatttaaactcctctctgtctagctattacctagtagccggatttcagtttggttttataacttttgttttagattttctttgggtttcttcgtcaacatatttctttgattgatgtgacttatttaatatagcttgaatccaaaccaataaaaagaagccatactacgcctcaattttttcctcgtagtttagtttatccgaaatacaccctaatttcccaattatgtaagtaagatgggctaatactctggaagaagtgtctcataaaacaacactattgggcactcaaatgggccagttacgccaatagctgtaaatacctattgatattcagggtataaatgtcctttcagagtataagtcacgtgagccccgttccatggcttttttgctcaccacgttaggaggagcttcagtgcatgagcagttgaaaccaaatcacacttttattttattttatttatattattatttaacatttatttttgttattaaaaaaaaaatttagaatatttttttgttgtctaacgaatgctatttttagactctattattgcggtgcctcgtttattaacagctattttcttgtttttttttgaatagtattgtaactatttatgttttttggaaagtaaatatttatttgaactatttgttatgccatctaacgtaataataaagcatcatttttgtttgcggagatccctttatattacattatcgtatatatatatatatataattattgattttatatagttgtatgtcatcatcaacaaagataataattatattatatattcctgattttgtatctttgttaacgtctcgatgtaatcaaattttcctccattttaattattataatcttgaaatagtatggtagataaatcaaattcagtttggtccacatagtaccaattttgttatggtcgggtccaataattaatattttgtatatttgtatattggtatttaacggaaaataaagatttaagtttaagattttttttgtaaaaaactttaagtagaacaagatttgagaaatttgattatctaaatatatttcaaaaattctggctggcttaaattttcggttgttgtttcaaaacttcttcttttgaattctgttctttattttttatttttttatttttgtatgttgtttaagatgattaaaaactaatcatttttcaacagcaataatcatgttttaataaaaaatataactttgattagaagcatcacgtgtaaacataatttctatcaaattcatttgaccgctgcaccattcgtactaaagtttactctttggctcatgagttaaactaatctaaaataaataaagttgattagagatataaatacaacatgattataaaattaaagggaatatagcctaaaaagcttcaccatttgagcttaaactaaataaactttaccagaaaaataaatgattaattactgattgatcagctgatcaaaaggttaaaaaaaaaaaaaactttacattataataaggaataaacaaaaaaaatatcctttatctttttaataaaaataaaataaaattgttttattagcaagaatgtcagagaataggtctcagttctcatctctctctcttcctctctataacagtgaacagagtggtgtttgcttggacacgcctttgttgctttgctttggtctctttccttttttatttactctcaaaactttcatttttcgttttgtttatcaatgaacaaaatacaaacccaccaccactactaatttgtgggtgcttctctaattgacttgacagacatcataagagaagacttatatagaatctgacaatcacaaaaccaacaaaagtttcttgcttctttgctctttgtcttctttctcttctcagcataaatccacacctctctctctactgttactcacctctttcaccacatttcttttctcttttgggggaagaatcaagaaagaaagagagctagaatctagttctatccaagagtgttttttagtttctttctcctttttgggatatggaagcttgttgctctgatcttgaagtagacatcaatggagaacaaactatctttctcaataaggtaaagtctaaattaggctcaaaaaatccaaactttaaccatttctcaatgttaatttcagtttttcttatctgggtttagttaaattcttgttcttgcgttaaatcttgatttacaagttctaatttatgcatcaaaactgtgttcatgtgattttaaaaatacatcttttgtgtatctttatatgataatactacggctcacgtactgtgtgtgactctcctacatttagcatttaatgtcctctcaacaaattaccttaaaatgagggcacacaaatttcttctttttttttgttttcttcctgtgaaaccaatcactaatttggaatctgcaactaattctctgagtatcaatggactcaagagttttagttaagtgagtaatgaagtaaaatgtctccatcatcatttattgcctttttttgttcttatacttgttctctgactttctcccatatttctctgtaaatcaaacaaaattttgccctctctaggaagataagaggcttaatttggatttttgttggatactattcacttcccttttgttcttacttgttatgtgacttatgaagatgatcttaaatgattggagacacagagacctttgtgtagttgatatttaatttccttcctgtcttgtaataactgttgcctttattctttcactaacagtaacaagccttaaagttttttgctttttttttttttcttgtagtaacttatgtttgtgttgtttgtattttgactgcagcaaatcatatgtgcttattctggaacgttaagaaagcttttggggaaatcaactagttccagtggaaatctcaaggtgatcttcaatgatttccccggtggagctgagagtttcgagtttgtatcgaggttttgctacaatgacggtcgagtagctgtgatgccttcgaatgtagttttcttgcattgtgctgctaagtttatggaagtcactaaagtcttggaacaaacagagaagtgtatggaagagattaggtattgggcttggccagaggttcttctttgtctaaaacagtgtcaagaagttgaaacatcgcccgaagttgattctttagccgcgaaactgatggatgcgttggtggagaaactgtgtttaaccattgaaatgagtccttctagtgctggttctgcttgttcaccagatagcagcttgtttcggttttcttgtgatagtaaaagcacagagagtttcaagaattgctctgttcggttaacttggtggttcgatgaagttcttgttctgagttctggtttggttgaaatgttcttgaagcttatggtattgcggaaatttgataatctcatcataagtaggttcttgttctattatcagaaggtcaagttttgctctgcgtcttctcatgagaaaagaaagattcttgaaaccatcattgatactctttgcgtcttagatcgaagttgtgtcccttgcaagagcctttttgcggttttgaggcttgctcttggattgaacataaacaaaagctgtatgaacaagctggaggttatgataggtcaccaactggatc

SEQ ID NO: 61 - DNA, 70100 bp, Arabidopsis thaliana
aagcaacactagacaatcttcttgttccatctccatcgaaatcgagtcacttgtactatgtgaatcttgttcttagattcacaaaagctttcctagatggggcaagaagtggattgcaattgaagaaagtctcaagtttgattgatcaatacatagctgaagtagcacctgatccttgcttgaaaccttcaaagtttctttctctcatcacacttgttccagattcagccagagaatcccacgaagatatataccgtgctattgatatgtatctcgaggtacgtttcaacactcatctcaagttcaaaatgtaaaaaagaatgtttcgatctttatcacactaataacagtttaatggctcgttcaggctcacacaggaacaactgatggcgaaaaactcaacttgatacgaactttaagttacgagaagctttcaggagaatcaagagctcacatttcgcgtaaccaaaagtttcaggctattgagacactagatgaacaacaacaacaacaacaacaacaacaacaacagaagcagctcatactcagaatggagaaggttgagacttcaggagaaaacgagaagctgaaggaacatatcgaagggattcaatggagggtaatggaattggagagagcttgtttgaaaatgcagaatcaaatggaagttatcaagaagagatccaagagctcgagcaaaggaagtaatagatcacttcctaagctctgttcttgattagtgaagctgtaagcttacgatcatatttgtacatagagtgatagagagcataaggagtcaattatagttaccatttggttcttatgtttcagagtatttatcttttcttgtgttgttttctttgtcacaaagttgtgcgtaatgaaaagtaaagataaattcgtttttatggagatgatacaaacttaaatctataaaattttcttgtgagattaataccaagaatgcaaaacaaaaatctagaattttgattctattcttccttaaacgttactcttttgtgattccaagattctcaacgtgtaattgcgtttacttagaagataaaacagttctttttgacgaggccgttacgtgtaaaactttgcgcgacaagtagaatgcttagtattcaagtcatgaattgaagaaattcagactaatctaaagagataagaataaaatatatctgttcctttgatcgacattagtaaaaagatgatgcattgaagataaattcataacattgtcaaatctagtttcatcgccaaaggtaacttcaaagttcaaaccaaaaggaaagctgtaaaacagagaactacaaacataaagcggagacaccgtaccaggcgaataagactagagatacttttgggcttaagatgtttcagcagcgggttgagtcacaccgtgcttgaccaacagtttggtgagcgactcaggtgagtgaacatggtacttaacagtcttggatggagtcagatacacttcagcaagctctagcttctcagatgttaagctagtgctgtccattgtcttggtcagaaccttcaaggcaagctcgactgcttcttccctggttgcatcgtccttgtagtcttgtttcaggatagactgagccgcctgattgtttgctccaacagctgcagctttccaaccaccatagttcccactcgggtcactcatataaagctggaaaccatggtgcttgtcccatcctgcaaagagaaaggagacaccaaacgggcgaagaccaccaaactgtgtgtatccttgttttgtgtcacaaagagattgaaccagctgctcaaccggcatgggctcttggtacatgaaggtgtaacgttgagcttgaactcgagccgtgttgataagtatgttagcatcagacattataccagcaacagcacaggcaacatggtcatcaatcttgtacattttctcagcagaggttgaggtttgaagaagctttgaggtgactttcttctcaccgatcaacacaacaccgtctttggataagattccaatcgcagaaccggcgtttccaatggcctccatagcatactctacctggtaaagacgaccttctggcgagaagattgtggtacggctatcatatctccgagacattctttaacacctgcaccacaacaaatgcattggtctacacaactaattcatactccattagacacagggcaagttccgaaaacacgaaaactagggttttcgacatcacaacgatcaacaaacacaattgattcagattaaaaactagactaaaactaggtcaagtttcttcaatagaaaggaaatgaactagctttataaatctatgttactttgagatcaacacaaacctaaagtcacaatcacaggagcgaagagaaaaatcgaaagataattcaacaatcactgatgcccatataaaaacacctaaaaactaaacatcacccagaatcgaatctagctagggtttataaaattctatcaaaagtttgaagatttcataagaaaacacttcgctcaagacagatccagcaaaattaaacaggaaaggaagatacacagattctgaaaattctaggaacaagtaggagaatgaaagacattggatttaagagaatacctgagaagaattcgtttctctctctcgttcggttcttctttgattttgctgagaactttgctctccacaaaatttatgagctctgagatgtgaactgttcgacaagccagaaagaaaagaaaaaaaaaaggtgttttttttttgtgctttacagattaggcccaaaagtgtaatttatggataagaaaaggcccaaattatataatcaagcccaatgcaagatccataactcggaatctctgatatatcttaatttttgttgtcatatgctgattttttttttttttttttttttttactgatatgtgtatagaaatataaactagattcatttctgacaaaaaaaaaagctagattcattttacgtggatgtatttatatacacatatcagtaagaatatcccttttagaaaaaacatttaaatgtgcacctatttcataaatcataataagaatgtaatgttatatatattcacgatgttaaaagaaaagtaaaaatgtagtatttacaaactaaatgttttgttaaatccctggtacgtagtaacacacaatgtatgttatttgtataagaaaatacatagatatatctcttgtaatgtatgataaacaattgtcactaacaagataactaataacacactctaaaatattaggggcttacttattttcttgaaatcttcataaacaaatcaaaattttgtaatcttatcatatatcttttttatcaaatgtttggacaaaaaaaaatgtgatagataatttttttttagcaagagtatacgtgtatacagtataactaaatttatacacatgttcttggtcagtagctgcgctgtgaggcgcatatgcatcagtgcaatgcgcatgggccatggctacaaaaatcacattttttctactccaaaacgtacgtatgtacataaaaacaaattagacagatacaaacttgttcatattaaaaaaaaagttatatcgtttaacagtttttttttcttcttcttaaaagtacaacataacaagaaagcccaaagaaattgaaatctcaaacccaaattacaacgccttttattgtatcaaatgaaacatgtaactaaaggtcgcacatatgcagattaacctcccattaccaaatagatcatgaaactaacaaatttcttgaagaaacgaaacttttggagtcgtccagagactctcaacgttctacatcgattaagcgggacatttgaagtcagatggtggagtttttccacagtcgagaagaagctcaagagcaatggggagaacaaggtcgatgttgagaagtttgagcttaatggtggtacatagacaaacggctgcgtctaggtcaagtaaacctcctaaaaccggacaacattctgccttggcgtggctttttccaagtccgatgtgaatcaaacctccaagaacgtccacacaagcgcctagcttcagcgtgtcaattgggcaagtctctggaataggcgtaggaggagttggtgttggtggtgttactacgggtggtgttggtgttggaggtgtcacgacgggtggtgttggtgttggtggtgtaatgacgggtggagttggtgttggtggtgtaatgacgggtggagttggcgttggcggtgttacgacgggtggggttggtgttggtggagttatgacgggtggggttggtgttggcggtgttacaactggtggagtcggcgttggtgttggtggtgggcatggtgtaggcggaggcttgtggtggggtggtttcggagtagacggaggaggcttggtcgtgggaggtttaggtgtggacgggggaggtttggtgggaggtttaggggtggacggaggaggcttggttggtggctttacgatgggaggttttgggtgggggtgaggtttggtgggtggtttagggtggggtggtttgacggtgggtggcttagggtggggtttgacggttggtggtttaggatggggtttgacggttggtggtttaggatggggtttcacggtgggaggttttggagtaggtggttttactgccggtggtttaggtggtttgacggcaggaggtttaggcggtttgactggatgttttggtggtttgtgaggtgctggtgatggtttaggaggggtacagtcgcaagcataggagacggcaacgaagccaaggaggaggaggacgagaaaggagaggttttgagagcgagaccccattttttggaatgagggtttgggtttctgaaaggagtgagtaagtagatacatgagtgtacgtgtaccttttatagaaaaactctcacgagatatttaatttttatatataaatattgtatgcaccaaattgtggtttagatgattgaaattggatttgagtaagcacgtattaggtcactttgttacaaaaagaaaacaaagggtttgtcacactttcctcaattggcatatatttgtctcatccatattacaaaaaaaattactgggtttagccactatttaacgtacgagggaacataaaaatatttagaaaaacaaaaataccactgtaagatatagttgtcagcattcggcggcataaacattcgcttaattattgtcttatatactccgaaagaagagattatcaatttttaacgatataacgatctcgattccttaaacctttttatatcatatataaaaagggagctcgattgtgatattctttacaaaatttcattgttcgtatttgcctatttggtcaaaagttagcatttcgaaaaatgctatctacttttaagaattatatcttgcaccttatttttctagctatatcatagatcaaattgctaaatatctgacatatatcgagaaatcaatgcataaatcagctagagacattttcaagctctactctaacattaattagagaatgccgactctataagcgtacgtttagtcgcataaaaaaaaagccatcgtttaagtattggcacacaacttaaaaaaaaggttggacaagtcatacacttgtaattatagagtgaaaacaatgggagcaaccaaaggtttttgtagtgtaatggccaattgggtcgacaatttaagaagagactttgtcattattatttgactttaaatacacctcccattctctattttgatattttctgtagtcacaagatataattaagggaagacatccttctcactcttttatttcttgttccttgcgaggtaggtccactttttttttataaggattttaggcaatttcttttgggttttagtttgtgtctctacctatacaaataggaaaagcgaatcaattttggttagaaccccaaaaatatatctaaaaagttgataaatcttcaaccaagtttgtgtttcgttagttaattactaaaaaaattagattacatgttaaacgtttacactaatagatgaaaaaactacccccacaatcatttccggaccgaaacaatgtttttttcgtcttctgcatatgaaagatattagcttattagccctttttggtaatcatcttttgaaatgattgagtgacgtatgtgattgatgattctctttgtagtttgttcatattattgttctatatactatagtacactctacttgtgtttgatggttaccatattcatttaaaaatttatattggcattattgcaaaatataatttgatttattttctagtatatattttaaagtaatgttcgaaaataattagagctatataagtactttgtattgtaaaattatgaaattaaaactaccacaattttgtccttccaatttatttatggtgaagaaaaaaagaaataaagttatggacgcaattataaagctggcgggtacaatttggcgggtagtcaaaacagtctaacccgtgaagtctgtcacattttaagatatagttttctttagatgaaagaaaaatgaaatggataatgtgacgttattatgaatgaatctcatgcatgcatgtgactccaccatttgtctctttgttatctctcacaagtcacaacaacgacaataattgtaaaaaaaaaaacttatggtcgtttgagtactgagtactagtcgatctagtgtacaagagaaagaagacgagaataaactttcttctttgtatttctttttttcacacatttacaacgtctttccatgggctttttatacactactctttcttgacgtacacttgtctaccttttcatcatttcatggtgcaagggattgcaaaacacgcggttttaggtcagattgctcgttagaagaaaagattaatcttttcttctacggagcaatctgaacttaacatgctttagatgtatgcacagagacgaaagtgacgtggctgaacatttgcttgtgttttgtctttgtgttgttgattgtttgggcttgttgagatgttgaagttgggccagtaaagttgagcttagaattctgagatgcattcaacaccaaatttaatatatggtcgtgtgagtgttagatattgaagtttaccagcaagtcaccaaccccataacgaagcatgttatacacgtatcaacttgtctaaccgtggctattagggatcctctccgaagaggtcttatttggttacgtgtatggtttctcttcttatcatgacatttgaaacactctcgctgataacttccatatatagaagttatgttgctcatgttttctaacttcgttgtgatctccaaagtaattggtcatcttgttgatgtactttttgaatatattttagtcccttaaatgggtaatatgatccatatacgcatggagattcatagctctctttctctctttcccctatgtttaatgatgtggcttcagaaatctttggtattaatgctcgtcttcactccaatatatgaagtcacacaatctatgttatacacctctgatgcagcagcttaatcattagtattatttaatttcttaatctcctttattattttggcaaattgtgatagtgagaacgaactagatctcaggttcatggatgtggaggaaatattaaaatacagataaggcgcatgaatttcagaagatggaggttcgttctgagccttctggccgaataacttctttttggcatgatatttcgtgtcctctacggaaactttatgacttgttgtggtctaaaggaaacattgatacgggagtaggagtagctactcacgctattgttgcgtaagtgttgggaactcatcgaagacggatatacatcatgtcgagtgcgcattcttaatcggattgagaacctgatcgagctagctagaaacgaggaagcttaacgttcactttgaattcaaagaagatggtttctagaataagttctcttggaaacacttggaatctcatatgtgatatcaacccgatcagtgactagcacaaagcagtttggttccctttttccacacggtactcattcataacttggctagtgaattgggatcggatgtggcagctcgagtaagttgcgtcttttgcagaaaggaagtagagacaagagatcacctctttttctcttgcccttactattctcaagtttggtgtcatctcgctagaggcattcttcaaaatcgatacacggaatgtaggagcttaaactcctcacatcttacttgacacttctcagccaaaacttcatacgttcacgctacaaaatgtatttcaaattacgattgatagtctgtggcgagaacgcagtgggaggcgtcacagtgagactcatatcctatctgccaagctaacacgacttaccgataagaacgtgagaaaccgcttcggctacattcaattgtcaggaaaaaccgagacgaagagggactttgctaatggtttagcactcgatcagtcttagttctcaattacactttctatatgtcatttcaaaattttcaacttttaaagtcacaatattttacaaactttttgttgttgaataaacttatggtttggcaaatttattgaaaaccattgaataaatgtataagaaaataacaataaaataaattaaactcgaggttcctaaactacaccataagcgagacggatttgcgcgactactcatgttctcaccgtaacctggcaaaaaggaaaaaataaagggtgagtaaagaattattcaatgagaggatcttctttccgcccattggaaacacgacaacacgattctacctttaaacaacaaacacatagaaaaagacacaacactcatataatttgcattactatgcaaaactataacacacaacttattcttgtcttaccaagatctccacatcaattccatgttcgatcatcttctctgacctttgaacctatgtacttccattagactcgccagtcttattattgaggtaagaagaatctgtcaactcaatatagaccatattccattgttccactattccactgttcatcatcttaaaagatggtaattccacttactcatatatagcattcagtaattaacatcactctatcattaacacaattgtcatagtatcaatcataattatcaaattattactattaagcaagcatatttaatcctatgtcattgaatcatgaagataaaaatagaaacttgtaatcgcattatcgcagatcacaagtttctattacaacttacttgaaattcttgaaatccaactgagttacttgaaatccttacctattctggtgattgaaggctctgacggcttccttgacacttctcctaaccgtatacaacgccgtcttgccctccaatggtcaaatatgaccggaaactcttctccaaaagcccaacctgactctgaaatctgatacttagttatttctaagttcagaaactgtgatttttgtgcaactttcaactcgaattgcggatgacgtttacctcgtaacgaagatatgtttgttgttgtgtcttcctcactatgagatctatccaacgacaccaaattagtgatctgattccttcagaccggacgagaaaacgctcaccaatatctcgagttgaactaatatatatttcctcttttcccctcaaaacacaagtagtttgagatgtaaaccactaatcctcataatagcaacattcttctacatatacttgtcccttgtttcatctctatttcattaaaaattctcctcctctgtttccttacccaatgaaatagagatgaacgatgacgagtaacgaacataaccacatagacttgatcaccacaaaaccataacgtaacgacaactccggtctccataacggtgatggtggtggctgggattaagatgaattgctgctggaaagagataattaagaacgtaatggtgatgatgaagacgtaagtgcttgcggtgaagacgacggtacacaaatatatacattcacgttaggttaggttttggtttggttgggctcatgagcacttccattttacaattttggagagtgtctctaaaaagctaaagctattaaatattaataaataaatgtaaaagatctttaaattaaagacattacattcaaaaatgtcttgctatagacatttaagatatattgtcctaaattttaagacaccaaaacactatatatatatatatatattttttttaaatagattttaatggtaggaagatccctgataggataagggatagagatgctctaatgggctcaataatatttgggtttcacaatgagtctcacttatctccatcataagaaaatctaccactaactccaagtccaattctaactccaactttgcaatccacttatctcatgctaagtagagactatagtaaactcgccttaactctggcaaaagagccgaacagggccgactcaacaaaactcaagtctttgagctgaaagagaaaaatgagatatttttctttatattttttggaccctattttattaagaaaaaaaaataaacatgaatagaccttgagctatggcactcctaacacatgcctagagtcggggctggaaccgaacaaaagcaaatccatgaatccattgtccctccccatctctcaaaactccgcatgtcgtctctaaacctggattttcgtgtgatgcaccatccgtgtttagctttacccatctgaccaaaggaggggtccaagcaattagtctctcaacccttgaatactgccccaacccaccactactcacaatccacgcttgagaaactttcctaactatattattcacaaatcgaactctatcacgacattttccattctcacgaaacacgtttccacacctccattttcacccccacatgtcattccaaagaagaccatgtgaagagagcattggaaccttagtattaattttttattcttcttcttcttcgttacttaacctctgactatgtgcttgcaacttgcaactatcttagagaaggactgaagatctgatgggtttttggaagagataatattgttaaagctatgaaactcagtcaaaactgctttcttctcctttttgtgtcgccaaaagcatgtggcaacgacaccaaaaacaaagaccagttatttatctaataaatcattgactagctaatatgacagtagtgctaattaatcgattgtaaaagtaaacaccaaaactatataaaaaaaatatttatattatttatgtctacaatttttttttaataaagaaaaaaaagatcacaaaatactataacaagcagagctagctcttcattaaggcatgaaactggaagcgattcttaaatatatgagcatgctaaagacatacggttaattctttcgattgattagcgaatttatttgaaaatccccattaatcttgaatatctctgattatgaaaattcaaatccatttacttaaaccatatgagaatgtaaaatggtgcttctttggatagtatatgttttattgaattttgtacaacaagcttgtccctttgttccgattcttgacttatactgactgacttgtgcatgcatatatacaaaacaacagttagagatacttaacttttcgtacaaccagcgtgtgataatgtcttttaaaagtgaagcaaaaacaatacaactaacgtgttatataacatgtgacacgataaaaatattattgtaaattacataactatttgattcatatatgaagtatgacccttgttataacatcatttatcgttagcatgtatttgatttttactacacgaaatacgcaagtaaataaacagtttctttttaaagtaaaagctatctcgcttatagctttttttctttcttaagaatacaatatgaaaactcaaaaaaactaactcttgtaaaaagaaaaagaaaaaatccagagaaactaagagctcaaaccctaaaaaacattttattgtattaaataaaacaagttattatcattaatcgcacacatgcaagtaaagaaattgttccaaaagagatcatgaaaccaacaaattcttaaaatatgaaaccttcaaagctatcgagagactctcatcactttacatttatcaggcgggacatttgaatccaggtggtggattttttccacaattaaggagaacttcaagagctatggggagaatgacgtctatgttgagaagtttagctttaatagtggtacataaacaaacggctgcgtctagatcaactaaaccttcaacaactggacaacacttttccttggcgcttttcccaattccaatgtgaaccaaacctccaagaaggtcaacacacgagcctagcttcaacgtgtcaattgggcaagttttcggcatagttgtaggtggcgttgcgatgggtgtttttgcgattggaggagttgcaattggtgaacttgcaacaggtggctttgtcataggtggggttgcaacaggcgacttagcgataggtggagttgctacgggtggtgtggcaacgggtggccgtgcgccgggtggctttgcgattggaggagttgcaacaggtggagttacggtgggtggtgttgcaaccggtggttttgcaacaggcggagttgcaggtggcggcgttgcaacaggtggttttgctataggagaagtagcaacaggtggagttgcggttggtggtgtcgcaactggtggttttgcaataggaggagtaccaataggcggcggcgcgattggtgactttgcgatgggtggagttgcaataggcggtgtcacaataggtggttttacgatgggaggagttgctacaggtggagttgtaactggtggttttgccacgggcggagtttcaataggcgacgttgcgactggtggctttgcgataggaggagttgctactggtggagttgcaaccggcggttttgtgattggaggagttgcgactggtggttttatgattggaggtgttgcaattggtggacttgcaactggtggctttgccatgggcggggttgcaacaggcggcttaccgataggtggagttgctattgatggcattgcggtggggggtgttgcaattggtggctttgcaataggtgactttgcgataggaggatttgcaacaggtggatttgcggtgggtggtgttgcaattggtggttttgcaatgggcgtagttgcaacaggcggtgttgcgataggtggctttgcgataggaggagtagaaacaggtggagttgcgatcggtgattttgcaataggaggagttacgataggaggcggcgtaacgattggtggcattgcggtaggtggatttgttactggtggtgttgcaaccggtggttttgtaatgggaggtatagcaaccggtggttttacaacaggaggaattgcaacaggtggagttgcggttggaggtgttgcggtgggcgatgtttcaactggtggttttgcaataggtggcagtacagtgggcggttttgcgattggcggtgttgcaaccggcggtttttctacaggtggatttgctataggtggagttgcaacaggcggttttgcggtaggtggagttgctattggtggcattgcaacaggtggagttgcggtgggcggtgttgtcgttggaggttttgcaataggaggagttgcaactggtgaagttgcggtgggcggtgttacaaccggtggtgttgcaataggagaagttgcaataggtggagttgcggtgggcggtgttgcaactggcggttttgcgacgggtggagttgctattggtggaattgcaacaggcggttttgcgggtggtggagtttttataggtggtattgcaactggtggttttgcaacaggagaagttgcaattggtggtgttgcggtgggcggtgttgcaactggcggttttgcgatgggtggagttgctattggtggagttgcaacaggaggttttgcgggtggtggagttgtgataggtggtgttgcggctggtggtgttgcaactggtggttttgaaataggaggagttaagattggtggctttgcggtaggtggagttgctattggtggtgttgcaaccggtggttttgcaacaggtggagttgcggtgggcggtgctgtagtgggtggtgttgcaactggtggttttgcaataggaggagttgcaactggtggtgtcgcggtgggcggtgttgcaaccggtgattttgcaataggaggagttgcaataggtggtgttgcggtgggcggtgttacaactgggggttttgcgacgggtggaattgctatcggtggagttgcaataggcggttttgcggtaggtggagttgctattggtggcattgcaacaggtggagttgcagtaggcggtattgtcgttggaggttttgcaataggaggagttgcaactggtggagttgcggtgggcggtgttacaaccggtggtgttgcaataggaggagttgcaataggtggagttgcggtgggcggtgttgcaactggcggttttgcgacgggtggagttgctattggtggaattgcaacaggcggttttgcaggtggtggagtttttataggtggtgttgcaactggtggttttgcaacaggagaagttgcaattggtggtgttgcggtgggcggtgttgcaactggcggttttgcgatgggtggagttgctattggtggagttgcaacaggaggttttgcgggtggtggagttgtgataggtggtgttgcggctggtggtgttgcaactggtgattttgaaataggaggagttgagattggtggctttgcggtaggtggagttgctattggtggtgttgcaaccggtggttttgcaacaggtggagttgcggtgggcggtgttgtagttggtggtgttacaactggtggttttgcaataggaggagttgcaactggtggtgtcgcggtgggcggtgttgcaaccggtgattttgcaataggaggagttgcaataggtggtgttgcggtgggcggtgttacaactgggggttttgcgacgggtggaattgctaacggtggagttgcaacaggtggttttactggtgttggagttgttataggtggtgttgcggctggtggtgttgcaactggtggttttgaaataggaggagttgagattggtggctttgcggtaggtggagttgctattggtggtgtttcaactggtggttttgcaacaggtggagttgcggtgggcggtgttgtagtgggtggtgttgcaaccggtggtttttcaataggaggagttgcaactggtggagtcgcagtgggcggtgttgcaattggcgattttgcgatgggtggagttgcaacaggtggttttgcgggtggtggagtttttattggtgatgttgcggttggtggtgttgcaactggtgattctgaaataggaggagttgagataggtgattttgaggtaggtggagttgctattggtggtgttgcaacaggtggagttgcggtgggcggtgttgcaactggtggctgtgcaattggagtgacgggtggagttactattggtgaaattgcaacaggcggttttgcgggtggtagagttgttattggtggtgttgcggctggtggtgttgcggctggtggtgttgaaataggaggagttgcgataggtggttttgcaatgggaggagtggtagtaggcggtgtagtaacaggcggctttgatattggaggatttgttataggaggagctgctactggaggagttgctataggtggcattatgataggtgggtttgcgatgggaggtgttgtgataggaggtgttgcaacaggtggaattgtaatgggcggtgttgcagtaggtggggttgcaataggcggtgttgcgacgggcgatttggcgatgggaggtgttgcgataggaggcatttgagtgggaggagttgccattggtggtgaggcaacgggtggtgttggtgtgcacggtggaggcttgtgggtagggggttggggagtagacggaggagggttggtcgtaggaggtttaggagttgatggtggaggtttgacggagggtggtttcggaggaggttttatggtgggaggttttgggtggggatgatgtttggtggggggtttagggtggggatgaggttttgtcgggggtttagggtgagggtgtggtttgacgttgggtggtttagggtggggacgaggtttagggtgaggaggtggtttgatggtgggtggtttagggtggggatgaggtttggtaggtggtttagggtggggatgaggtttggtagggggtttagggtgagggtgtggtttgacggtgggtggtttagggtgggggtgtcgtttaggcggaggaggttttatagtgggaggtttcgggtggggatgtggtttaaccgccggtggtttaggtgggacgacagaatgttttggtggtttgtgaggcttaggtgatggttttggagggctacattcacgagcgtatgtggcagcaaagaagttaagaaggaggagaatgagaaaggagaggtttctggtgcgaaaccccatttttgagaagtagtggagttcagtgagtaagtaggaatacagatgcgaatgttcccatttatagaaaaagattctatgatatttttgttcgtatcatattgcaaggaaaaattgagattttcttttgttttgttttgtttttcttttctttttgacagacaaggaaaatttgagattacgtgattgagatttgatttgattaaagcgcgaatcaggtcacttaattactacaagacaataaaggtttttgtcgggctttcctaaattggcgtatattatgtgttgtagattcttatcttttttaggaaaattaggaacaacatactctatttagattgattatgactcattagtttttggttaacggttgaacatatttcagaatattatcattcctaaaaaattgttcaacgatctccactgttcttgaaatcatggtctaaaaagtgcaatctaggttacaagtctatcataaaagcaaagctttaaatcagagaaatgtccccgcatattattatcaagctctaggctattaacctagtctgtaaacttttagaagtcactaacttaacctttgctatatgatgatcgacataaaataaaaaaaatttggacgtagtcatattttgtaatttttttttttttgaaacagtagtttgtaattattgggtgaaaacgatggaagcaactgagcaagcagaggtttttgtagggttaaggccagtgtactgtataaaagaatgttatcattattatttgacttaagaggcatcgcccattctatatttttagtcgcaagatatgattaagcacatcattttctcttttaggtccacttttcttataagggttttgggtgttagtttgtgtctctacctatagaaatggagaatcaattttgagtagactcaaatctatgatatataaacctatagatttgtatatattggttgataaatatagaaccatgttgcgatgtttcagtggcaaccagctagataaatctgtttataggtgaaagtttcactaattgatgaaacaaatcctctataataaatttctgactgttgaagttttgtatattttgatctaatgatgaaaaccaatcaatctctaggagtaaactggactagtttgtggtaattgagtcttgaatcaaattaacgattttgcagttaaaagtgaaatcaaggaggttgttcgtttgtttctataaccagagcaagaattgatctttagggttgttggcgtgagatcaagcttgtggaatatctgtaactctgaaactagtgaattgctagtgttgacgactgtgttgtcgagccgacgtataggctttcccacatctagaatctaactcgtaaacgtgatcactcgatcgctcgtatacattattctttttcttctttctcacaattcatttttcaagttcttccgtatgatttcatgaatgggagcatgattgattgtaagaaagagatcaagaagcacaagttgaccaagttctgtggcattaacgaatccaagtgtacaacatgttaaaccagtttgttaggtttccagtggttactataactttgtttacaaataaaagttacactaattgatgatatattatattagtgtcttgagttacaacaataattttatgatcaaaatattatctcgaaagaacgtattaggatacattcaaaactaaagataaataaaattatacactctataagggttaagagttaatccattcataatcagttgattttgacttggaatcacataaaacttcacatttaccttccaattcattttaataatacggttcaatactaatatcagagctattaacccttgagataaaatcataaaacaaagtatcgtttgtttgtgtttgtttaacatgcatgtgaaactttattaatggaaataatgaaaagagtgaagaaggtgaataaagagagtggaatataaaacttgatcattggaatttagctttttaggattttagctaacatatatatctgccgacctgttcgaagtttttgggatccaaatgaaaataacatcttcaaatctgtccttccgaaataaatttatggacgcggttacaaggtggcgagtacgattcggcatatagttagaatagtgtaacccgtgaagtatatcacttttaggatttaattttccttaaaaaaacattaaagagagaaatggataatgtgaattttgtgaatgactctcgtgcagtgcatgtgactccaccattcatatctttgattcctccccaaaccgcgacaagaattaaataaaactagtggtcggagtactcatgagtacttgtcgtttagacacgtcggtccatcaccaccagaagagagcaaaaaactagaacatcagacaacgatcatcgtttggatgttttcgttccacttctaatatgttgccgacttgccatttacaagtcttaacaaagaagatttaatggcaacctgttgtgatcaaatatattggtttaatttggtccttagcgatttcagatatttttggctagacagaagttccctagcctaagaatggttaatccatgttatgattaatcgtatcttctttaggttcgaagtttcgtatgaaaaaaggatagttcgaagcttgtaaagactattttcatactatactatacgtatttaatcattttaatggtcaaattatacgtgtggttgtgttctaaaacattaattattagaatagtaatgtaacacataaccaaaagatagctagactagctagtggtgagagttagacccctctaaaaagtgcgtattctagttttcctaatttgattcttggtggagagaagttatttagttatatgtataaccaagagatgtgtatgtggttggacgacaagaacttctcgattaacaataagaagtaagttaacacatatatataaaacactttaaacataactatcataataagcatttaaaaaaagaatatcatcaaaatactcatacgttgaaattaactatttctttagttataaaaagtgaatcttagccacaaaataattaaagctattgacgtgtgtgtatgaagaagtgatatttctaatctataaaattgcgagggtacatgagataatactttaaaaaaaggtatcagtatttaaatatattttcttacaaaatttgtttcttctcaaacattattttatattccaattaaaatttaacagaaccaatccaattaatttctaattgattgaatcagtttttgaactagtttatatttttttaagttgaaaaatggatatttttctaactaaatttaatagagagggaatttactctgctacgttttctacgtatatatgattgtgaaggttttgggattatgcagtgcagaatacattattgtacttccaacattttataataattatcgtttccctatgtttttcacacaaattaaaaagtagaaggtttctataatacctctgcagaaaaagttgacttttgattctattttattttaagctaaattttatctttaaatattcaaaattacgttggttttgaaaattgaaaataatgatataattgtgacttaaattaaaatatacaaaatttagtgattattattttgtaaatttagttattatatacaaaatatatatttatctatcagttttactgatcttttgtcttatctcttagtattattgatttcgagacgtcaactgcaagcctccccaaaaaatcaaatttataacatatcgtttagcgcctaaagacgtcaaagaaacgttactattaaaatatactccgaatattatattgttgcacaaaaatatcagaactctaaaattccgtgacatgattttatgtcaacaaatcatctattatttcttatcatttttgcagatgatcctttctcgtatagtgattattttctgctatatcctatctgaatttgaattttattaattatgcaatatttagttatttagtattgacacataattatttagtatttctcttaatcataacgttgtaatgttgtaaaattccagtggctgttggctgaattatcttatagctatcccgtgaatagatttccatcacaaaagtaacatatacacgttattgaacttatagttttgtcacaatccatgtgtttcatctcatatatatgaaaacaatacatatatacactgtttgatgacaaaaacaaagaaaatacaatattgtagttcatgttgaacaagtgaatgtagttcacacttgcaaaaaagaaacgcatgcgtataaataatacatgtatgtggagcctataatcactatgcatgcacgataacatatagtacacattctgtcattgtatatacatacgaatacgatcattcatctcactataaataataattgacaaatcacgtacgattcactctgacaaaatcaaacgcataatacacaagagtctttttttttgctaaatatctttctcttcctagctaaggatatttttcccaatacttagactatatatgtaaagtcaatagaacctgaactaaattgcactattacattaccggttctttgtgttatatatatattaaaaaaagaaaaaaaaaaaaaaacattaccggttctatttactatacataggatgagtttgggcttcttaaagcccattaatagggcaatttatgggcatcctagaggcccataatagacggatagaggcccaaacaaaatctttgaatacatatataaaaaacaaattatgtgttctcggcaaaaattggaattttgcggataatgtaggataaattttcgtaaagatgaatggaaaaaactaacaaaacgaactctttatcactgaaccttaaaaagatgataacatagagagatagagagaagaaaacagagccaataaaggctcttcctttttcttcttcttcttcttcttcatcttctcaatggctggatcagctctacctctaccacctcctccaccactatcattacaatctccgtcacaaaatcaaacccgtcattcttctaccttttctccaccaacccttactcctcaaacaccttctatccgttcccgtcttagcaaaatctgtcaagatggaaacccacaacttgcacgccaattgttcgacgcaattcctaaaccaactactgttctttggaacactatcatcatcgggtttatttgtaataatctaccacacgaagctcttcttttctattcccggatgaaaaagacggcaccttttactaattgtgatgcttatacttactcttctacactcaaggcgtgtgctgagactaagaatttgaaagctggtaaagctgtgcattgtcatttgatccgttgtttacagaattcaagcagagttgtgcataattctttgatgaatatgtatgtttcttgtttgaatgctcctgattgttttgagtatgatgttgtgcgtaaagttttcgataatatgcgtaggaagaatgttgtcgcttggaatactttgatttcttggtatgtgaaaacagggagaaatgctgaagcttgtaggcaatttgggataatgatgagaatggaggtaaaaccgagcccggttagctttgttaatgtttttcctgcggtgtcgatttcgagaagcattaagaaagctaacgttttttatggtttgatgcttaaattgggagatgaatatgtgaaggacttgtttgtggttagttcggctatttctatgtatgctgagcttggtgatattgagtcatcaaggagagtgtttgattcttgtgttgagagaaacatcgaggtttggaatacaatgataggtgtttatgttcagaatgattgtctggttgaaagtattgagctttttcttgaagcgataggatcgaaagagattgtgtctgatgaagtaacgtacctcttggcagcgagtgctgtttcagcgttgcagcaagtagaactaggcaggcagtttcatggttttgtgagcaagaactttcgagagctaccgattgtgattgttaactcgttgatggtgatgtactcaaggtgtggttctgtgcacaagtcatttggagtctttctttccatgcgagagagagatgttgtatcgtggaacactatgatctctgcatttgtccaaaatggcttagatgatgaaggattgatgctggtttacgagatgcagaagcaagggtttaagattgattacataactgtgacagctttgctttcggctgcatcaaatcttagaaacaaggagatcgggaagcagactcacgctttccttatcaggcaagggattcagttcgagggaatgaacagttaccttatcgacatgtattctaagtcaggtctaattaggatatcacagaagctttttgaaggaagtggttatgctgaaagagatcaggctacttggaattctatgatttccgggtacacgcagaatggacacacagagaaaacgtttctagtgttcaggaagatgttagaacagaatatacgacccaatgcggtaactgtggcatcaattctccctgcttgtagccaaataggtagtgttgacttgggtaaacagctccatggtttctctatcaggcaatacttggatcagaacgtatttgtggcttctgcgttagtagatatgtattcaaaggcaggagcaataaagtatgcagaagacatgttttctcaaacgaaagagagaaattctgtgacatacaccacgatgatactggggtatggccaacatggaatgggcgagagagctatctcgctgtttctctcaatgcaagagtcgggaatcaaacccgatgctataacctttgttgcagtgttatcagcttgcagctattcaggtctaatagatgaaggtctcaaaatattcgaggaaatgagagaagtttataacattcagccttcaagtgagcactattgctgcattacagatatgttggggagagttgggcgggtgaatgaagcctacgagtttgttaaaggacttggtgaagaagggaacatagctgagctatggggttcactactcgggtcttgtaaactacacggtgagcttgagcttgctgaaactgtttcggagaggttggctaaatttgataaagggaagaacttttccgggtatgaggttttgctctcgaatatgtatgctgaggaacaaaaatggaagagcgttgataaggtgaggagaggaatgagagaaaaaggtttaaagaaagaagttggtcgtagtgggattgaaattgcaggttacgtcaactgttttgtgtctagagatcaagagcatcctcattctagtgagatttatgatgtaatcgacggtttggctaaagatatgagaggcgattcgtttctgacaacattgccaactgttactccaagtttggaattggatgagtgaagagtgccagtaactctttagctctcacagaacatggagataaaagcaagaggtgattcaaggccttaaaaagtgagtaagccttcaaaaactctcatttctttgctttctgaagcttttttgttggtgacatagaagcaactctttatggtgataaacactcttgttcatcattgtcttcagtaattgttctaacaccattagtcatgactggaatcgaaactcgacccgacaggagatggagatttaaacccattgtgcagtttggtctttgtatacactattacaagctaatcataaagaaggcagaggagaaactggaaacaaagaaatgtagataaaccaacatcattgtagtttccttgctctcatcttcactctaggcatcttctcgtgtatacttaaagttttaaatattataattattttcattttttcataatttaaaatctttaaacaaatgatgaatggaattggatttttattttttgtacaaaacaaaaataaatttatataacaaaatcattgcctaattatataaaaagtgattataaacagcaaaattattgcctaattaaataaagaaaattaaaaataatggcctaatttaaacatagagtttttacaattttattttatttatatacacattttaatgtggtggaagagcctatattttgatttacacatgtgatttatagtcaaataccaaatgaggagtttgaaaattacatgaccatctaaaaactagagtacaaccactagtccaccactacataaacttataagaaatatctatatacaaaagtacatgcatttttgatacaactactctaaaaactggtagttgaaagaattttagaaagttcaattcaaaccaacaatgtgtttccaatcacttgctagtctaattgttaaacaggtattttaaagcttttcaatataattttcataagttaattttacatgatacataaacattataatttatcaaaatattagtattactgaacttgaatgaactttatatttctgtacatattgttttttactaatttattaaatttaatttttttttttgctaataatgtaaatattcattgatgatgaaattagaaaattaattcattttgtagaatacatgaactcatttgaaacatgaacattactgatgtggagtagtgatatataatttagttacaacatacgaatctttaaagataaagattcttagtctttaaaaatgttttgtaagtggttattgaactcaaaatgtaaacttaagaaatgcaaaataaagtgaaatttcactgtaagggggtatatatataggacccacaatgtgttgagattcatcccctcttcccaatccatttcttactcattttttgtcatattgtcaatttattattcctttatattatttatatctttatcatctacaagaaacacgactacggcatgctaaattattctctttcgtttaatttgtggacttatcgtaagaatctaaaatctaaagacaaatgccaaagaaaaaaaaaaaaaaatctaaagacatatactcataagttatccattgtgaatgcgaggctttggtttatttgccaaactctatattacatcgatcgattttacgtcaaagacccgtctcagtctaaatcataaatacaaattacaatcataatcaatattaggtcgagggatttaaaggaaaagaaaaaaaacgataacgtaagaatctagacatgttggtagcctaacttcaccaaaacactatatatctccttgtttccgaacgaaaggcaagtttggttttctatatgatccaatagactaattttctccatattttactgttaaagattattctggtccctcaatatattttagtaagtttcagaatttaaagccgaataatttgtgaaaaggaaatggctaatcactgtttttctttcgacaagtcatatgaaaatatattgtgcggtgccatgagaaaaagttacattataaagctcgatattctcaattattgcactaatttggtaaagttacattcacattaatttcatgtatctgaaactattctatccaataagaatacaaaactttgagataagctaattgccaatttcctccattttatgcacgttttatatgcattctttgactaatgtatgagaattatatctttgcacatgcacttgagaacttcacgtgaaaatgtttgatttcttgtatatgtgattgtgttctagttttaattgaactttaagtctaataaattattagaagtataaattccatctaatctatgaataataatttattttcttgagattaaaaaaatataaggatttgtttggaaaacatttttatttatttttctaatcgacaatttgcagtttgaaaatgcaagcatgcaacttcagcattgaattatatgcctatttaggtccatgataacgccataattaaataaaaaacttatgctaaaaacctaaaacaaagataaaatctccaaatatgaaagaaaaaaacttaaatatacaaaaagtcaaagttttcattctatgacaaagaaagtcagtacctaacatttctgcctttatgcgaaaaccaaaaaaaaaaaattcaaaaagaatccaatcgttttctcattgcaacctcgaagaagaagaattactattcgtagcctcctttgacgacggagcagaacctcctccaccagaaccatccaccgtcccaaacacaccggaaaccatcgtattagggttgttcatgttactatatccaaccacgggattcacgttgttcaaagaaaacatgtaaggccgttgcggtggctgaagcggcgcgtgaggctggaaattatattgccaaggagcttgttgagaagatccagctgatggatccgacgatgaagtgaggctaaaagcagaagtagtattaccggacccgaaagccatagcggatggaccgccagtgtattgctgaaccatggcacggaagttggaagtgtcggtgttgagaagcgttgttggtgttctacgtgaggctctggaccttctacgtgttggcttggttacacggccagtttctggactcagacgagagtctatggaggtggtatcaccggcagtggtggttgtaacagcggttgaagcggtggtagaagttgtgaagaaggtttggttattgttgtagaactgagaccactcgttggggttagccatttttgtgtgtgtctaaagacaagactccgtgagattgtaagaaagaaaaaagcatttgccttcgttagttctttatatatttatttgattgtgttttgattaagacttagtcaaaggaaagactattctatatcaatcctgaccgttgatatttaattacacgttgattttttggctttacatttcattcttaattgccaaaaaaaaaaggttgtaactattttacgtactttattaatacaatgtttaatttgattcgataatatcatgatttggaaaataataaaataatagacctcacgaagttacaattagttgagtcttaccaataaactagagtttagtttggtattggctactttcccaacaagttgacgaaattggcccatttcactgtatttgtatgcttttgttgaaatacttaacaagtccctcactttacataatcgtcacaaagctgacggcatatacatttcttaacgaaacgttaagatattcataataacgttgcttcttgcctgcttagtgcttagtgtagtagccgttctatatagcacactaggtacttaatatgcttagtgtagtagccatattatatggcacgaattaaataacgacggtcgtacgataataacgacatgacatttgctatatattatacatgggtatcatatttaaatatcgacgtaaataaaatatgatacactctcggctgtgattgtatatattgcgaaccaatatatccgtttctttgaagatcgttgcgacatgaaccaaaagaagattgtgaaggcaaatctttctctgcttccaaatattgttgattacaacttgtggaaccactttcttaaaagaagcaattgggagatctctttgtatttgtcattgttcaagccgattattaaggaatattatctatgtatgatcatagatagtcaagacattagaaggtcattaacaaaaagattcaagagcttggtagctagctaagaatagttgtaaccatatgatgttaagaaaagtgtttgtattatcaaatttcgtaggaaattcaagatatgtcatgtgaagtttcttatacccttgagggctattaattagttaagataatgattctttaaatctagtgtggttaataaactaaagaaagattagttactactagtattttcataatgtgtatgtatcatttacgtaatttattaagaatgagtggacacaaattaattgactggttaggtgactttggaatgaaaagacgaccgaaaaggaaactagtgagaaatttcaaagaaaaccataatctgattctgacgttgcgatgcgtaataggaactacatcatccttctctttcttctgtttgttacaaattctgcatccatcaaatatataatagacatgtaaagagggagagtactttccatggaaattttgttatgaactaaaactttgtaaagtttagggtgtattgaaaaaatcgatacttttataaacgaaatataggataaggattagtttacgtttataaattcgagataagggatttaattttattcttacactaataaaagcggttttgtggtagagaaaaaaatctaaaaaaaaggttgtgtagtatagaaaaagaacattaattttgtttttttttctctaccacacaaccccttttattagtgtaagaataagattaaattttttattttagaatttataaacataaactattccttattttatatttcgtttttaaacgaaatctctttattcacattaaatataagagttgtgtgcattgttttcctagggattcataaaacaacaacctaagaaagggatttcgtttgacagacatttgataatgtctatgtatgaataaaatatgaggtgttttgttggatcaattatgggattgacacaaaaaactttatcctattgttggatgcggcattttttaaagtgattacaagattgagtactttatttccttttgattatctattttacctttttcaatttagcaagtagcaatatgcacttttaatttgcaaactgaatctagatcgcaaatttgtcatccgagaggaatgcatatttgattttcgatctgaagattgcccaccaaaaacaccaattagatgatatttacagaagaatcgagattcttttagttaatttaggattgtttaaaaaaaaatatgcatgtatgcacaataccaaaaccgaaaattcccttataaatccgtgaaatttgttgtttgggttctctatatactatcaccttagggtttaattttcgtgattaaaaacgattgaaattttctggaaaaataaaggaagaaaatcaacaaagagaagaagaaacgaagatgaacaacgaagaagaagaacagacagaggcaaaatagtccatttatatatcagcaagtacccattttcgtaagccaattaaaaatgttccttttttctaatttttgggctaaaaagtacccaaattaacaaaagccccgtgttttgttatttaccaaaacatctcagattttaagtacattttaattaagggtttatgagtacaattgtacgatctttaaggatttagagtatagactttctttttttaacttaaggcagcaaaacgtgtcatatcggacctaatgtatcgaatgtttgtgaagtgtttaaaaaaaaaaaaaacactatgtttgaatgtagggaatgacctagaaattagaataagtttttacatgtgaccagaatttttttggaacaataaacgaaaaatgagtctcaattgcaagagagtcttgcttgatatgtaagaaaaaaagcattttccttaggccactaaaaaataatcaaataaaacgccacattttttttctacatatatcacatttttaatgtgttttaggactttattttgaaaacaaaattcatctctttaacatttatagaaatttttgtttgtttttttacattaaattactaaatcgtatttattcattaatgttttttttaataacagtatttaaataatttcttctatacaaaatagaatgttaggccacattttaataatttgcctaaaagctctatttgccaaaagaagagaaaaattgtttatgattactcaaaaataataataataaatttatgatccttctctgattttaaagaattttatatttatactatgtaaccctctctcctctcttcaacaagattcaaaccgccaatagcataccacaattttgtttgtaatttgggcaagattaatcacaagatacaaatttgagaaacctaatcaagagaattaacaagagtttacaaatagagaatattcttgtaacactgtttcttcacctcttaaatcgaacagtcaaatgatcaaacatatgatcatcagaactaatacaaacaatattaacagaatcgaatctctgagaataaaggcgaaacaatacaacatcctatttttaacacttgagaagataaaacagagctttggctcatgttctgttccaaacctaaccgcgtcctagtgctcgttggcttttgttctccgagatttgaatctttcatccacagactgacgactcttaagatttgattcgtggttaacttatagttttgtttacgagtgtctagacgcgtcctcatgcaactgcgtagtcctcacattaggatcatcctgcacagaaatcaccatgaactaagatgaccaattgatacaaacaggaaaaagaaagatcttttattacaactgcaatagttacccggatgtcgtaagaaaaattggcaggcctgaagaaatctactccctagaaagaacaaagtaagattttacttttttggcagtcttgttacaagattgacaaaacttatgaaagcattgagaataggtatgtaggtacctgtccatggatgccttgctgaggaccgtagtaactgtcgtagcttggtgctatcgagttcaactgtcgctacagaaaaccagccggaattgtttttttatccaaagttaatgaaatagaaaacagcagaagctacttatacacatgtcatggtcgatttcataccaatccttgcattgtttgttgattcccatagaaattatcgcgagttggccccattaagttcagctggacctgtaaaaacacatatcaaaacagattacatacgtatctagataataatatgaacgtatgttgtgcttaattaccattccttgtacgctctgctgtgttccataatagctttcaatgccaaccgtccttgggctcagcttatcctgcaattacaaaattcagatatgacatacttaggcgacttgtgtttaaaagaggcttgccacgacatgtcaacaaagacagaccatctgttgcaagctttctggcgctgcaactggcataacatcctgctctgggttcacctgaaattagtatttggtatcatcaaatttgcaaagcataaaagcgcaaagcgaacaaaatccataagctgtctgcacagagagatcgtaaacaagtaagttacttttcttttcttagttggattctttttcttgctggttttgcctgcacttctgctatggttgtcctcctccacagaaatcagaccttgagttggtgacgttacaacatctggaagacttctgccggaagtattaataccagcacagtttcctatagctccttcaatagcaaggaatgcaatattgtaactctcttgagagagggatgcctcttcattcagctttaatgctcgttcgcacaaatcgttataccgcagcagcctagtctgcaactgctgaggttctcctgaaaaatgccggctttttgcatcttttgtccaccgcttcaatatgtactgcgaggggatggaagaaagatgacaacactgaagaacattaagagtgtgtctgcagagataccctttatactcaaataaccgacagatgcaagagacttcagcctttgtttggttccatgttaccatgaagtcttggttgttttcaaaatcctgcactctaaaagtagaacatgtggcatctcggttctcctccctaggactacacgcaatcgcacccaaaacttcaatctggaactttttgaaaactgcaggagtatagacttcagaaacactcttctcaaatggcgatggagacttcattgctggctgcttgttccacatttcagaatcagctttggcttcttcttcacatctatcttgcaaaactgtatcatatacctttacaaattcttgtacactagtcttcttatgcatatacttgtcgaagaaagcattaatactatcagctcgttgagatgtagacatcccagccaaaagaacatcagtcatgtaggttggtgcccatttcttgcggtcttcatataaagaaatcatccattgatcatctttgaggccgaatctagcaagattcttataccattttctcgcaaagtcttcatctttccctgatttatagatgcacttctcaaacttaggcataaaattatcatgttgcttaacaacttgaccaagattctcagaaaccttcatcaatacatgccaaagaaaaaggcaatgccgtgtattggggaagatttcgggaacaatggagttcattacaacgtctagctcagtgatcaaaacctttggagcttgtccaccgattgctctcagccaggtctccattaaccaagaatatgttgctgcactctcatcggatattaaggcgcacccaaggaccatatactggtagtgctggttcactccaacaaaaatagcaagtggcatcttgtacttgtttcttacgtaggtggtgtctagagaaacaacatcacaaaaactgccatagttatgcctgctctttgcatctacccaaaatacattcttcactcgctgatcatcgcccagatctactgcataaaagaagttggaattcaaggattgcatccgtgacaagaagtcaagcaggattttgaaatcccctgtttccactgataaagtccgacctttttcaaaagaacttttcgaatcgctttttagacttataacagttttgtactcagcaaactgcttagccattgcagcatatatctttctggtctgttcactcacagcttgtgcaggtaaaagctcatgattatgctccctcacaaagctgtgaattacccatttcccatccggccttctcttaacatgcatactagctttgcaatcggttttcgcacatgttctcctaccagccatattctctggatcttgcttactttgtctagctcgtggccgattaaaagatttgtcatattctcttttagtaccatacctagagcaagcaaacttcgcatcaataaactctcttgtagttttcgatctacgactgttctgtatcgcagtgttaaaccccatagctcgagaatactcctggtaaaacgaatacgcttcaccgtgtgactcaaactccataccattaagaggttcaagattcataccctcagtgtactcaaccaactccccagttggaacacccatgcctacactgtcatcagtattaacctcaacagaaacatcctcaattttgccaatatccatatcttcttcattgtgtaacacattatcaagtcctctatcctcatcatctcctttgcaaaggtcacctgaatgtagtcgaagatctatatccatgacaaacctatagtctcaggcaaaacaaacgtcttacaacactgcaagacaaaatctaggtctcagtacatatatctaggtcaaaatgtatactaaagtcacacacaaaagatgtaacaaaccagagaaacccatcaaaattcaatctttctatgatgataaatcgagaaagtatacacattttgcccttacaattgcagaaaaaagcaacttgcagctaaattcttagtgggtatttcatcacataaacgaaatcctcaaatccaattcctaaaacgaagctgatcaaaactactgtataacccaatcatttgtgttggttatcactataaaacaaaaacaaaaaataaaaatgaaaactttacctcgtacgaaacagaagatatacgaatcggagcagaaactgagaaaaggccgtctctttttaatctcttcgtcgtcgagaggaggaagaagaagaagacaacacgcgccaatcgggtgcgagttggggtatcgatctgcgaaaaggagatagagaagaagaagagagaaagagaagaaaaattggtgagtggtgttcacgcgatctgaggaagcgagtgggcggaagatccacgattcgttcttttggtgtctagggtttcttcttcttcttctctctgtctaaacgcatcaccatgttttttgataataataatatctctatccatttatttatgttattaataaaataaaattagaaagaaaaaaaaaaactgtttttgtttgaaattttgtgcaacgcgcatgccaaaacaaaaattggagggaagcgtgaataatgggaatgatgagatttacttacatctataagagtagacttgtttaggcttttaaaatttgtttggtccactctaagactaagacttgtttgaattattttattttgtatttctaagtatttactatggtgaaaactgaaacattacggtgaattacaaaaaaaaatcatagtaaactattcaaaatatttttttgttatttacaaactatcagttttgaatttggactatatatatatatatatattagtaaatgcttttaccaactttcaatagccaagagccaattggtatgactatttcagaattggattaatttattatatttgatccaaaataaaaagatcaatagccgtccaaaaaaataaataaatcaatagccactcattagcatgagtcactgttctttttaattttgtacatatagattagctcagtcttaaaaaccatagttataattagtcccactaatgttaaaaagtttggtaaaaaaaaaattatttcctaacttttttttacatattagctacaataaaataaataccatttttggaaatattttatgaattcaaaataaatttcataaaatatcataatcaatagccaatagccagttggtaatttactatttccgacatgatttaatttaatacagcatatattttttgacaaaaagccagccaatatcctgaaatttaattataattatgccaaaattatttataataccaaaattatttataattaattatccactaatgtaaaagttgggtcaaccatttggacttaattaagactaaacctgccacagtaacagagagagacgatattttctcagtccctttcccttttcaacgagcaacaacactcttcacttaatcgctccggcggtggcgaacggcaacgtgacggtgacgttgtcggaaaattagagtttgtttatctttgcttattgttgttggagaagaaggtatggtgaggaaacacggttggcaacttcccgctcacactcttcaggtaaaatcgaatgtaacctttctctatagccaaagcttcaatttttcatgaatctgctcaatctaaagtcaccaatggctgtgatttcaattgggttctgtgtatttttcttctcaggtgattgcaattacggtgttttgcttgttggtggtcgctttctatgctttcttcgctccttttgttggaggtcgtatttgggaatacgttttgatcggtgtttactctcccgtggtatgtttaatgcttctcaagctagtagtgtttatgatcagaatcaattttgcaaattcataacgagttttggattccacagctgtgtagtttatggcattgatcttatctgataggttcctttatgtatcgtgtgtgtttttgcaggctattcttgtgtttgttttgtatgttcggtgtactgcaatcaatcctgcggatccgagaatcatgtcgatatttgatacaggcgtgaatggagatggcatggttcgtggcttatcaaggaattatgatgaaactggtagtcagttgcaggcttctccttcggttgtcagtaggagttctaccgtggctggaaactctagtgtgaaaggttctgtagaagatgctcaaagagtggaatctgtaagtagaagatcttgctataatcctctggcagttttctgttatgtgtttgttgtggaagactgccggaaaaaggaagggccggcggaagaacaaggaaacagcgaagaggctctgttttgcacattgtgcaattgtgaggtactaagcttcagaattctacatcaagtctccatggttatatttgtcatgtgtatggtctttaatatgaaaagtaaatgatgtatgagcagttaataataactaaaatttcttggtctttatcttctagaatctgctttaagaagtctttagggaaagcaatttggttcagattttagatgtgtactcaattatgtatgtttcacaggtacgcaagttcagcaagcattgtcgaagttgtgataaatgtgttgattgttttgatcaccattgcaaggtaagctttctgatgtttcaaatgtttgactggattttcatgggtttagttgatgacatagttctaatcattgctacagtggcttaacaattgtgtcggtcgtaaaaactatgtgacttttgtctctctgatgagtgccagtcttctctgggtatgtatttcacctcgtatgtgctatttcttgtacttattttctcactgaaccactaacaggttatgctttctccctcctcagctcattattgaagcagcagttggaattgcagttatagtgcgtgtatttgttaataagcagaccatggaaactgaaattgtcaatagacttggaaatagtttctctcgtgcacctttggcggcagttgttgtaagtattcttggtgttatgccattagtttgagtttagctcctgtcatcaaggttcctaatgccatacctacaaattgcgtagggtctttgcactgctgttgccattttcgcatgttttccactgggtgaacttctctttttccacatgcttctcattaaaaaggtcagtgggaaagaaactagttctgatattagttactctactcataacacggataattttcttactgtaagatatcatggtaagacttttaaaagatagaagtgacaatgctcatcatagtagtgaggttgaacttcggattatttttgtttaactacctattatctatcaattgtgaacttttcttaacactggcagggaattacaacatatgagtatgttgtggcaatgagagccatgagcgaggcgccagatggagcatctgttgacgaggaaattcagaatgtgctctattctcccactgggtctgctacaaccggctttagtggtggaagctctctcggtttaccatacaggggggtctggtgcactccacctagagtgtttgataatcaggtatttttaccttttccgaagcatccaaccattcttgtatcgcatgcctaactcttgtgaaacactgaaactcactagtgttttggttgcaacagataggttatatacctcatatacatcatttgaaagtctagttatccataggatcaatctctaaatataaacttgaaagacaagggtttccacgaaatgcagttaatttttggcatacatgtattgcttaatctgagattatgctcaggtatcaacatgccatttttacactcattatctctatgtaggatgaagtcattcctcatttagacccttgcatggtcccgtcaaccgtagacccagatgcacctggatcagagaaaggcactaaggctctgaaaagacctgtaaaacgtaatgcatggaagcttgcaaagttggatccaaatgaagctgcaagggcagctgccagagccagagcgtcatcatctgtcctaagaccgatagataatcgccatttacctgataatgatcttagttccattggcacagttagtatcatcagtagtgtaagcacagatgcaaatgtggctgcaagtaaagagataaggaacaatgatctaaggtcatctctttctagaaactcgtttgctccaagccaaggtagccgggatgagtatgacacagggagccatggtatgagcaatcttagcagtccaagccatgttcacgagtctgtcacacttgctccactccctcaaaatcctacaatagttggcaatcgcttcactgcaacaagccatcacatgcactcgacctttgatgataaggttctgcacagaggaaacgacgcggatccgctatttctctttgctcctgcaacttctcatctgagggatgtgagaaagacatcagttgtttgggatccagaagctgggagatatgtatcagctcctgtaacaacaacatctgaagtccgcaacagattgctaaatcctagctcacaaacagccagcactcagaatccaagacccattcttccagctcatgattcttcttctggatcatcagcactaagggatcctcttcctctgcaccaagccgagagaagactgacatatacaggtgactctatcttttatggaggccctttgattaatattccgactagagataccccgagaagcggaaggggcttggtaagagatgtacaagacagattggcatcaacagttcatcgagatgcaagaattagaagggattcaacctcaaaccagcttccggtgtttgcccctggaggtcttggggcaaactcccaaaccggttctaacatcaagtagatacactgattgtatttcttgaaaggctctgatcttctacaaaacgtcttcccaattcctggagaggctcattatccatgggttctttgctgtgttgccggaactctatgaggattaaagtttgagtttctgagtcactggaatttgtgcgaagttcccagtcatttttcagtgttagagtaggactaattttcttacaatggatttgagcttcttgtaaacctgaaatgtcatcaatattgattcttccagaaaaccattcatgtaaattcttctttcacttatctctgcattttcatttctagaaaatcgatcactcaaagtattacattatggagaaaatattatcactcttttgaaattaaaaacgtatacaagacaacgtactaaataatcacattgagaacatggtccattttcccagcaaaaactgaaaaggtttgacaaatgtacacctcgagagagttcatataacttaaataataacactacttaccgatacatataagaatccaactccagagagtcatggacaaaaaaaggatggctaacataaataacaacaacaatgaaggcagagagagacgccaatatggcttcattctcttcttgattgatcgatgaaccaagcaactcttttatctgaaaaccactttgtgttctgtttctcccatgatcttatctctttcctctcatcaaaagctgtgtatgtacagaacgatgggagagtgacttgggctgacaattctcaagttacacacttaaacagggctatgcaagcctctgttttattgggtcggagttgcgccttctctggttttgggcagatttttcctccactactttttgagatgctggcgtgagttttcctgctcggttggctttagttgactgagatcctaaggattttcctgctcaagaatattcacgaaatagacttaaaggacaatagggaagaacagattgatttgaggcttggtcaaactctacactggaacttggaagattagataagatttgggtcttgtgggttatacatacttatactaaaacttagccatccaagtatctacattgtggtttgtatctatatgactactgcaaactgattctcttatcgctaccagcatgttgataagactatcgtctcaattataaaactggaaatggaaacatatttcctaggcatagagaaagagagaaagaaagagagaaagaaattataccgctgtttggcagagataatcgttcttttgaagatcgatttggttctcttgatctttctttcggattgctgtgtgatcttggaccagcaccaggtcttgagttaacttctacagcaagatcgtctttagctggctttgacttagccttggataccactggaatgcttgaagatattccaggagaagacgaatcaccatccgactgacacgggccagtcatctgacttgaaacaccggatacaagatttgaagtgtttggcatcttactcacacttttgatctgcgttttaggtacattctcagactgctccatgccgttttcacctaattttgcatcatccctgaggttactgtcaagaaaccggttctcccatggacgcactgccatccatctttccaaccagttccatccccaattgtttttgtcaggttgaaagccactgtgagcagataacagccgagttcctgcctgccactacaagagagcaattctctatgtgagagaaagtaacattatagccacatataaaacaagagaaccagacactattaatggggctaggattaggctaggtggccatcgtaaaaagatacacttaaagagaaataaaatagactgctgcagaagagagttaagaaaaggaaccagacaaaaacaacactttaagtagagagcttcagttttgcaagtcatagtgcgttagttaaaaattggtcctaataaagagaactcatgatttatcagattcactattcagggatgttatttttcgaacaaattgaacaaatacaagcaattacttcttaggcagagtagtaacctggtgagtcaaagcatatgccatcgctctctcacgcttagctgcagcttcctgcctctttagcagcttggcttgaatttgttcaacagatccaatgctatcgcaccaaccttcctgaaagatgataacacatagtcaacatgactgttattaaaggccaaccagaagataaacaaatacaaagtttgtaaacaacttagacaagtgacaggcacctctatttctcgaactcgggcttcatctgctaactgttgttgaagtgtctgctgactcgtctcactttccaattccaaggcgagacgaacacgtcttgcgcgtacacgagcctgaactcttaccaacgcttgcatgcatcgaagcgttacagcagcttgttttctcacagcatgtcctctaacaagggcttgaagtctaaccaatcccttcaacgctcgtaaagccctcctagcctaataaatatatcatcttccttatcaatccactcttctttttaaaaccaatgaactagcatcactaaaccataagtaaagcaacttaataaggcaaattgataccagaaatccccgataagccgtttggatacgcgttgcagcccgattttccctactttgttcgtcataagcaacacccccatatgattgtagtgaagttgaagtagagaccccagtatcaaccatactacgcgtattggaatcttcaaatccatcttgaaacttttcaaagtcaaaatcaactgaattctttctcccaaacctactcttggtagcaaccttcaccttcatcagttaaacaaacacagaaatgaaccaacattggcataattaagacaaaaagaaagaaactcttgtaataatcttcctttgaagtactcacattttcatctttcttggaagacctagacttatcagatttagtaaaaccaaccaatgctttaatccatctccctgaagctcccattctatctcaattccaacgatcagcaacataaaacaacacaaaacctgcaaaattgccaatttagcaactaaattattcaaaacagtaaagctttctcctttttgataacaaaatagacaaaaatggaaactttaattgagttcactaaattctcctgacaatgttggatccttaatattaaaaccaagaaatttagtaatgaacactaacaaaaaatccaaactttgcaaaattgagacacatcgaggagaagcaaaattcaaaaactttacaccggcggcgaaggaaagatcgccgatgagatctttaaagagagtgagtggcgacttcgtgatcttttcttcttcagtcagtgagcgtctttctcggctactttactttttcctctctctctctactctacaaaaagaaaaaggtccatactttattctctctctaggggatatgtgtgtgaacgaacatatacagatagataggaattgacttgattgatcgtttcgttttccctctcctctctcagatacgattgattgaatgatagattagattgcacgccgtacgcgtgctctattcttcaatttggcggcgttttttgacctcgaaacggcacgcagttttagtttgaaatatgtttgattctcttttttaattaatgcatgcatttatgtgtgtaagtcttgtttgcagtctgatattttgaatggagaagacaaaataagttgacgtgtcacctaattatatgatgtcactagtttttgtaatgttggatcattattagtatcttttttaatctaaattaaagataattattattttttcgtttacttttgttagacgtaacaactatcacatggttatgtaataatcttatggaaactcgtatattaaaataatttttactccagtttttcctactatccctccttagaaattgaaatatgccatcaaatttggctactttttctgttagttgggttggcctagttggtgtttttatttagtaaatgaaaaataaaaagataaaaacaaacacacaaagaaaagttattagaatatgtcctacataaaattttatttatgtatagaataatatataaatatatggtaaaatttccacttgaagtaatttttaagtatgagttaggctcatactaatatgctataaacctaaagttttaatgtgtctcgattgtgaaccatatatagatgtccagtcccataaccttaacgtttcagatgtccatttctaaacgcgagggaagaagtgtattaaaatgtgttccacatcgagacataatttttttttcttcaaattggagtgattttttttactatatttctccattttatttatttcagcagaaaatataataaaattttaattgatatttttatggtatggctgctatatacaactagcctcttatttgttttttctttcccttgctactactgcaccagttacaacctattattattatctctgtgagagagcagcaaaatgatttgtttccctttaaaataaaataaatcaaaaataatattaagaaaatgactcaatgacacgtcactggaaaaaatcaaatggaactcgaaaagattaaataaataaaaagatataaggcatcatcatcatcaattcatcatcctctgttttgtaaccaatctcagctctccctctcaaacaatccaggattcttcagattcctctcctttgatcctctctttaacaatctctctctctctgttttcttcgatccgttgtaggagaaaatggtcgttatcaacagtctccgacgcttggcgcgtaccactcaggttcttccacttcttcttactcgcttgatgatctcattattctcacatacatgatcctcgattgcatcatcataattttccccgaatgttttgcttaatagatcaggagtcagaataacattgaatatgccaacaattgtaaataaaaatctaatcttttttcaaaacgccaaattgacgtggatcaggatgaaaaaggtcatgtcttttcgagagtatatacttttctgagattctccagtaatcaaggaacaaactttttctcataaagtggaacaaatctcttgttgtgaatgataatcttcttataacaaagagataaatttgaagaaaattctgtggagatcattatatcctaacccaaaaacagtgatgtgatttatagtgctaatatttttactctaatggcaggttcatttgcacagtaagtatgccacttgcatgtctgggaactccacttccaggaggattttcactactgaggcagcacctgagaagaaaaacactgttgggtgagttattttttaatgcttctaagcgttgtattctgaaggctttatagcgtcgtcaacgagacatgaatagtggtgatgtttttattctgagcaggtctaaagggcatgatatgcttgcaccttttactgctggatggcagagtgctgatttagatcccttggtcattgcaaagtctgaggtacatgtcaaaatctcattttcatagtgtaaatgttgagtcaaacagttgtgtaagtgtgacgtttttcttacagggaagttatgtgtatgatgatactgggaaaaaatatcttgactctctcgctggtttatggtgtactgccttaggtattcttccttctaatactactaaacatgaattgatgtttctttttctgcagtttggtattccttgattctgaccctcattgttaacccaaaaccttgcaggaggaaatgagccaaggcttgtttctgccgctgttgaacagttgaacaccttgccgttttatcactccttttggaaccgtactactaaaccttctctggtactccagactttcccttttggtgtcatttttataatgttttcctacaatttcctgctactctctgtgtcctgttaagactcagagcagtatactttatgagatatcaaagagaatttgagcaatgtgatgttttcatactaaacaggatcttgctaaggttcttttagagatgttcacggccaacaaaatggccaaagcattttttacaagcggtggatcagatgccaacgatacccaggtttccataactatacttcaaaccttgatctcgtattttctaagttttcgacctataagagttgtttatgaatttcctgtatatataatgcaggtcaagctggtttggtattacaataacgcacttggaaggcccgagaagaaaaagtttatcgcgagaaagaaatcgtgagtaatgatttttgcttgtccttttccatttgtctgtttttataagatctcagagtgtttacaaatgcaatgttatcatttcaggtaccatggctccactctaatatcagcaagtttgtccgggtaggataaatattgttcctcatatgttctttctagaagtgctaaagattccttcttttccctaacaaagttagtttgttgttccagccttcccccgctacaccaaaattttgatttacctgcaccatttgtgttgcacacagattgccctcattattggcgttttcatcttccaggtatgaatgatcctcactgccatttcaaacagtaaaagtatctgttattataacctttgaattgcttgttcaggcgaaacggaagaggagttctcaaccagattagccaagaatttagaggatctaatcatcaaagaaggaccagaaactgtaaacttctatagttacttacgaaaattcttgtctttatgctactagcagaaccagattagtctaacagaaagcgtcttcttaatagattggtgcttttatagctgaaccagtcatgggtgctgggggtgtgatacctccacctgctacctactttgaaaaggtcattttcggaaactttgttggtactgatagcatgatattgggctctttttgccgtttcattttgtttatccgagtgtgttttctctttctgtactgcaggttcaagctgttgttaagaaatatgatatcttgttcattgctgatgaggtatgtgcatgtcttattgaaccatgtttaccatcagtccacacaggatcatgaccccaagtatccatcaagaagaagatttatcattatctgtttttattttgtttggtctttaaggtgatatgtgcatttggaaggctcgggacaatgtttggctgtgacaaatacaacattaagccagatcttgtgaccttagctaaggtgagattttgcaagatgattagtagtttttttctgttggcaaatttcccctgacaagttgtaaatgtttccaatatacaggcactgtcttcagcatatatgccgattggagccattcttatgagccaagaagtggcagatgtcataaattctcatagcagcaagctaggtacagtattttggtaatgttcacactggttatattccaatgttctgatcttaatatgctggtgaaaacgtttctatttcaggcgttttctcccatggatttacttattctggtcatccagtttcgtgtgctgtagcaattgaagcgttaaagatatacaagtaagtttgtcactttgcatacaagtgagccagtttttagattgtaatttgccaaaaacatcaaaacctgtcacacagttgactaagtttctcgcttctctattcttactgcacttttttgtgacgatcatattcatattacagggagaggaacataccagagtatgtcgccaaagttgccccaaggtttcaagatggagttaaagcgtttgcctctggtagtcctattattggagaggttaccatttctcttggtcctttacttaccagttttattcaataagaattatttgactgaggacattttgtgatggttatcagacaagaggaacaggtttgattcttgggactgagtttgtagacaataaatctccgaacgaaccatttccaccagaatggggtaaaagaaatcactctcatgaccaaacattaaaaagtctctcttctccaaaactcatttaccatactaatctctacaccattgtttcaattgatgtttacaggtgttggcgcattctttggagccgagtgccagaagcacgggatgttagtccgtgttgcaggtgatggcattttgatgtctccaccgctcattatctcacctgaagagattgatgaggtaaatgtcccaatcttgagacataaatattgctgttgtctgctaaatcttgtgaccaattcactgaaactctctctctctcttttatagttgatttctatctatgggaaagcattgaaggcaacggaagagaaggtaaaagaactcaaggctcagcacaagaagtgaaaagcagagtcaaaatgatgttgatgaaaaatgttttttagattctcaaagtttggatcctttgtttttttttttaacacacaacaagtctttaaataagtacattttaatgaggaataaacaataatgggacaacatctgacgatgtgatcaagatcatctactaaaccaaaaatgcagccatagttaacaataaccaaactcttttgaattgtttatttgtacgaacattgaaaagcaaaacgatcatggatcatggtgatttttggaatcaagatttaggacgttttttgtttgcttctctctttgatcttctctcccttgaacttagagaagtcttgaacccaacttcgttctccgagtcgtacacatctttaaacgatttctgcacacacacacttgattttttcttaaaattatatgtaaaagatcaaaaatgttgagaataaggagtagtttcataacagtgaacctctctgatctcggcaaagctaacggcatagaatgttacgaccgagactgcgacgattccaagaacagggagtgcgatatggcttatcccttccattttcttctcttcttctcagaaccaaactttcaggataaggctcttgaggataataatatctctttatatagatagcatctgaattcaactcttttttttcacttatccttttaaagaatcaagattagcttatgtccaaacaatattatatggacaagagagaaagctttagtaaatatcaatcaacatctctaaaatggtttttgttctcattactgagtaaagaagaagaagaggaagaagaagaagaagagtaactattagtttctgggatacaacttaaagctggtaaagacttctattaataatacaaatcaaaccctaagaaagaatcacaaaatcaaaccctatgatgattacaggaaaaggtgcaagttcaagtgaacagattctccgaataaccgccttcgtaactcgcttccttttcccctttgaatatctcagcatcatcgaaacctgttacgcatttcattcaaaacaccttttaaacaacttctctcatgtttgtcaagatattcacaaaaactaggttctgcaaagcttttacctgaccccaagtcttctgtttcgtcgataacaacagctacttcttctgacctcttaatgaactcgagtgacttccagtctgagcttccatttccttctatacaaacttggtttctcgaaacccagtcttcaagaacttccatgttgctgtgtgataacgggtctaccgtgtcatctccgctgctttcgctgccactagaggaaacagacagagaatccttttaagttctgttttgaacaaaagacagtatagtaatcaagaagatcaaaagattccaacttacattcgtctgaggcgcatgttgtactgaacaaatacaagatcgttgagccgttgtcgctcaatagagttctttgattcatatatttgcgagattgatgtcaggtttctcactgagccaatagatgagctgcatgtctgactcagaatacgtatcgcaaaacgtgacaggttcaagcagctttctccatatgtagaccaccattcagctacaggaatcaaacatgttttaactacttacaaaacacttgaacatatgaaatctttttgagattcaattaataaatggcgtacctggaagcattgtgtcacgagctctgatagctaagttccttccgaaaatcccaacagcattcttgtatgagtttatgtccttaatgacaatatcttgaatgttgacatcagggactaatttctctatgcaatcaacaaccgctaaatggatctcactacgcatttcttcgtcgatgctatagaagaactttgggttcaaatagaaaccagcagcatacaaaggttgctgcaaccaccacctatctataattttccagtacactatgtactcctccctgtgagccagatttgtcttaattgcttcttttgctcgatacattgctgcatagacataccccattgcaggcttcctttcagaacaaactatcctcaaaacacgcaaaatcggagcagttatatggttcgccaatgttaatgccttccagaagtcctcatcattgatagtctcagtcattgctaatccacctgcttccttcgaatacgaacaatcattccactcggatgatgtaaccattgcttgcaaataaggttttagatcagcaattcttcccattgttgtaaaatttgtagcggaactggtacagactggttgcacaatatcattgccaaaagtgaatttcctcatcagattcaaaacaccactgtgattgtaaataattcttgtaacagttcgagcttgttcgataatctctcttatccaatccatcttcccaaactcttcaagcatcttgtctatgcaatgtgcagcacaaggaacccagtatagagaaggatacacatccatcaactttttcccagcagctgcgtaatgatcttcacatttggtaataacttgaacaacattagtatcacctatctcttcaactacctccttaagtaactcatacaacttatcctcagaatctaatatctctgatgcatcaactgatttcagaaacactactttctcaggacagtaaaccaaaaacttaaggatcaaaggtccttcgttggagttcagttcctgaactaaaacagaacatcctgttctcttccatagagttttgcactcatcaatctctttcttcacttcctctacacaactcttcaaaatccaacctctgaggtcttcatgtgtaggaatagaaacaccaaatcctccagaaacaatcgcatcgataaacggttgaacattgacagaattcgccgcatcgaaatcagctccaatatcaaacagaaaccgtcccatagccatatgaactgttttctcccgctctttcgaagtaggatgcacaatgttcttcacgctactaatagccacaggaatcaaattgtccatatctcgatcaacctcaacattagccaaatcattcctctcaaaagcattattctttctactcctataagtcctctgcttcgtcctcccagtactttgacccactacgacatccgaactcggcgatttaaacccgttattcacatcagaagaagcagcaacctgagtctcaacttcacaaggagggaaataagctataggcaatggttcaggacttgatttacgtctcttcctctgacgtctcaccgtaccatcaatacactgctgcaagaaaagacgaacctcatcaggaacttgatcacagatagtgccttgtcctttcttgccagcaagatgttccttaacccttgtaataccacctcctttaaacatctttcgacagtaaagacatctcatctgaactcgatctccatatttgtaaacttcacagtgtttccacgcactgtcttgtttctgtggtgttagagctacaggttccaaatctgaatccatcctacaaaaccctagatccttcaattaaacatttacgagatcaaacttagaagaagaattcatcagctttcataaaaaagctcacaactttcgtaacaaagatgttaacttttcgttgattagataaaaatcggatcatattgaatcaaacccgtcaaagaaaagcgaaattctaaaacccagtgcagcaaaatcgtaaatttcagagtttttgaattatcgaaagaacagagaacgaaccttttttggtttgcaggtttgtgaccgggttggttacggcaagaaatcggttcggtaaaaaacttgataaaattacggtataaggacttcggttttggggatgaagaaggtggaatcgaccggagaagaagagattaaggaacgctggagaagaatctgaaggcgacggaggaatgcaatgtcggagaaatttttgagatgacccggctcgttagggttcgagaggagaagaagttgggcagcttttctggtttataaaaacgacaaattttgtttattttttattttttttgtcttgttttggcttaaacttgtttttgtggttaaatcggtttttaatttaaggactaaagtgattatttgtataaagtataaggtctgatatgatgataagtgacttcatgtggggtatcttttaatttgtcttttcaaagatagaaatgattttgggtcaaaaatattggatgagattgtagaatctagagataattattgtttttcaaagtcttatcataaattaattaaggtaaagttgaatgataaattaaaaagcaaaatgtgttaatacttcaagaacatttgttatacttcaagaccaatcacaagtgctgactcacattacaatgattgttatgttttactagatttgcttcggtattagtgtgaggatgtgttttgtcaaaaaaagcttagaacatgaacggagtttaaagaatacggttgaagcaagggcttgcattgttgcgttctatatctctgaaattcgtttatgtttgctaaacagaaaccacaatgtgcatgtataatagattatcaaaatgttgagagaccttgttctgtgattctttcattgtgatattttgtacaatgttagtttcattttaagagtcacaagtatttgtacacaaatcaaaaatttcacataatagttttcaatctcgtatattgcaacaggtctctatgactgaacaaggaaaaaatcaactaacacaaaggctatacaatacatggccactcacacaatcgtaacaatctcctaacttttcaatctaaacagcaaggttaaagaaagattcgacacctatctcgttaaaagttaaaacactctatttataacaccataacatcaacacgaaatcaagtaatcaacagtgacaactcaaacatgcatctaagactctctatatgctcctacaagtaaagaaaagagactacaatggctctaggactgactacaatggctacagggaaaatgatttgacagagaaacccatttcaatactactccaacatctcgaaattggaaaccagaagtgaccatcttcaataaccttaaacaacatttccacaatgtaatcaattcagctattaaaccagtgacaatatataaaatgaggcatcaatatagcaaaagattataagtaagagacaaaatccagaatcaattccaaaccaaaaggtcttaaacaatgatccaaattcattctagaactaaacaaaaagtagatagatagataaaaatctcaaaggttcttcttcagaacctgagcttagtaaagaaccacctgttcttcccagtcttgaaacgttcctcaagcttagccttagcttcctttaaagcagtcaccttcttatccttactcttaagagcatcaagagtcgctacttccttcagatctacatcgagcgtgtaacgtgtaggcatcagatgctggtaattcacgagcttgatgaaacatttcactcttgatttcttcgccgtcttcttcgctgagtctttgcggatgactttgctcgggtacttcttcagtccggcgacgaggcagtgtccgtaacgacggtcactggttccgtcatcgaaggatttgatgatcactgcctttttgccggcgtaacggccttgaaggaggatcaccgctttgttctgcttcagaaacttcaccattgtttctcaccaccgcaaagaagaaaccctaattgaagagatgattgtctttatatagtgtgctgagtaaaaccctaatttgttttatttcaatatcgaattcggcccattaaaatgagatgatcctaaaaggcccatgtaagtttcttatatcgttttaggccctgaaaccaccaaattcgaaaatatttttttgaacaccattttatatgttttgtttggacatcgttttatatgttttgttttacaaaactaaagtcgagattcgtaagctgggggagctctgcgggatggagaacgtaattgctgtgacggttttacggttaacattggacgttgttctgcacctctaccagaattacggagagtctactatgggctttatatcgcttgggagaagcaaatcataagagtggagctggagattgattcgatatttgtagttgggtttctcaagacaaggattaatgattctcacccaaagtctttccttgtacaattgtgctatggccaggggcggacccatgttgaagctgggtgggcatgtgccccattttaaatcttataaatagtgtattagctatgtatgtacaagaaaatttagatagcattgatggttttacagtaaagtgtgtttcatataaacccaatttcgattcccaaaactgtaatttaggtataatgttttttaaaatcataatataatttagctaattaaattttaactagtattttataaataaagtgccccatatagaatttgggtctagatccgtcactggctatggctttctcgcaaaggactggatagtccgcattgttcacgtgtataggaaggtcaattgttttgccgggattcagatattttctaatccaattagcatcagactcagatattttgcaaattctggttgattaatgcataaaagatcgcattcataaaaataccaaatctagctcgtctattattatcccgctggataatattttcatgtgttttctattgattggtgattgaaaaaaaaaacatttttcacgtaataattatatttggataaagtcacaaccacttaaaactgtaaatcgaactgtgcgcacatccgtttggttcacttaaaactttaaagcgaaacacaaccatccttaattcctcactatcgtcaaacattttttttatctatttcttacaacaataatttgtatgaaatcgttaattttgaagttaatgagtcccatgcaaggatcattcactgttggtcagaaacaagatgtaattaagaacactaaaacacagtttcctttgagtagtaaagagttatgactagctatttggtttttaatttcttttatttatatagaaacaaaatacacgaagcaaatgattcattttaaacagtgaaacaaataaactttaaaatgcgtggaaatccatagaaacgactactataacatatatatatatatatatatatatagattttctatcacgtgttgtttttcaggtttgggcaacgacttctgtctcatcatgctgatttactctgatgtacagaggctggagcatacgccgcagcagaagatacactccatacaagtactgccaatagtgtcaacagacatatcagtaaaaaaaaaaagtagaacgccggatatataaaaaaataacatcttggataattagagccaagttataaacatatatatatatatatatatacacgtacctaaaacaactcattatggcttcggggttgacgcccttggagtttgtctccactgctgctgccggaggatcacccaccaccgcatctctagtcggataaccaattggtggcggacttgtgtacggccctgatgaagtctctgaaggtttttgcactgtgccaaaaaaaaaaaaagttatctagttggtgagtaaagaattattgttcatcatgattatacgttagacattgatcatgattttagaaaacaattgaagataattaccggaaaagtaattttgcgcggattgattcattctgatttgaggagctgaggagtgaggatgtgagatttgtgaagaggagagagtgttgtgcttctaatttataaggtagacaaatattaggaaattttttacattattcattatataaaagaaagaagagtcaatattgaacaataaaaacatctaatcacagacaactcacggacagacctaccttagcgaagtggtaggtctaggttttttggttatatccaacacatatataattgcagagataaagcaaatgatattgtttgaaatgcacaagggcagaggaaagcgatacctatggttgagatgaaagtgagaaatggtttgttgcagaaatggctttcgtcacgtacatgacgtacacgtacatgacgtcgtaaaacatgaggaatttaacaaatttgaattattttgttcctggaactgtcttttagaacctcttttttttttttttgggtattgctctaaactctatgtaaattaaataacctcttttgatgattaattaatttaacatttcatgaaaatgaaaaagtgattaaccaactgcctttgaaccatgattaatagttttggctttgttccttatgttggtgtgatctgttaaactgcaaaggaaaacaactttataaacttaggtgttgtttatattattatatattgtattaaacttaggaataaaaaatcattacgtcatattttgttgctacgaattatgactagctatttttgttttttactttgatttatatagaaacaaaatagacgaagcaaatgggaatcatggatctctttcaaccagtgaagcaaataacatactgatgaatcctctattacgtatatgttgtttttctggtttgggcaaagtcttgagtctcatcatcctgaaaatcctgacgcgcagcacatgacacattcgccgcaaccctggatacaactgccaatagtgtaggcagacagatcattaaaagagagttgcacgtcggatgaacatcttgctaataattagagccaaactatctataaagaaagtaagttaaattagatatgtactgtaatattaacattacgacttcgcagcagcccttggaatttgtcttctctgctgctgccggaggatcacccaccgccttatctctggttggataaccgatcggcggacttgtgtccggtcctgatgcattctgtgaacgtttttgcactgtggccaaaaagattagttaattatctagcggtgtgtatagaataattgttcatgattatatgtggccaaaaagaatatacgtcggacattgatcatgattttagataataaatgaagaattaccagaagtgtgctcgagctgattcattctgatttgaggagctgaggaatgatggaagggagaaatatgaagtggagcgagtgttgtggacttaatttaaggaagacgtaccaccattttttaatttttcttacaaacatatacagaacagactcatcttagccaagtcgtataccaccactttttttttaatgtaactaagtcacaagtgattgtcgagtaacaaagaattgcggtgaaaaagtaaatgctattttgtgaaatgcaaaagggaagaggaaagcgacgaaaacggcctttttcaacctctattatttgttaaaagccttttttcaaaaaaactccgatgtcctgtctttcttaatcagaatcaaaacaaaattcaaattgcaaatctgacatttatgaaaattagctgatttcaacatatctctagctcgaaccatgaattaattatggagttaaacacaagttttgatgatgaagaatcataaatattccacaagtgttttttaaaagcgtattgaaacctctggatccaaagtagtaggactcatcaaagtaggagtaaaagaaaaagagattttagccaatgtatcatttttgggtccaatggaatttttattctcatattaaaaaaaaatattacaattccaaacagaaaaatgttaacttttgttgcgaatattttcagatatagaaaaaactttgatttcatcggttaattcaaaaatattttacttattcagtaaagtactattcattttcaagctcaattaactgagacatagtaataaaataaaatatatttgaataaaataaaattgcaaaaagtcttttactatgaatctatgatcatatttatagtagaatatgcaataggaaatactttgttttatctaattaattcgaaacagaactatagttatgatatattatttcgatctcactagcctttttgattttttttttatcaccatatgctgtcatggtctaataaagaatcattctgattagttgttaattttgtgaaaagttcttgtgcaaaggataatttattaaatgatatgttcttaatttatatcgagtagacattgttttttcttttaattgaaagaattctaaattcataacttgtaaggagggacttatagtcaccaaaaacagagactaaggcaattattggattcaaagttgatgttaaaaccctttttggtattgtcaagttgttaacatcttgataaataatatatcaaaacgaaaccttggagacgaggagtttaattttctttttagaattttaaaaaacaaatatacgtgatcgtgaaaacgtttacaatatatgtataacggctatattgcatattatatttaataggattattatgtaatttttaagagagaggtcaaaattgcaaaaagacgattttgaagtttttttcacaaaacccaaacttcaaaacaaaatgggatttagaatttaattttgttggtatcaccctggcaaatgtggagttatttttttcttatccaatgatggaatagtcatttggaactcaactagctgaaaaataatttaaaactgaaatgtatatgtataaaaaacaatttacaaaaacttttgctttagttctcatcgagaataggcaataggtttcttaaacatatttagtgtcaagagtgattttattaagattttaatattaaatatttggatatataaaaagtcaaagataacgtaacgtgaaaaggaagtattagattgcgctatacatatgaaaaatatatactaaatgatgtatttggcgaatcaagcatcatggtctaatacagaatcattccgattgaatcattctgattgaatcattttgaatagttgttaattttgtgaaaattcatgtgaaaaggttaactaaatgatatatcttaatttatgtctagtagaccttgttgtttcgttttgttgcaagaattttaaatatatggcttgttgggagggacttatctcaccaaaacaaagactaaagcaaatgttggatacaaagctagtgtcgatgaagaaacgatatatgcggtagctgctgaatcttctactggaacatgggaaactaaagcgatggggcataccagcctggatcgtttcaaagatgatgctaccacatcaaacccgttttgggagaaaaaacctcaatttattgcgaatataataacttaccccttagatctttttgatgaatgtttggttactaccatgtatacctcgactgtgggtaatgtatttgggttcaaaaccatgtttgttttacgtctagaggatatgtgaatcccttctgcttatactaaaatgttccaaggaccatctcatggcatccaagttgaaagagacaaattgaacaagtactatctagaggatatgtgaatcccttctgcagttcataaacggcggttcaatcgtgttttacgatttgagattaaggttctcataggaccggttcgattttgtttaaattggttttgtttagttagatactaagtaaaaattgtatgaatctaaattcggaaatatcccaatagaccttatttataaaatttgaataccttttcaaaaaaaaaaagggcttattagaataatagacactttttaaaaaataatttgagaagtaggtagtttttttagaaattggtgaaatagacattttttttactttttatgaaatagaggttatgtgtaataagctaaaagacaaaaatatgtcaaataccactttaccctttacttcatatgagaaaatatgagtctaaatttttatattatttaactatttagaactatttttattatattatagttatttttttttcatattcatctttttgaattttattaaaaaaaaatatttttttttaaataatttcttcttccaaagacaagatgatttatatgtttttaattatcattctcgtacaccagcaataaaacatagttttatacactaacacttatacaccaaatcattttatacatatcttctaaaatatttctatttatctcatattataaaataaaataataattgttcataaattaataaaaatatgatggtgtacaccatcatgcatactattaaattaaccataatggtgtataccattaaatgaaagtaatgtttgtacatttttacttatgtacactaacatttgtatacttttatgtacactaatctcatattattattatttaaactttgttttgtatattatcacttgacaaaaatggttctgtcttttgtatatgaggtgtacacaataggtgaaggtgtacgatattatagacggtgtagaagttgatttatggtttgatttattatctcattattgcatgtatactattaatatcatgtacaccatatgttacattttcgtacaccatcttattatgtagttgcacatcgttgtatattatcgtttgtacatcactttgtacactgtctataccgtataccacttcttagatcaatattatacattatcgttgtacactactatttgtacaccacatttttaccatatcgcatacaccgtcgggttaagatcaaataaaagaaaagtattatatatttgtaaaatatagcaaaattagactttttagattcagaaaaaaaattaaaagattaatatatattttatgataattatttaatgaagaatttataacaaaacaaactaaatatatataaataaagagaaaaagaaaaaaaaattatttttgtctttatttgactatatgacaaaacagcagaaggttataaaggtcattcactaaaatctctattagatagaaagttgtattagagaggaaagagaaaagtgtctattctccctatttctaaaaaaactacctattttgcaaattatttgtgaaaaaagtgtctagtttccaacttatctcaaaaaaaaaatacaccaaacaaatgcggataatggatcccttttaaataatgaagcaaataaacttaaaaatggaacgtgagaatccatacaagcgactaatatatatatatatatatcttgagtcaagataacatattgatggatcttctattacgtgttgtttttctggtttgggcaaaggacttcagtctcatcatcctcctccgcagaagcagagcgcgatatggccacaacacaaaagaccactgccaatagtgtagacagacaacaaatcattaaaaagaaagttgaacgccggttgcgaataattagagccaaactataaacatataataataataaaaaagtaaactaaatgaaatatatatgtactgtaatacgacgtcgcagcaattgggctttttctccactgcttttgccggaggatcacccacccccttatctctggtcggataacccatcgtcggcggaggacttacgtacgtccctgattgtttttccactgtgcccaaaaagattatttaattgtctaattgctttgtgtagaataataactgttcatggttatgcatgcatggccaaaaagattagacgtcggacattaattgatcatgattttagaaaatagttgaagaattacctggaatgtatttgttgtcgtgttcattcattctggtttgaggagctgaggaatgaggaagggagaattatgaagaggagagagtgttgtggtgttttaatttaacatagacgaatatataggaagcttctaaataaaagaatgaaaagtcaatattgaatagacatacctattttgcaacacttgtgttatatataaatgctagtgttcaagaaagtcaatttcatataatttttatacagtgttttttttttgaaagacacgtatataaataatcattatgattatttgttaattatgcgaaaggttcttacgaaacaagttaatatgttaaatgatctattcctaatttatgccgagtagaccttgttgctttttaatttattgcaagaattctaaattcatgacttgtagggatagacttagccaccacaaacagagactaaagcaatttttggatttcaaattggtgttaaagagtataaattgacttattaaaatcaaggatactaatttcttggaagcattccaactctggatcttctattggtacatggaaaactgtgtggaccgatagtcttaccagttttgatcgttacaaaggatgatgctaccacatcgcgtttgttgcaagagaaagaaacttaattattgcgtatgcaacttacccattatacctttttgaagaatgttcagttactaacatatttacctccattgtgcatgtattttgggtacaaagccatggatgttgtacgtctagaggaattgcaaatccatcgttcttatactaaacacttttgaaacatcacctcatggatccaaattaaaagagatagattgaacaagtatggacgtcccttagtaggttatccgagaaaaactatggtaaagcaaattatgaatgtatatatgtgattttaccaaagatggtgagaatgtgaacttccaaccatttatgtgttagagagaccgtttcttattttaggctaggactgtcccattggtattataaatagaagtagagaaatgtcagcaaaggacatgtgataactgagagtgagagtcagagaatattctcgattccagctcaaagtcttaagctcgacattccaacttgtttagttaaactttcagtaatttgtaagttcggcggttaacagtttcatgtaaacggccgtaacgttcagttgttgaaataaaatcttctattttgttgctattgtcttctcatcttgttaggttgggcttcaataccaacagattcgttgtattttgtattttctttcggcaccaacagattcgttgtattttatattttcttgtctacttcttttggaaatttgatgtcagaaaaataccatgtcgacgttgttttcgatttatttgattataataatataacttcgtagttagagaaaaaccacacacaaaatttttgtaggatttaaaacactacacaattttatttgtgtgtttttaacctcccaaatagggattttgacatttaacttgaatcataagtatgttctaaattccgccccaaaaaaagagagtatgttctaattaatcatgatgtatatataaatacgtatatatatcaaacgggaaatgtaactttattacttgttacttttaacctcccaaataaggagcttaactggcactttctttgaagtttaactgaatgtttctctaactttcacaaacataaaaacgtgaagcaatttaattccatctcgtttgagatatatacatgcatgatttagaacatacttaagttttctgcagtataacacgtagtatactagtatatgttgttgtgatgttttctagagaaatcgattttgttatgttcgcttttctattactgtatcttctttttgattggtcataaaaaacaaaacaaaaacatcatcccacctaattaattccctttgggtaacccgtaatccattcacaactcttcaatgataatcaatgcgtgaggaactgaaacacatcctttcgttactgactgatggttcaatcatcgatggatctattcgacaacccaattcaacggaatatatatatatatatatataatcacttacataaaacatagtaacaaccatccacagagtatattccaaacagagagtaggtaacataactagcatcaaatactcttttattacatcaataatttgcatgaaatcgttaattccgaagtctcagaagcatgcatccaggacacaacagcagcatatggcagcacaactgccaatagacaaaaccaaatttattaagtgttacgtaccattcttgtctaaggactagggaagatattggtttatatttgaaatagtaacattttctgaaaactttaaataaagaaaaagtattttagcaacgtacgtaatatcccatggtttaatttctttttagttgttcagttggtaaaacaaacttttagctgacaactctgaagttgaatttttatattatcttttgtcattgaaggggaaataaaatgtaagtcaagggtgaatttaaaacaaacaacaaaattgcaagaaattaaacactagttatcaactaaaatgttgggaaaaaaaacaaatcttgactagaaaatgttgacccaaattttaccaaaacatttgcagttcaaaaccaatagtttgattcgaattagatatactccataataattcaggaaaacagagaaacacacaagaaattgaaaccctatactgatagatcattaaaaataaaataagagcgtcgtatgaatatcttgcaaaacgaataattagaaccatcatgatctataatcacatgaagagattaaaatgaaagaaaaacataccatccttcggggttgacgcccttggagtttgtctccactgctgctgccggaggatcacccaccaccgcatctctagtcggataaccaattggtggcggacttgtgtacggccctgatgaagtctctgaaggtttttgcactgtgccaaaaaaaaaaaaaattatctagttggtgagtaaagaattattgttcatcatgattatacgttagacattgatcatgattttagaaaacaattgaagataattaccggaaaagtaattttgcgcggattgattcattctgatttgaggagctgaggagtgaggatgtgagatttgtgaagaggagagagtgttgtgcttctaatttataaggtagacgaatattaggaaattttttacattattcattatataaaagaaagaagagtcaatattgaacaataaaaacatctatcacagacaactcacggacagacctaccttagcgaagtggtaggtctaggttttttggttatatccaacacatatataattgcagagataaagcaaatgatattgtttgaaatgcacaagggcagaggaaagcgatacctatggttgagatgaaagtgagaaatggtttgttgcagaaatggctttcgtcacgtacatgacgtacacgtacatgacgtacacgtacatgacgtcgtaaaacatgaggaatttaacaaatttgaattattttgttcctggaatactctatgaatacctcataatatatgagtacctcataatatattattaatatttttatgtttaatttaagtagacaaacttatactaaaattgtgcttccattggtgagatactcttatgagtatctcattaccattaacatattattatatgttttcttatattaaatttaaaatctctacaatattttcaaacatatcaattattatttttacaaattatattattaaatagttttattatttttaaaaccataattaaacataattaaacattactttacatataaaatcataataaaaatatataaattaaacataaaattccatataaaaccatgataacataaattaaatagaaaaaaatatataaattacacagaaattacatataaaaccatgataacataaatcaaagctaactatattatctattatggttttactcttcatttgatgatgcaccaaactttgtcatatatgctcaactaggtcatcttttagttgttggtgcatatctctatcacgaagtcgaattcgattgccgagaatgttgtaaaataaaaatagaaaattttaaatgtttgttttctaattaaaaaaaactattgtatttataagttattattatgtttaatgcttaactaacaccaattaaataatatttgtatataatttaaaaatatacataatagagcttgttatagataatttaattttatgaattttaaaagtaaaaaataaaaaaaaataaaaaacatataaagtatttaattgatgttataaagtatagatgattttatttataacaaagaaaagaaattaatagcaaggtgacatgtggaagagagagaaagtttctctaagtttctcatttcagaaacgattctgagaaaaactgattaaaaaattattattttaatatttttgatttatttttgtttggagtttttcagtgagaaaccaccaatggaaatggtcttagaacctcttttttttttttttggtattgctctaaactctatataaattaaataacctcttttgatgattaattaatttaacatttcatgaaaatgaaaaagtgattaaccaactgcctttgaaccatgattaatagttttggctttgttccttatgttggtgtgatctgttaaactgcaaaggaaaacaactttataaacttaggtgttgtttatattattatatattgtattaaacttaggaataaaaaatcattacgtcatattttgttgctacgaattatgactagctatttttgttttttactttgatttatatagaaacaaaatagacgaagcaaatgggaatcatggatctctttcaaccagtgaagcaaataacatactgatgaatcctctattacgtatatgttgtttttctggtttgggcaaagtcttgagtctcatcatcctgaaaatcctgacgcgcagcacatgacacattcgccgcaaccctggatacaactgccaatagtgtaggcagacagatcattaaaagagagttgcacgtcggatgaacatcttgctaataattagagccaaactatctataaagaaagtaagttaaattagatatgtactgtaatattaacattacgacttcgcagcagcccttggaatttgtcttctctgctgctgccggaggatcacccaccgccttatctctggttggataaccgatcggcggacttgtgtccggtcctgatgcattctgtgaacgtttttgcactgtggccaaaaagattagttaattatctagcggtgtgtatagaataattgttcatgattatatgtggccaaaaagaatatacgtcggacattgatcatgattttagataataaatgaagaattaccagaagtgtgctcgagctgattcattctgatttgaggagctgaggaatgatggaagggagaaatatgaagtggagcgagtgttgtggacttaatttaaggaagacgtaccaccattttttaatttttcttacaaacatatacagaacagactcatcttagccaagtcgtataccaccactttttttttaatgtaactaagtcacaagtgattgtcgagtaacaaagaattgcggtgaaaaagtaaatgctattttgtgaaatgcaaaagggaagaggaaagcgacgaaaacggcctttttcaacctctattatttgttaaaagccttttcaacaaaaactctgatgtcctgcctttcttaatcagaatcaaaacaaaattcaaattgcaaatctaacctttatgaaaattagctgatttcaacatatctctagctcgaaccatgagttaattatggagttaaacacaagttttgatgatgaagaatcataaatattccataagtttttttaaaagcgtattgaaacctctggatccaaagtagtaggactcatcaaagtaggagtaaaagaaaaagagattttagccaatgtatcatttttgggtccaatggaatttttattctcatattaaaaaaaatattacaattccaaacagaaaaatgttaacttttggtgcgaattttttcagatataaaaaaaactttgatttcatcggttaattcaaaaatattttacttattcaataaagtactattcattttcaagctcaattaactgagacatagtaataaaataaaatatatttgaataaaataaaattgcaaaaagtcttttactatgaatctatgatcatatttatagtagaatatgcaataggaaatactttgttttatctaattaattcgaaacagaactatagttatgatatattatttcgatctcactagcctttttgatttttttttatcaccatatgctgtcatggtctaataaagaatcattctgattagttgttaattttgtgaaaagttcttgtgcaaaggataatatattaaatgatatgttcttaatttatatcgagtagacattgttttttcttttaattgaaagtattctaaattcataacttgtaaggagggacttatagtcaccaaaaacagagactaaggcaattattggattcaaagttgatgttaaaaccctttttggtattgtcaagtttttaaaatcttgataaataatatatcaaaacgaaaccttggagacgaggagtttaattttctttttagaattttaaaaaacaaatatacgtgatcgtgaaaacgtttacaatatatgtataacggctatattgcatattatatttaataggattattatgtaatttttaagagagaggtcaaaattgcaaaaaatgacgattttgaagttttttttcacaaaacccaaacttcaaaacaaaatgggatttagaatttaattttgttggtatcaccctggcaaatgtggagttatttttttcttattcaatgatggaatagtcatttcgaactcaactagctgaaaaataattttaaactgaaatgtatatgtataaaaaacaatttacaaaaacttttgctttagttctcatcgagaataggcaataggtttcttaaacatatttagtgtcaagagtgattttattaagattttaatatgaaatatttggatatataaaaagtcaaagataacgtaacgtgaataggaagtattagattgcgctatacatatgaaaaatatatactaaatgatgtatttggcgaatcaagcatcatggtctaatacagaatcattccgattgaatcattctgattgaatcattttgaatagttgttaattttgtgaaaattcatgtgaaaaggttaactaaatgatatattcttaatttatgtcgagtagaccttgttgtttcgttttactgcaagaattttaaatatatggcttgttgggagggacttatctcaccaaaacaaagactaaagcaaatgttggatacaaagctagtgtcgatgaagaaacgatatatgcggtagctgctgaatcttctactggaacatgggaaactaaagcgatggggcataccagcctggatcgtttcaaagatgatgctaccacatcaaacccgttttgggagaaaaaacctcaatttattgcaaatataataacttaccccttagatctttttgatgaatgtttggttactaccatgtatacctcgactgtgggtaatgtatttgggttcaaaaccatgtttgttttacgtctagaggatatgtgaatcccttctgcttatactaaaatgttccaaggaccatctcatggtatccaagttgaaagagacaaattgaacaagtactatctagaggatatgtgaatcccttctgcagttcataaacggcggttcaatcgtgttttacgatttgagattaaggttctcataggaccggttcgattttgtttaaattggttttgtttagttagatgctaagtaaaaaattgtatgaatctaaattcggaaatatcccaatagaccttatttataaaatactactatttgtacaccacatttttaccatatcgcatacaccgtcgggttaagatcaaataaaagaaaagtattatatatttgtaaaatatagcaaaattagactttttagattcagaaaaaaaattaaaagattaatatatattttatgataattatttaatgaagaatttataacaaaacaaactaaatatatataaataaagagaaaaagaaaaaaaaattatttttgtctttatttgactatatgacaaaacagcagaaggttataaaggtcattcactaaaatctctattagatagaaagttgtattagagaggaaagagaaaagtgtctattctccctatttctaaaaaaactacctattttgcaaattatttgtgaaaaaagtgtctagtttccaacttatctcaaaaaaaaaatacaccaaacaaatgcggataatggatcccttttaaataatgaagcaaataaacttaaaaatggaacgtgagaatccatacaagcgactaatatatatatatatatatatcttgagtcaagataacatattgatggatcttctattacgtgttgtttttctggtttgggcaaaggacttcagtctcatcatcctcctccgcagaagcagagcgcgatatggccacaacacaaaagaccactgccaatagtgtagacagacaacaaatcattaaaaagaaagttgaacgccggttgcgaataattagagccaaactataaacatataataataataaaaaagtaaactaaatgaaatatatatgtactgtaatacgacgtcgcagcaattgggctttttctccactgcttttgccggaggatcacccacccccttatctctggtcggataacccatcgtcggcggaggacttacgtacgtccctgattgtttttccactgtgcccaaaaagattatttaattgtctaattgctttgtgtagaataataactgttcatggttatgcatgcatggccaaaaagattagacgtcggacattaattgatc

SEQ ID NO: 62 - DNA, 47827 bp, Arabidopsis thaliana
atcctaatgaagctgtgaagaagagagaaagaacatttacgtttaaccaactcacggcgccatttcactacccgttttgcttagacatatacatctcgaaagagtctgtacgagcatgtgtgattcacagggtgactagtaaggttgtaactgtggctcattcgatttcaaaagacatgaaattcgatcttggttcgagaagaaacgttgcagcttgcgctgcggttggggcagttcttgctcaaagaagtttggaagatgacatacatgatgttatatacactcctaggaaaggagataaaattgaaggtaagcttcaggtcgtgcttcaagctcttattgacaatggtgttaatgttaaagtgaagcttaagcagaggaaacttaagaagaagactagtcatctaatgatggcctagaggactgaaattttctagtttgtaatatgggcccagaagatatgtttctgtgtggggcccaaaaaatgttatccgtttcatttctacgtttcttgtcgggtcaaagtgttgactttctaacaatgatatcatcgttttcttatacgtaacttctctgctcttccatagccgatcgacctttgttcacaattcccaccgatttttatttgctagatcgatatattttcaggtatgatgatatatatatcatggtttgtttattcatctggaaagtttttgatgcatcatgatcaggacaaagttggcgtgaaatgaaaagttttaaataagttttttttttttgttgttgttgtaaacctataatcagatgatgagatgatcctatattaatcgaatattttgattaattatacatgatatttaacaattgcattcatcttttttcttttgtgaaatctaagcagtgagcttgaaacatggcttcagtggctcctaaaatcgctaaagatgtaactgaagtaagtaacctccaagattatgtctttcttcaactatgtcttgtcagtaaatgttttttttttaattgatattttttattatttgggagcagctaatagggaacactccattagtgtatctaaacaaagtagctaaagattgtgttggtcatgttgctgctaagcttgagatgatggaaccatgttctagcgtcaaagacaggtgcttccgaaaagtttaaaagctctgttttctagtttctctgttagtgacaaaagaaacaaatacttgtactttgttcttttttgttgcaggattggttatagtatgattgctgatgcagaagctaaaggacttattaaaccgggagaggtctgtttttttttttaaatggaagctattagtcagattcttcatttgttagtttttgagatttttaacttttgagttttttctttagagtgtgttgattgagccaacaagtgggaacactggagttggtttagcatttactgcagctgcaaagggctataagcttgttataacaatgccagcttcaatgagtatagagagaagaatcattctcttagcttttggagctgagttgattcttactgatccggctaaaggtatgaaaggtgctgttgcaaaggcggaggagattttggcgaaaacacctaatggttatatgcttcaacagtttgagaatcctgctaatccaaaggtaattactatttagtttaagtgccttagtggatttgaagtcagatacttataacatagtattgtgttcattgcagatccattatgagactactggacctgagatatggaaaggttctggtggaaaagtggatggctttgtttctggtattggtactggtggtacctgaacaggtgctgggaagtatctcaaggaacagaacacaaacataaaggtgaatttcatttacttatacaatcagactctttcttagtaaactcaaaacttgtctcatttgttttctcatcttatagctgtatggtgtcgagcctgttgaaagccctattctgtccggtggaaagccaggtttgtcctcaataaggaactctttggcacactttttcttcttttactttgctcacatgttagtcttgagtgttcattatgaggtccttctaacttttggtgttcatatcaagattcattgaatttcagcctaacacattggtaaaaatgctcaggtccccacaaaattcaaggtataggtgctggttttattccaggcattttggatgttgatcttatagatgaagttgttcaggtaaggtttcataccaatatcatcttgctgactccaaaacacaccttacatttcttagttgcctcttatagttttgtaacgcttacgcaggtttcaagtgaagaatccattgacatggcaaggcttcttgctagggaagagggtctgttagtaagtgcttcacattttgcctcatcagatttttctgttaagccaaaaatgtcttgattcagctttatcctcaccattatgattcaaacctcaccatgaaaataaaaacaggtccttgatcgttatcacatttgtctcctcctatgtactgtaggtgggaatctcatctggagcagcagctactgcagcaatcaaacttgcaaagaggccagaaaatgctgggaagcttatagtggtacgttttttccaaagctaaagaacaaacagtgaactcatggaagcttaagagtcgatcttataataagagatgtgaaactgaatgtttcaggcggtgtttccgagtttcggggaaagatatctatcgactgtactgtttgatgcagcaaggaaagaggcagagactatgacctttgagccctgaatctgttcccctttcttcttggtgatacaaataaatgatctttcttccaacatatatatcttcagattctgtctgtatcttgtcatttgtgagaactcaaaagtagtttgtctgctactatgaacaatccatttctagaaagtttctggttgagtttttgctctctctatttgaaatcttgtgtgatcaaaaacagtgacgagaggacaactacatctactttataaatagccccaagcttggtacaatattttagtgatttggaattacaaacaaaaatattttctttatctcttgtagatcagattagacaatcaagaaagcatatccaaaaagcttttatccaatctacgatctgataacatatcaataaccatctttatggtggaagaatctgcagagaacccacacaccttcatttcttctatgagttcaactgaagagattagaccactacctccaagatgtgccctgataagaatgttgtacgtaaaatcatccggagtacacccatcctccttcatttttctaaacagcatatcggcttcagacaacgagcctttcttacatagtcctccaatcattacattgtatgtcacgacatcaggtttcactcctttgtcagagaggctacagaataaactccaagcatcatcgaccttactagcattgcacatcccgtgaatgatgatattatagataccaataccaagagtcatcctactcttctgcattttctcaaatatctccaatgctttatttagttcaccattgtcacacaaaccatccagcaaaataccataagttacaacacttggtggcacaccacgagaaaccatctcttggaagagttctttggcggcgttaagttttcccgattgacaaaaccctaggacaagagtgttataagtgattgtattaggaatcaatcctttcgaagaaatctcacgaaaaagtctcataccatcatcaactctcttagctttgcagtagctatttatgagaatactataagtcacgatgtcaggttcgcaccctttgctaaccatcagatcaaacatctgattagcctcatgtaagcaattctccttacaaaacccatcaattaatgaattatatgtaatggtgtcaggagctatacctcttgtgatcatctcattgtacaactctttagcctctagaagcttcccctctttcacaaaaacatcaatcaaagcactaaatgtgacaacatcgggaatgatattccttccaatcatctccctcaacatctttgcaccatcatcccatttaccgtcgttacaaagacctcctataagagaactatacgtaacaacatcagctttaatccctttcatctccatctcattgaaaaggctaagcgcatcgtcaaagctcccatctttacaaagactatcaataacaatactatactgaacaacactagctttgatatttctttcttccatctttctaaacaaatccaaagccaaagcagagttccctgacttacacagtctattcaaaaccggtccataagtaacctcatcaggttgaaaaccatactcaaccatcctatcaatcaaaaccaaagcttcagacactctaccctttagacaaagtccattgatcagagtgctaacggttacaagatccggtctttgcttcatttccaccatccgatcaactaacgcaaccgcttcagaaactctaccctcgaggcaaaacccgttaaccaaagtcgaaaacgtgattgtatcaggctcatacccaagcttccaagctctcccaagaacagaaaatgcgaaaagaagtttcttttttctacaatagcaattgatcataatggtcatagtatacatgtcatgctcaatcccattcaactccattcccttgcagaaacctaacactaaatcatactgtttcgttctagcaacagcactacacaatctattgaaatcgattggagtaggtaaaggacgagattgaatcatggattcgaagagatcaatagcatcattaaccttaatatcaacaatcccattccttaatctctctttataagaaagcttcgcttcggtgatactagaatagtgtaataaagaagtacctttctcaagaatctgagtaaagttcgaagcttttcgatttagaggaatcaatctctgtatcatcttcttcaatgaatgaatcgttggtcctttgtgctgtgtgagagagaagagaagaagaaggaaatgaaaattccggttttgattcattcatatatttaaacccggttcaatgttttgatttaaaaatcaaagcggttttaattgggaaaggtacgagttaaacccaaccttgtttcttcatcttcctcactctctgcgccgcgtttgcttccatcgttctctcgattgtttcctctcaagcgaagcttcttcttcttcgatcttcttcctcgtgtgtggattcgtttctgaaagtaagtatttttgttagttgttgatttttttttgtggttcaaatggtcttaagatttgtgtcgatatcgatctcggagtaaacagaatctagctctggaatcgtagaaattttcactgagacttcttagatcccaatcaagcttcgttaatgttagaaaattagcttagatcatggaatatatgtgttgagagttgatataagtagacgttgaaaccctagtttggagaaatagccctgattgttgaaaaggatgttaaattggttgttgttatcgtttctatgtttgagtctctgttgccatagtttgagattggagtattatgtaggagatgatacactgttagtgaactcatatacgtctactttgtggaatgttctgtgttggttgcttctacttgtataagtgtatttgatgctatgagactgatggattctgaaggataagctatgtcattggtttagatgtggctgttgtagtatttagatctatttgatggaaaagggcgtgattgttcgtgacaagatagtgatggaatgattgtaggattgatcttgatctggtaaaagccttatgcttcaccatgttttgtattttataacttctgagagaataatgaattaagtatgaatcattcttgaggtaagatagttctctgcattggttaagtgattagtattctttccaatgtgcttggaattgttttgtaacaattgtgtttttcggttcgtagttgtgtcagatgcaaatgtttctctgagtgttgttgtttgagtttctttattgatttactctcattttttgcttcaactatgcaattcgtgatttcttggatctaatttctgtagtaggatcgaagtaatggccagcaaatctggaagcggtggcctaagagaaccgccgaatgagcaagctgttttgaacatgtatgaaggcaagagatcagagctaagccaaatctactccaacataaccgacctcgagatgcaagtgagcgaacattctctggtcattaacgccattcagcctctcgaccaatcgaggaaatgcttccgcatgataggaggcgttcttgtcgaaagaaccatcaaagaggtactaccagctgtccaacgtaacaaggacggacttgaagaggttgtgaggaagctatacgagacattggagaaaaagaagaaagatcttacagagtttgaagctaagtataagatcaggataacgaaacaagaagataacaaggaaggaggtaacaagaaggaaggtaatgctcaaggtgttcttgttggagctgccagttcaagccagtaaaactctatatttggcagtttgttttactgttgtatctcttttttggatcttatggttaaaagccgtaaactttgctggaaaaaatcaacatgttttgaatgtcacaaaactagtagactggagaaatgccatatttatgtagatccgttgtgctagagaaagatttcaactttataaccggaaagtgaccatttttttacattatgactgaacttttttgaacaacagaaccaaaacatctccctctcgcaggatttttcatatatcagctctctcgttaagcctagcggcggcagtaatagaagccgctacaccaccagggtgagtagacaaattaggattgttcctcagctcagcgctcaccactccctctgcgtcctgcctggtcacagctttatctgcggctaacttcccggtcgcaccctaataagccatccggttcaaacacatttagacaatcttaaaactaaaacattaagacattgaagatgtttttaaaattggggtttaaccgccaaaacatcaatgagcttgattttatcctcatcacggtctatggtagcgttgtgatttgctgctgattgagcagaagcggcgattccaccaggagcaatcacattagtgccacaagctctaacctctgccgcttgaatcgctgctgcgtcgctttgatccaccggtttgtttccagcggtttgcacagtcgcttccaatgcttctccaatcgttattgcactttgtaaactcaaacccacaacttctgcttccatagctgccgcagtcgccactggcctaggctcgacgtattgtccaacgacctatgacaaatatatcttcaccattataaaacatgatcgtaagaaaaaagatgtaattctggatttgagttatgacctgtccaccgacgaattctgttgtgacacgtgcaccagggacgtcagtttgcgccactgtgacgcctcgttcagcggcgagatcagttgtgtcacctggatggacaaagccaccgcgtttattagcagtggctgcagactgcatgactgccgctgcaccgcctttctgagtgtggccaaacacacgtgtctccgctgcttgcatcatgtttgcatcctccggcgctataggcttatcagcgagttcaccggagacttcaaaaacgtcaccgtaagtgactggctcttgtggccgctttggttgttcttcttgactcatctctctgttttgttatgttatgttccgttttgtgttacatacaaaagtgacaacaactcctataaagataagagaggtgcatgagtgtgagagcaacattatgagattttgacacttgtcattttgtcaatgacgtgactaagaggcaggtgtcagtttccaagtttatagcaaccttagcaagatgatgattcagaccgactgagatagagttttgtcatttaggtttaaatacttttttccatgtttcgtacaacattggccacgtttcaatattgagacaacataacaacaatgagcaaagctgttctgaacatttctgaagccatgagatgagagctaatacatacctactccaacatggcaacatatataatataactgaactcgaggtgcaagtgagcgaatactctctggtcatcaacgccattaaacctttcaaccaatcgaggaaatgctcctgcatgagaggaggctaggcgttggtcgagagaaccgtcagagacgtactcccacatgtgcaacgcataaaggaagggatcgaagagtttgtgaagaagctatatatccgagacattggacaagaagaagaaagatcgtacagaatctgaagctaagtataaccatcaggataaggaagcaggatgataacaaggaagagggtaataagaaggaaggtaatgctcaaggtgttccagtaaaaacgctcttctcttttggatttttgttttactgttgtatctgtatttgtggttttttttggttaaaactcagatatttttaattgtcacaaaccccattggactggaggaatatcccatttatatagatcagtagtggtaagtgttaactctcttaggaattattagttcaaagcaaatcagctaaagaatggattttaacttcaaactaaaaagtccccattattcattccaacatcatccttgggaagtttttaagcagtaagatacaaaaaagaacaaaaaagctagtcgattaaatgtcacaagcttgtgaacaccatcctctccccgccggattttctaacatatcggctaaaggaccaaaagctgtagacgattttacataacaagtttcctaagttgtgaaagagagacgaacaaacaaacaaacaaacaaaaaaaagaaagatcatcgatcctctcgccggatttgtcttgtcatatatcaactctctcgttaagcctagcagcgacggtaagagaagccgctacaccaccagggtgagtacacaatttagggttattcctcatctctgcgctcaccactccctcggcatcttccctcgtcacagctctgtctgccgataacttccctgctgcaccctatataattcattcggttcgaaaacatttagccactactttaaaaggaaaacatcaaaaacattgatgaaaatgttttgaaaattagggtttaaccgtcaaaacatcacgaagcttgattttcctctcgtcacgatctacggtagcgttgtgatccgctgcagattgagctgaagcggcgactccagctagagcaatgacgttggtaccggaagctctcatctctgccgcttgaatcgctgcggcgtcgctttgatccacaggtttgtttccagctgtcttcacagttgcttccagtgcttctccaatcgttattgtactttgcaaagcttcttcgtccgtacgcgcagcagcgactacacgcctcggttcaacgtgttgtccaacgacctaaagcttcaccattactccaaaacaaaaaacggatatatgaaaagaagtactagtacttttcgaaacaacttgtgacctgtccaccgacgaattcggttgtgacagttgcagcagggaccgtttgctccactgtggcgcctcgttcagcgacaagctcagttttgtcatctggatggacaaagccaccgcgtatattggtggtggctgcagattgcatgaccgcagctggaccgcctttctgagtatggccgaacacatgtgtctccgcggattgcatcatctttgcatcctcaggtgctatgggcttatcagcgagttcaccggagacttcaaaaacgtccccgtatttgactggctctcttggcctccttggttgctcttggctcatctttgttttgttacgttaatgttctgttacaaactacgataactcctacctgaattgagtgtctattatataaagagaggtgcatgagtatgggatcaacgttctgagattttgacacttactcgtagatgaggtgactaggacactcgtgtcagtttgcgagtttgtagctaaaaagataaagcttagattgagatagggattttacttttctttttgtaaatttgtcatttagttttaagagtgaatgaaaaaggacatgtttccaacgttaccacatatgagtcgtataacattggacacgtttgtttcaatatttgtttttgttcttgtagacacgtttcaattttaagacaaacataacagaaaagtcaaatgttggaaacaaaggtcaccaatatgtcggaagtcaaataacaaatctttgtcggtctaacaaaactcataaacttcccctaactcttcggatctctctagatccttgtttttcgttgccttaattatctttctcttctcttatttcatgttagaaaacagagtatacaacagaaaacacaatcgtttatttttgttctctgtgttcccatacacaaaatcttccagcttctgtttctccgttttgttcaacggagttacaaagcggaagaacctttgccttcggcctgaaagaccaaagatatgggaactggtggaataacgtccaacgctcacgtggtctctcccacgtggcatcacaagcacgtgcctcctatggatgacgactctgttcttcaaagagacatcggagagcttctttcacggtggggcgggcttcaaatggccgtaaagaaccagtggggaggccatgattctctcaagaaatctcaagagctagctcacaatctttttcatctcatctctcaatcaaatggttcgattttctttttacttctttagattttatgttatgatcatgaatatattgatagtttgattccaacattatgatatgagcagtgattacggtggaagaaatagagaatttgctacatgaaagcttgcttctttctttcaacacagagattgaagatggcagcattgaagaggtacgtactatttcttgaaaatgtagacgatcaatttacttgtgaattatgtcgactaatctttcatcgtgtgatttcgtcaggtagctgaacaattgatgatactccatgaagaacatttacgtgggactctttaagcagtagcttgaacgatttatatcatttttggtgtataattagatcaatgtaagatacaaagaattgaaaattgggtggacaacaaaatattattcatcagaaatcatagaatataggaatacgtatcaaaatctatgtttatttgatgtaatcattttgtagttgtgatgaacagtttttcctaatgtaatttcaaattaaccagtaagacactccatcatgattaatgtggggaatatggaccgagtgaccgataccacgtagaaaatatatatctaaattttccaatataatgcaacaaaattcatattgaagcaaaaactccatgtaatttggattcttgacaattttattatggtcaaatcatgtgtgtaatatgcaaataaaaactagagagatggcaataacatcattagtatgaaccactaggctataaattggtcaaagtagaaatggtgcaaatgaaagactaatttacgtgagtgcgattacggtaaaatcggtcattaaagacaaaaagacttaccgtacaacaagtcatttacatgaaaaccaaaaaaaaaaaaaaaaaaccctccaaaaagggattgtccaacataagggcacaatagtcaatttcaagcgattcctcgtttattcgtgtttcatcttgatctcagctagaggaggaactaaaccacatctacagagtcagaaaataaaaagtagaagaagcagaagcgagagtgcaaaaaggttagatctgctttcaaaattgttcgtactgcttctttaccacataaagttcatagctttttacgtttctaccgataattttgcattccgaattctccattttctcaattttgcttaaatgggtgtttctcttctgcaggaaattaggttttgagtggtcatgtctgctcctatctattctccgatagatatgcaagagattgttcaaaatcctcctgggtaattcttcttttctgataactatgttataaatgtgaacaaaaacttgttttgtctctggtttgttttggttatcctgtgtctgaatctttgctttgatttcttgaacaacttagaccttttgatgggtttatgtccggaaatgagaccaaattagtgtttagctgatatctgttcaaaattctgacctaagcacaaaaagttcttgagtttagatgagagaagattaaattgtttagaggaacatttttgtctttgggaattgtgtgaaacttacgttgagcaaaagttagggttcttattctaattgctgctaccataaaggatgtgtctttagggtttgaagtctccatattttgttattcattatgcctgagtatgcttgtttcaacactacggtataatgaagtgtataatacattgtttgtctacatgttttaatggtgctacggagaaggcaaatgatttgtgtttgttgtttgttttgtttatcacacttctctttcatcttctctagtgttgatttgcatgcaggtttgatacggaaccagtcccaatcagtacttaccgagacaatgaacctgtcccgctttcaacttaccgagaaaatgattcagatcatctcgacgccactcagcaagagaacgatgacttttgggaaaacggtttcagtagggaagaggccattgaagatccagagccttctcaggcaaaggaaaatggaaagagaagtgtagacaacagcgctttcactcatggggaaactgatctcaatcaacttcctgcgattcctccggtttcaactggtcaaggtttgccgtatgcccctgttgattggccaagccctggtgatgtatggacttggagagttgggaggagagtgactgctatggggtatcatcaggataggtttcttattctccctcaaaggcttcagcaaaagcatgtcccaaagtctttcgcaagcaaaccccaacttgctcgttatctcgaatcggatttccctggcatggatgctgatgcattctttgcttcttttagctggaaggttccagctctcttccagcctgcaaataaaggtgattttatagctttccaagagaggttaagattttgcagatgttcatagatgaacgtaatcagtgatatcattactcttttgtagttgatgctgcgtctctttttgaggagacaccgaaggaagtacagactgaggttggccagaatgatgagaatgctcaggatgggaaaggaaattctcgatacagccaaaggaagagaaagccaatgccgacgccacaaacttatgaacctgttgaagcgaaaccaaaatcaactccccgaggtagcagcaacaagaagaagaaaggagccacaactccggctactggacctcaatcctctaccaaaccaaaaccatctcgacaatcaggaagacgtacctcgatccagcagcgcggtggtgctgtggacttgaacttcctgaatgaggaggagagtgaacctgctactgcaccaaagactagtaacaagagaaagaagcgtggagttaactatgaggaagaagatgtttctattccccatatttatgtctctcctatgaatggggtcctcgctgtctcacactcgcctatcgatgttaacccggaagagtttgatagctatctgaactctcttgataacttgatgcagcaacctccagaagaggttgggcgagactcgtctgttcttgttagtgtaagctctccaatgagagaatacgaatgggctgaagcccgaatgaagatctcatctctcctggagaaggattttactactttgttcctctccaaggacgcagcagagatagcagcattagcaactaaactaaggaaagatccaaaccttactgctgaagagatagttaggttgaagctgatggaagagattccgaccttcagcgaagtgttccaagagaacaaaggggtgattgaagaagcagataggttcttctctgctctggaactcaacaaagccaaggtagcatcgcttaaatacgaatacagcgacctgaaggaaaaactaggaagtatccaaatggaagtagacacaaactctgagacaatccgtcaaatcgatgaccaaatcgctcaacttcaagccagacggtctgaattgaagcggtacatcgggaccaaggagaaagagagggttgatctaagctatggtcaaaaaatggtagcgaactcaatcccgaaagtcgtacaggaagttcaatcagctaatttgaagaagcctgaatgggaatgcaagaaagacaatgcgcttaaacgtgaagcagagatcctctctaaattcactcctctcaaaggcttcttcctctaaatctagcctcctcatgtatccccgataacctttagctagtcttgttgtgtcatgtagctttttggtttatgttgcaagagtcttgaaacctattttagacttggccttttgtctatttcatgtaatgttgtactatggaaactatccgttagttgatgaaaagaattagacctttttgtgctttcgttatcttgtttgatacaaccttaaacaacccttgttgatcttacaaaataagagatcatcaaagattcaatcttttcttttattgccaacaacaaaaacagaaggctacacaatatcaacgaaacgaagaagattagagattagtcttcttctcatgttacatagaggacattactttgattcactgaacaagcacaagccttccactaccaataccttgtccaaaatcaccaccaccaccatcatcatcttcttcttcagcattcttaggcacagtaacaatcaaatcaccatcaacacaagcaacagtaacaagctcaggcctagttgattccggtaacctaaaacgccacacgtcaagctctaattcgtctaaagacaaaccaagagaagaagacccatttgtcctcacaacgatcttggttataccaggatgaatctcaaccatataagccctcatttctccatcgccgttacagagacctaccgtctccgccacaaatcgaaaacagtcgtgtctctcttccactgctacatctgcttctgacctcaatggtagctccagaacacggttgaagatatgtggtaatcgtcggagattctttccgggttctcgggtcgggttatgatgatgatgatggatcaatgtgttgttgatgtttctgggaattgggtgcactctcatagcttctgggtttggtttatcgatcgattggatcaaattcagtaacaagagatatgagaaaagtgattgaatctttacgggaatcaaaatcataaaaaacacgagagaaccctaaaacacaaatcagcaaaatgttagatttttgtaatcaaaatctgtatttgggattggatttaaacggattaaagagattagaaagtgaaagaggaaagctttattaggaggatttgaagcaatggaagagacaagaaaagattgcgtctttccttttttatgaatgggtgcgaaggcggtagcaagaagaaggaggatcggaaatgagataagggcatttgaaaatttaccaaactacccctctttttaattgtattttgttacatcttcagttttaatttcaaagttggattatgcgatttatttcggggaaaatgtcaaaaaaagcgcgaactttcaaatttgggacgaaaaaagcatgaactttcgaaatgtcatttaattcacaaagtttcgtttgacttttttaaaaaaatgtcaagtttcgttgacttgaccattttgggcacgtcgttaaatttccgttaacagcgttaattttctattaaaaaattctgttaaatcgaaacgacgtcgtttttagatctccaaaacgacgtcgtttcattagaaaataatgatgcaaaatctgcgtccacaaagactcgaacatatgacctactggactcatatggggcaatataccgctgagttacgacaataatttacaataataacaaacattgcatacatatactaacaaatataatatactattaattaaaaatatatgcaataaattaaaaataacaaaattaaaaaaaaaactaaaaatattaaataaacttaccttaatatattttaaatttcaaatatttaattatatatataaagacatcttctatatttgaaaaattatagatctctctagaattcacataagtctttgcaattgtatttttggaatagataaaaactgaaaaactgaaaattgaaaataatttgcataagtcttttctattgtattttttatatttagaatacagaaaaattgaaaactaaaaataatttctcaaatataaaaaacatctatatagaaaattaatatttcaaatttcaaaatatatatgtatggtaggtatatttaaaaactttgtatatatttgttttttgtagttttgtaatttataatttattgtatatattttcaagtgattgtgtagttttatttgttagtatatatatgctatgtttgtttttttatctaactgttctcgtagctcagcggtagattatcctttaggagtccaataggtcagatgttcgatttcatgtgaatgcggatttagcatcattattttctaacgaaacgacgtcgttttggaagctccaaaacgatgtttcaaaacgacgtcgtttcgatttaacagaaatttttaacagaaggttaaccccgttaacgaaaatttaacgacgtgcccaaaatgaccaagtcaacgaaacttgacaatttttttaaaaagtcaaacgaaactttgtgatttaaatgacaattcgaaagttcatgtttttttcatcccaaatttgaaagttcgcgcattttttgacatttttcccgatttatttctataacttatgaaattttgattgaggtctccaaagtaacatttaaaataatgtgattctgaaactatcaaggtaagtaggttttaaaaataaattacgattattatgttacaagattttatttgtagctatgagtataagcttcaactagattttaaccagcggtacaccgcgggaacaatttattttttaaattaatatatataaaagtttgtaaattgtatatatttacaaaaaaattttattttatagtttacaattgttattaagtaacgtcctgccaaacccgtcccgccaacccgtcctctaaaaaaaactcatttattttattaatgttgatcttatttatgatatgtttatgaattattgtctaaatattttgtaattttgtagtaattaaatgctatcaaatatctctacggtttgatgattataatcatgtagaaaagcaatatcaaaaatgataattttgtagtaattaaataatattaaatattttggaagttttattttagtaattaatcgtgaagttaaggtagagagattttgggaaaattgttaaatgtcaaatatttaattagaagattttctttctaattatcaaaaacaattattaaatgtcagtggcagccgctgtaaataaatctcaaatctagaatttatttcacaaagtgactgcaaaaatgtatatatagatgtcatatcataaccaaaattaaaattataaatggtgaaaaaagtttattttgtatacctgttataatatcattgcaaatatattctgagtgatatttactttgaaagtaaaataacggaaatgagattatatctaaacttgatacactagtaattactagtatttgaaaatagcatatatgatccttaactattgttacgtagaaaaataataagaccaaatgtgtagaccaagtaggcatatgtatattgttactcgattggtaggatccttgaagttttcctatgaacttatagtaacgaacaaacattgtgattatgactgtgataactgattgatatgtgttagaagaaaaagttttaggaaatgtacttatgtaggacatgtgtatttaggaaaatggaatctgaacaagtgctgctttaaagaaaattaaaaaaaggtgaaaaagttttcaataattaataatctttaatttgtagaaagatagcaaaagaacctttttcttgttaaactttattgactacaaatgttatattctttgagtcatttttgtaacatgtttcaaatatgcatctacatatacatttttgcagttattttgtgaaataaatcttggagttggaacttatttacaatgggatgccactgaatctattactttaaatttaattgtggaaattataactaccaaatatgaatttaatttcagaaatattaaccaaaaacgattgttaccaaatatctaaaccaatccctttagatagcaaaacaattaaattccttatttcttatctaaccaataatattaacgaaatcttaaatccatatattatgagaatcatttaaagcaaccttttaaattgactcaaactatatatcttttaaataaaaatataattaaaaagaaaataacaaaataatgttaaatttctcgggacaaagttatatcgtagatcgggtttgggtcgatattaaaacggaacgatataccacagatgaaattctaaaattaaggattaaatcacaattatatataatcttaaaaagttaacaaaataaacaaccttaacaaaacatatataacttaaaatttaaatttttagttgtgaaaaatcgagtatgaccatattgacgaaaaatatgtgggttcaacgtctcatatcgaatatatgtgtagaatcatatcattagtaagatcaacattaataaaataaatgagttttttagcggaacgggtttgacgggacgttataaaatattaatatttgcaaactttttatatacattctaatttgcggtaaaaaataatatatattaactttaaaaaacaaatcgtctggcagtgtactaagggtaaaaactccaattacataatctattattcaattatacaaaatatttttaatatataatttttagaaaaaaaaaactatctccgcggtgtaccgcgggtcaaaatctagttaaggtttaaattagtatattaattgatggtaaaagtactgttatttgtaataatacgcagttaagtgagtttttattcccataaataaagaaaagttcttcttatataatgaagagtacccacataaaggtgttgcattagcgtcgtgcaaatttcttatatttagagagaaaaacgcagcttataaaatcaacataatagtggacataatgtaattgcatacgtacggaagatagagacatcaaaatgtttggtagtaataaattggggaaaaatagacgcaacaaaacttctttggtctttcctaatgagaagatttcaaggaatattttgctttttgtgaaccaaactgattctcttttcctttcatcgatttgtatccattagattatcaatttggccacatgtataaatttggtttttggttttctttcacccaaattttaagaaggtttctatttcacacaaatatttatacttctcttatatacccctaaaactgatagaaattttatgcctgttttataactaacttcaattcatcgtaaaaatatttgggaattttagagaaacacttttattggttttttgagttttatttattctttaaaagatttgtatcattagtattggttctattggatgtaacctgaagacaaaatatgtcacggtctcacggaccaaatattatttatactagctatagtcataaaatcttggatatgatgaagtgacacggaaaaaaatccaaatgttgacatatgtgtgaacagaagaatatttatatagtctaaatttccgattttatttgtgtaccttacgtgttataagtcgaatagaaaactttaaattatgtaagtgttaacattatagtgatgtttgcactggatcaaaaaatcagttaacgttaaaatatatctaatttatgattatcaatatgttatcagttaaaagtaaatatgacataaaagtttcaatggcaatagctggtgtgaataaaaagtagaataaaaaacattcgatggatatttgatgaagtctcttccagagtttcagtttttgaagtccatttgatggagctcttaattaggcctctatttgatgagttcagttacatttgtgatcacttataatagacatttgtttagatgaacccaaagcccattctcagcccaacttaaaaggtttaccgttaagaacttatgattactatgactggtttgagctctatgccaattctgacgctggcaccctctgccgttataggtggtatggagatttacggggttatatagttacgctcggtgctctatccgatgcagttgtggagacttactggtctgatggaaatgtggaaattttgtggcaaaatattcaatgaaattacagcaaacgatgatatggtcgaagggtataaaatcagaaaagtgtactttcaatgtggtcttgtagaacctccgactatatatatatgaccaaattgagaggaattttgttttttttcaatcgagaggactaagtgtataatcatcttttttctatatgagtgtgtaatcatcttcaagaagcgctagagacgtttgaggaaatgacgaatgtaataatttgtgtggagaaagagacggattaaagaacttgtcaatgagtatagaatccatcgaagaccaacatatgaaaaatgtcattaaaatttggcagcgttagtaactgatataatagctagccatccaaatgcataaagttttcagaattacgagttcgataacttaacatgttatggtctctactctctaacccgaaaaatggttttcttggttaccaaacaaataacataacatgaaaatattgagctcaattcacaagttaaaaatgacgacaagatattctcaacaatggctagtgaattttgagatcatggtttcctcctggataattttgaccatgttaatagcttaagagaagaatcaatgtgtcatgtgtggaaactaaatgacaagtctgtttgaaattaattgattagttatataacatatcaccgaccattatttatgacattaattaaacaaaacaaggaagaaagaagcatcaaatattatacattaagtaattagcgaaatagaagaaaaatggatcagtacaacttggtggtgttagatctaccaaacttcttggacgtagaggaattcgtcaactcaccggacctcctccgtagcatctgcctcataccatcagcgacatgaaccgccggattatcttttttaaacttgccacaaaacgacacgtgggccttgacggcttcatcaactgtggtcatcttccggcgactcacttcgtccctcacggcttcggagcagagaccacagagccacttgttgtcgaagttagatttgacctcactaatgtagtcttgtgtgcaatcttccattaacccacaacactcacatctcacggattcgatctccattttcactaaagaagcctataagcttcaatgcaaacaaacaacaaaaaatgttttttttttttggttgatggagaatggttttatgttgtgggtaacgaaaacaccaagttaatgctttatatgttgcattttttggccggctctcgacactttcaataattaatataatactctagatggatgtgtataattgggcagatagagtaataaatctaacggttacattcgtttttttctcaaataatataaactatatgtatttagtaacaaaacgatgacaactaacacaaataaaaaagggcagtcatgaatttattttctttcctttttgggcggtcgtaaatttttttctttcttttttggacggtcgtaaaaactgtatagtttttttaattgactgattaatatataaaagttaataaaatactgagtatatgaaaatatttctatagtctaaaacctatatgaatcattgaatctcaatctatgtgtagatctctaatcaatcaccggtgttgtcagataaatttatcgtgggttcagtaacctattacgtagccatgttcggacattatggtgtctcaatggcaatggaggaaaacgaatttggcgaaaaatctatgggcgctttttaaaatcaaatgtgtttacaagttacaatgttacattttcgtatgtttttgtttttcttatgagttataatatgggtttataaaagcagtcattaccaaaaacttataaaagttataaatatgaagaagattagaaagaattagccaaaaaaaaagaaaaaagagagagggtagaggagttgccataatttgctccatgttctaagggacatgagatggtggaaatagagacaaaggtggttggatttaggagggtccctcacctacccaattataccacacttctctcaatctcctccaaaattgttatatccacacacacacatacatatgattcttaccattatctatctatatataaacaacacatatacatgaaatatcttcgtatatatgcttttattgttagttttcttgctttatcgtgtatattcaaagtagaatttgttcgggttatgacttatgagatagttgtttttgcttataaagttataatcactaagcttggagttttttttctttttcttttgagaatgtttcttgccgaattaacaagataaattgtcgctgaatgatatatacaaatgtggtgtctgaaataaaaggaaaaatgtggtttttgatttactacgtacgtaaatctaaacgtagtcttctaaatacatacatatgaatatgaaattcccataacgttcaaactttaaagatgggtcggcttaaagatccaagcacactcgtccccaaaagaaggaacaataattaaggcctatgagtcttctagccacacacaaaaaaaaaaaaagatgttctaaaagctaataatgtagtagtatcattactgtatcaaacaaaagttgttaaaacaaagaaaaattagataaaactaatctgcctatcttactcccactttttcgaatatatcattattttagacctagaaacgtattgagaaaaatttattatttatttaatgttaaataatttctaatctaaagttaaataatactacataattagaaaaatatatacacaaggtggtctgtggttaaaggttttgtcttggagtatagataatttattcaatggcatactctcgaggcataaactgtgggcagttaaagttttgttgtaataaataaaaaaagaaaagaaaaaggagaaattgaatgcaatgtagggttagttaatttcagttaccctatttgtcatgtcttctctcgacagttgcttgactaagcttgtgactgactttcggccatagatttgtctatatttgccatgtcatcatgcaccactaatgtatactaaaacaaacacatcacatataagtttgcatcatatttatttttgatatgcttgctaacaacattaatacttataggagtttgtattttgtaagccgttccatgtcaaatgggtgttttgaaaattcatttaggattcatgtcaagtgggcttcataagaatggataatacatgtaaataatataagatatatttacagaaaacatacaacatatctaagaaactacttgagcattttttcccttaaacaaatataaagcatttgagaataagatgcaacaagaagagttacaagacatgagcatgagcgttacttccgacgttttctttcaataatgctgacaacttttttctccatgcattgaccacttttctgaatcatatttccataatgctttgttattatataatagtattactctataaaccttataatgttttatcaagtggttgaacaatgaattaaaggttttaagactaaatttaggcttcaaactcataagtatgcatgggggtttccattttttttcattagtttcttagaagtttcaaaacatgtatcgtgctaattgaggttaagttcatttatatgtggatagctaggttttgactatggaagatagtaaaatcactatttgtaatcatgtaaacaccttttaacgaattacggtgtaatttatgataaaggagaaaaacagaaccaaaaaaggttttcttagtcaaaatcggtgaaagaaatttacgtggcaactcaagccctgatattaagctagcttttgacttaatgattcttctagcaagttaaaaatttattagtcacaatatgtaagcttagccgaaaataaagatggatacaatgttcaaaatcaaaacaggattagtaattatatatatgaagaaacaaatagaactgaaaccataaaagctcactgcagcctgcagtggccagtgagtataatagagaaccaagaatggctacggtcggacaataggagctctatgaagactgaagaggctttgtttcaaatactgaggttaacactcttgaatatttggcttcgagttcacctagagggagtgtgggtcatgtagttttgtaaatggtggactgtcatatatagaaaaaggatgatgcatgtataaagtattttatgaattaacacaacattagattttgcatcatgtaattatctttttccccatgcttagacttttctctctttctttcttcattgctttttgtttgtcaatgatgtgctcttaaattacttgaagaaaaagtaagccaccaatgattatgaggacgaacatattctacatttttgtagccatgctcgtgtgggtttggtttcgagttactttcaagaatcatgtcactaactttaatttcatgtacacaatcatatcgacctatatagagttttacttcacacgcataacaaaatcttaactattgattaacaaagtttttatatattctctccgttttaagactttattcttttttcataaagaatgtcgttttgtatttacagtatagtgtttaacataaatcttaattttatccctagtatttcgcttacttaactagaaagtgcaaggttttggtgtatttataaacattataatagatttcgtaactaatactatcgatgtaaccgtatcaattaaaatgtggatgtattcagcttttatgatcgccataaacgtataaatagtggactatagaaaatcatttgaagttaataagtcagccatatatacacacataccaatttattgatgagaaaagttggatatctaatccaatcaatctataatgtgattggttgtggtggcaacataaatcaactttgttggattggtacgaatatatgctagaagaattttttttctaaaaatggccccaatattttagtctgttcataattaagaacatcattagtatctagttgactaattaaaccttcaaacttgactcattcaatcaaccactcaacgtgaatcatataatgattctcatccacaatatttaatactataatatacatagttgcctgccatggccaagttggtctttcttacatatattctccgaaaattgaaatcaagctcaataattgaagaaacataattaaagaaaagaaaagattgcaaatgattatagctttggccaatataaatgatgatctagtaaagtcatattaattacattaacaaacaaaagtcagaatcagttcttattattaggagataaatactatataagagattaggaacataaagtaaatagatcaaaggtgtacatttgagattagatcatatagttatacactcactgtcagaggttaaagtcgagtgacatataatcttataatggtgtagatattgaatgctatatatatatatatgtcctcctcttgtataattacatgaaaatgttatataaaaacgataataccatgaatcacacaaccaattaaaagcgatatgaatcttgtgaatgaaacaagagtcagctatagttgccatgtgtgcatatgagaccaacgatgttttagtaaagggccatacctatatgcatgtggggatgcctataaacccaactagataattaaaataataataaaaagatcaccatagaactgatacagggaatatagaaatttatattttggattcttttgtgtgtgactagtaaaaatcttgagacataaaagcaaaattagtatgtgtagaaaaattgattggtggatacaagaacaggtttcatatgtccaataggttcattgggttccgttcaacctctcgaccttgtagcaaaatggaaatgcttgtcctacccatcacatgtctcattcatgtatatatgtcctaaaatggataataatcaaattgtgggatatcttgataacaaaaaaaaaaaaaaaaagaatggtaaatcacatatgctagtttgttttcggttacatgttttgtctgaacaaaatgtctaaccaaagaaagaaaacctcagttataaatatatgtttgacaattttgtataaattcattatcatcatcaacctgttcgggcatgcatgtgatttgataattaatacaatgacgctttgattggagttttgacaaaattagcggaacagagaagcctttacttattgacctaattgagctaatattcatttttttttttgttaagtaacttttgtttactattttttatgaagtataagattcaattaatggtcgcatgttaagtagtagccagaaataaaattttcacgtgtacatgtatgcataatgcatgtgggtttgtctttgttacccctcgaatttgtttatttgattttgttttcgatatgctataaaatatggtgtccattcaaaatactactaagcaaatttgcacttatataaacgtggtttggttgggattaatcatgcacctttccaatgatcagataacactataatagtaatatatatatataaaaggactaaaattgcctttgtaaactcttatcctagagctttctcgcacatctcattctttctcgagttttgacaagctttcatttgaagattttgtgaacccggattaaagtcatgggtcacattaactgagtgatctacatccgcgattagcctagtcggacttggctgatatgatagtgaaaaacttgagttaaagacatggaagctttagagaattttgaattacttcatcatatgtatctatacagtttttaccaaatggattgttcaccggaactgtaatgaaaaatgtactaattacgaacctctcaaaatacaatcaagcctccactcgtaggacaaattgtcaaagagagaattttatctggcccaccacgtgtattagccaatcacgccgccgctcgtaggcccataagctgacttcaaagttggattttgtaagacttcatgggtccgacttttacgagttgcggacttgcgggaacataaactagtaaactattcctaagcatataacaagtaataagtgttatctgtgtctatgtaggttaagtgcatggaaatacaatctagttgatatgtgttcaactaaataaatcaatgatagtagaaataccaatcgtaaccataccaattgcttagcttcaaacataataataacgaaatccactatatatagaacttcggtttagtatggtttgtttgtggattgaaccagaccgtttaagagcgcaattcatgttatatataaaagtcagtcgaaaataagaatgattgaaacgggctcgggctttacttaaatcatgatccagaatgttaaaaatctgacccttaacaggcttaagcttttgaatatatatattttttttttgtcaactaagctttcaaaattgctttaaatttgtttataattggagtggtgaggatcttatacaaattttaatggttaacataatgtacctcactaatttatatcattttttggaaaaaataatcagagtttttaatgttgacaacgaaacggtgtcagtcattcttgtataattattatctcaaataaaattcaatgtgctcatttaagatagtcactcaagtaagacataaattattaggattttgatgtatcaattcaaattagatgagggctatataatagtgtaatgctcttcgaaatagtactacaagttgtttatatcacattgtctcttagataaagaaaaaacaaaagaaggatgtgaaaacacatagagcttcttgatctataacatcatttccacgtaactagccattgaatatcctcaatgtgacatatctttgcaactgtcttttacattgttcgattgtcatttcattgtttgttatcttcttcatatcaaaacatagttacttatagtaagaaaatcatacatgcatctatagctcggtgactagttagtaatctaaggagattttcaaatcacgatttcaaacattgaagacgagaaatagactaatttacatgtccgagtatcaaaacacgaaactaagaattatgtgtcttctccttcttgaattttgatgctcgtgttttagttttctgtcttgacaccgcaaatggaattgagttattgtgatctctactgtttattaaagattaaaagtaaccattaaagtaaaacatgtatatatgattatgcatgtagacacataatacacatagataccgataccaaactcttctccaaaccaaaacaaaagcaactaaacaaaattcaccatatctaacgttttattaatcatagtcattatcataactttttttttatatatagctcaaataaaaacttatttcatttagtatcattttcctctgacatcatcatctctatggacctgcattcactgctacagaaagctctatctcccctgcaaattaaaatcaaaacaaaaattacttatttatttatttttaaaaattattaattaaaaaattaaattaattagccattctaaatattaattttctcataatttatattaaatttcacattgtaaatgtcaccatttaattgaaatgtaaaaatatgaaaataagccaaacctgtacatgaaaatgtcatcacgaggcccaagactcttcttacagttacagcaacaactgagaaaactgtcgggtggggaataatccgaatccgattcattaaccgggtcggagctccggaagaaaacgacgccgggttggctctcaacgatacagttatcgaatatatgaatggttctcgggttaggcccgtgacacgtcacgcatgtgtaatcctccgataactccatatcgctcgccgggaaatagccggagatgattctgggagacccaagacccgactcggaacccggtttcttcgtctccggttgagaattcctcgttttgatcccgaaatccgacgaggaaatcggagaatccgggacccggatccgaagctgagacccgaatagaattgtcccggatctcggtccgggttcgggtgtttcgtcttggattagagaatcgacaatggcgagtccgattcttttgggttcgagtttgagacgggtttcgggttcttgggttttcgggttatcggatccaaatgggtttttcaaaacagagaaaggtttggtgtcgagaattgaagttggactcgcgacggcgtcgttttcagtgaagcttttaaagctactaaaagctgtgaagagcctcggaaacggcgtcgttttactctgtttctgattctgactctggtttgtttccgccattaaagcttgcttgcttcttgatctcttctttagcataattcactgctcaatcacacacacacacaaaaaagatcaaaactttataacaatcaaaactttataacaattacacaaaaagatcataacatgtaactcaataacacataaaaatcataactttgtaactcaatcatgcaaaattgtgtgaactaacctggaagatcagaaagttacaggttgtggaagtatgagagaaaatgaagctaatgcaattctgttgcctccatgattagagaaaaaaatatgaaagtgtgacaaaagagaaaagtaactgaaaagacgagagctttttttctacaaaaatgttatttttttgtataactcccgagtttctcgcactttcttcctaaaatattttatttatcaagtgacatgaaacgttacactagagattggagaaaagaagaagaaacaaacaaaagaaagaaattgatccgtttatttgtttttgtttgcttttgctttttataaataatttggttttgtatgtttagtgggttatagtttcgatgaactgagaaagagaaaagaaaacaaaacatccccactgattctcttccatatcctcaaaattcgccatgaagttttttcataagcagaagaaaacagagagcactaaagagacacacacttagcttctctatcaaataataatacttatatgaatcacatatatagagggagagagatttacaatagaaatcagtgggtgaagaaaaccacttcaccagtgaaacttcctaaattcgttttattgtataaattattattgattttaggaattttgtctttttattctttgctgatttattattttgctttttgggttatgccaaggaaccactcacgtcgttttctactgaccctttcgtctttttattttattttggaattttcttatagttttctttctatattattttatttgtttattttagagaaaaggaactttagaaatttaatgagaaagaagttgaataatactcgtgttgtatatcgtactagttacgactaatctatcaatggaggagtactaatgtactatcacaaatattgaaatatatgtgatttattttaagtattatagtattatataacttttcgtattttgattagaaattcacattatagtgtactaaaacgttttcaaaacagaagtttgcaaagttgtttacgtcttgcatgtcatttaatatagaagaaaaatgtacttctcacttgcatatggtgattaagtaaattgtctattactgttaggtgataacattacatatttaaaaggtgtgaataagaaagatattgaagaagactgttttggagatggaaatgtagaaacaaaatatattattctacttcattttcatctaaaattatagatgggatatgaaagacagaaagagatcctttgctagtaaaataatgtcacatatgtatatggatttatcgatcatatcttcttatcgtgactataagtataactttatccatcaaaaatttctcttaaccgcagtttcttcaacgggagtaactcatataaacacgaactaagctagtttcttcaacgggagacaaatagagatgatgaatacgagaacttttggttctcttttaaaatcattatttcatatatactttttctcgtgtaatgatgttaaggtacgttgtggtggtgatgatgactatattgttagcatgggagctaagtgtgggtggactcggtcgctcagaatcgtaatggaatgagatacgatcatacgtacgaatatatttcacaatcttaactgaatatctcttttgctttcgtagctggctagtctctttgggtggacattacacacttgttatattatatatgtataacacgaaaaaaatatcactacttaaaaccaaaactagtgataaattcgtatgagcaaacttgataatcattactttaaacaaacactattaattgctactacatactctatggtccataaagtttaatgttttaggttttattcttgttccataaaaattgactaaattttaacccgcggtataccgcgggacgatttattttttaaaagtaatatatattaaaatttgcaaattttatttttataaaatatttatattttacagtttataattgttattaagtaaggctataacacgaatctatgagacaattgttgaaaaactaaagttgtaacccctattaaaacagcatattaataatattttaaaattttataaatattgattcaaatacatccaccatataacccaattacaaaataaaactcgttctataatttctttacccgtcccgtgattttttttttaaagtagtaatttttaaaatttaagaatataaaagttttgcaaattatatcattctctaatacatttatattttatatatagtaacattatacataccccataacatttttggttttatataatcttttctaaattaggatgatttgatatgtttaatattagtggtcttaaaaaataataaattaaagatttaacccgtattgaaacggtatattaattatatttaactttttttattaatgttgattcaaaaacccgtcactccaaatccgtcttgccaaaaagccatttattttattaatattaattttattaataatatgactctgaattataatctaaacattttagctaataacataggagtataccatttttatttaataggggaatgtaccatatgacccgaatacacttttacccaaatccaccaaaaaagtcttgcaaaaatagtatagagataagaaacgatagtcggttttgataggtataagattagcaaatatattagttagcttaaattagttaaataatacaaattgaaaaggtatattacactttattcgaatatagtatcaaaacttatataacacatagatttgataaatttttaattgttgaatacttttttttgtgctaatttttatgtgattaagatttaatttaagatttaattgattttgtatataaaatattaaaagtaaattgtgagttgtatatgttttgttgatattatctatattgtttagtgtttaagattatacacttgtagtttgattgttaatttaagagtttcacatgtagtataccatcttgtattaatatcgatctaaacccgtcaattctacgattttccagcttgtattaaaaattgaatcacatcatacacataaaaaaatctaatatgttattaattattgtagtatataagattataaattttcaatataatatgtatgaaattgaatataaatatttcaaattatgacccgttataatattttttcatgtattgaacagtttatattcgttttcaaaaattcaaattatggcatatgcgaaaaaactctaatttttttttttataatgatgatattatttttcgcaaaaatagaatcatataaagatgagaagtgaactataataattaataaaaaattaatatgataatttagagatcaaatctaatttgttgattttaataggttacttttttggaaattaatagtgtatttcgtttttctaattaatttaaattaattaaaatttagatatcaaatcttatatgttgattttgattggttattatttttgaaaattaataatgtatttcgttttttaattaaatttaattaatcaaattagtatttgactttttaattcttaaaaagataaattaatttactctttaaaattttatttctaatggcatacctatgtaattacttacaaaaattaaggttatatttaaaatgtacttcccaaataatatagtaggatattataaattaatattattattatttttattagtaaccaatacagagaaaaatagaatttatattattaaattaatagaaaataataaaaataatataaaatttacttttcttaatttatatgaaaaacccaaaacgtcatttttttaggaacagatgaagtatatatatattagtacgttattactttttggttagttgttgatttatatttgataaaaaaatttaactttgcggttctagaaattacattttcaagcaaaatacacactaaataaccatgactgatttatgcaaaatacacactaaataatctgtatacccgtgttgtaacattagtataatgtttgtgatacacattgaattttgtcatctctacgacacaataaaaaaaaatcaaattttattaggaattaagaaagcgattaaaccatcgaaggcctcctccaacacctcaaagaaaaacacatcaaattgtgttactaattaaagttgcgatcttattttgacaagggttttcagtggttccatcatcttttttgaaaccatgactaaaatttataatttttaaagtataaacatttccggatttggcaaaaagtttccattatctttatggaattgataactgttacttgcatatatgtgtgtgctgtgactgttttccattatacaacttaatggaacaaaattaataaattattcaataaccaatcacagttcggggacaagaaatcaagaataggtttaagcagtgtttgtttgcaaacttgataatcatcaatttaactataatagtgtgaagtcactcatagtggagaactgatgaagcatcatgagtcgtgtcatggctcgtgaacacaatccatcatatcatcgtgaccgtccatgagatcagaatctaatctctctgttgctgtcagagaaaggtcccgcaatataaccctctgagttactaagagttggctccacgtgtagtaagtagggaccatataagctcacatcagcattcactgcttcctgtcgcatcatctatcttttacacagaaagtaaaaagataataagtgaactaaaacaaaataagagaggtaataatggttatggaataggcgtgaccacacgatgaatacaatttgcaatttaggttttggaataactcgttgattaagaggttgtgttgcttggttttttttattgaaattgttggaattaaagaaaaaacaagtgcgtttgttacaaatatatgtgtttcgatatcttacttatatactgactaataattttaagaaaagaaaccgtaggtatttagcaaccaatctataacgacttatgcaaactaagaatacagatattaatctcgcaagaaactatcacttgtcgatacttaaggatgtcatatgtaagatcaaagttgtataataaaataagcatagaggtggttgaatatgaggttgacacatttaagatttgataggacaagaattgtaaaacatatatcaatttgattttgacgacactatgcatgacttctgttcaagatgcatgcgtgctacttgatactttctcaaagactttcattcacacacttttttttcgcattacttcctgaataattaaatatatggaccgacttttatgttccaaatattaattgttttcatgtatagtgtatgattcatccgacttatatagtgccgaatattttctgttctgtaattgctggcgccatgccactattattatctattcctaacacataagtattcttgttttagtggtttacaagttctgatttttcaaaaatctgaccgttcaatttcaacttgtgaaatctatgcgacaaagaagaattttttctctctctcttttttttttttttttttttgaaataacgggagtatcttaaatcaaaaaataaactaattaccgtagcttgtaaaagaatggatatatttgccattaacatttcacattcatatataaattttcgtcaatatcattatccaattcatgacgttaagattactactatagagattattttcacgaacaagacagaattcagagaaagaaagatatgtggttgagtcaccgtagacacacgacacgacttaaacttaattatgacatgacaagaacatgtagacaaccatcatttgttgccgtaatcatctttatctcttcaaacctaacgtacgtttgatattgtaacatttcagattacggtaaaaaccggatattatttagttactttctccattatttttaccgttaactatcacacaaaacaatcatctttaacgtaactatagagaaacatgtctctgatgactcctttgctaaaaccatacttctcaagtaaaccctcttttcgaaatccagctttctccaaaaccctttgggacgctttgttctccacctccaccaccgcttgtagcctcaccacctccggaaaatcctccaaagcttgttcaaccgccatcctcaccgccgctgtggctatcccccgcccccaaaactctttagcgacagcgtatgcgaggtcggctcggcaccgaccatcaccggagtctggcttgacggatacgtaaccaatcgaatgaccgtcttggaggagagagatggaacggcgccatgggtgtggtatagccttgtttaagatgtgttgtttagcttcttctaaggagttaacggagtcccaacggaggtaacgtgtgacgtcatcgtcaccggcccatttaaagacgtcttctgcatcggagagattgaacggccggaggaagattcttggtgattccatgatcatgtaaaattttgttagttttataaatctcttactataatctaataatatacacaaaaaatgcaacaaatgtaaatatttggaagtgatgattctattaggattgaaaggcccattaatgatttgggcctattcttatcggttaatgatgggtctcagatttagaacttaaatccaaattataacagagagtaacgcttttgaattttgattacctcttataggctttttcaaatgtagaaagggatggagtgtaactcctatataccaggaatgagaaagtgagaaagctggctccttaacacaatgaagaccacattattgacacaactgaaacaaagactcgttcaacacaatatattgtgacacacgctcggttagatgtcctcctaaacccgttatgcatctcctgcaactccatcaccttactggtacatttttcaatcaatttcctgtaacataaattcacgatatattatggatgcatcagataacataaagactacgtactacggtactaggatgatctttcttcataccgttattacactgaatgacaagaaaagtgtcaccgtaccaaaacaaattactggcagacgaagaacttgtgtttggttaacattgatgataccgagattagaacctccactcttgaggaattgacaaaacagtcaacaaaggtatgagctatatttagtcaggtagccgaaacaagtctaaatggtatgttaatgcatcaagttaaatgaaaacaaggaggtaaatcattaaaaacacaacacattacttttcattttgcatgcattcgttgaaattttgtgcttcttatatctactaacgtcaagagcttatctcacattaggtctcaatgtttcataacgatagattattgctttgtcccataaaatgataaaattctttttataatataggattttataaagttgacataagttatttgtttccttttggatatctgttttgtgcatactatatctatggctcttgagtttgaacccgaaacatttagtttaccatctccttcccatgtctcagatttggatttgtggcttttctttagacaattaagattgcctttttgtggctttttaataatcttaaatagaatgtacaaagagatggagttgtaactcctacaaaccaggaatgggaaagtggcaaagctggctccttaatttaacacaaggaaaggaagaccatgtctttcgttattgactcaactgaaacaaagactctatcaattcaaatactttcggttacggacaacgccatcaccaactggtacacagatttttcaatcaatttcatggacataacataaattcgcgaagagtgaagattggtgtttattcataaactagtgtttttgaaattcttaccgttgccacaggcaccataaacgccacaaagctctggcagatcaagaagtttttgggaaacaacgataccgaagctagggcctccattgttgatgaattgacaaaagcagtcaacatatgtcttgcctactgtatacacctcagaacaacacgcgaaactaggagtatggatacgattatcagttaggtaggggaaacaattcaactgcatctgccctgtctctttcaagcactcgtcctcgtccgactgagcagagacgcttgtagaagacatcacaaccacgaaaactgtaagcaacactaaaaccactcctatcttcatgtttccttgatgaaatacgtggttggagaagaatcttttgagttttgttatgatcttttcagattcgtttggtttttcagagtcttgctagctaattggtactatatataatataatactgtgtgttttgtgttcaattttgttttataatatgaacaattagctgttatttttccttgacttaaccaacagccaacttgtagccattattaaataataatttaaatacaatacagttcgtattactataatttttaatgtcaattttgtttggttttggctacaaagtggacatcatcttaaccacgtcttgtaatacattttttatattcatcagcatcattctatataacaatacaatatgtttcgcaatgttattttgtatgttatttggtttgattaaggaacatgagatgattattgtataatataacgtgttttgtattatttatttttttgtttgacaaaatgaatgctgctgatgaataaaaaaacgtattatcatctcctcatgttcgtttatgcctgattgttttgtcatgtccgagagcctatttttaattttggctattacttttgatccgctattccgtttgatccgaaatcaccaccgttggaacagccaattcaatttcctatgactttgatgaagggctcgaaaacaatatcacaaaggaaagtcttcatatgacgtgatctttcaagtacttcatattgattatggataatatcatatcatctctcttgttctttccttcatattccgtcattgtttggtcttttaagaaccaaatatcctctaaaacctctcttctttatggttctcactccaacacctaaaatggatgaactcaatgcaaaggctatcttgaagaagtctaaatggtgtgttaatgcatcaagataatgaaaacaaggggataaaatcattaaaaacattcattgcatacattccttgaaagtttttattcttcttatatctaacttcaagagcttatctcacattaggtctttatgtttcataacgatagattgtttgctttgtttccttttggatatcgttttgtagtactatctccggctcttgagtttgaacccaaaacatttcgattactaccttctcaaattgtgttatggaagttaatgattattgtaaacggtaaaaagatctccgttggtacaaagaaatatcactttagggagtaagaaatcatacagcataaattacatcgcacaaaatagagagtaacttttctttgggcaattaaaattgcctctttttggctttttcactatcttgaatagaatgtacaaagagagggagttgtaactcctataaaccaggaatgagaaagttaaaaagctggctccttaacccaatgaagacacacattattgacacaactgaaacaaagactcgttcaacacaataaacacaaacaacgattacatcagttcaaatactttcggtttgtgacacacgctaggtttgatgtcctcctaaccagttctccatctcatgcaactccatcaccctactattatatttttcaatccatctcctgtaacataaattcactatatacataaagactacatactataggattggtgtttcttcataaattgatgttaagaaattcttaccttcgttacacacactagcaagataagggtcaacgccacagatctctggcagtcgacgagcttgtatgaagttagcattgatatcgagaatagagcctccactgttcaagtattgacaaaaacagtcaacagaagtcttggatatgtccagcaacgaaggacaacaatccgaatcatcaggcaaggaaggataggaagaagtcaggtagctgaaacacggcttcagtgatttcttcaactcgtttttgcagtttgactgagcagagacccttgtagaagacatcacagccatgaaaactgtaagcaacacaaacacaaacaccattcccatcttcatgtttctttgttggagaagaatcctatgtgttttgttttgatcctttcaattttgtttgttttttcatagtcttgctaattggtactatatatagtactgtgtgttttgtgttatattttctttataatatgaacaattagctgttatttttgtttgacttaatcgaaagccaagatgtagccattataaaatacactatatttcgtattactataaaaaagttaagttgcaaattagtcactttttaaaacttaattggaaaagtagtcactttactattcataatttgcaaaatagttacttttcactgtttgattcgtacacttagattgtacaccacttttagtgtacaaatgtatataaaaaatacacagcgtacactttacatttgtacactaaaagtgatgtacaatccaagtgtacgaatcaaacagtgaaaagtgactactttgcaaattatgaatagtaaaatgactactttcctaattaagtttgaaaaaatgactattttgccaatacaccctaatttttaaggctacacgttttagttatactaattactatgtcaattatatactattttttttttgtaattttatattgtaccttatgtagccatattttccaaaaaccgtttactgatacacgaaagagattattctattaggcttgaaaaagcccattattggtttgggccttttcgcatctttcggtacttacggaaattactaacttacccattgtggttttaatcactctttcttcttcaagagtctgtctctctgtgcaagcttcgtcacacgcataaaccctaaaaatcgaaatcaaagacccaatctctatttgtgaaaccatggatccattatcagtcctgaaagaattcacaatccgaggagacattgataaaatcgagagagttggagctaattacagattcggatcggaatattcgtttccatgcgcgacggagactgcgtaccgatcaaaaagtggaagtctctacacactagaagcattagtacactacgtgaagaatcaacaactgaaacatggagagtatatgcaatcaacagtcaaaaactcagtcccggcggttactttaccagatcggaaacctctcctcgattacctcaccggaagagtcgcttcttcagattctattgatttcctcttgcttcaacagcaaaacgcacagagtcagaagcagaacgaagagtatcgaccagatcaagacaattcagcttttgtatcgcgcgaaaacgcgattgcagatatggaggttgaagatttcggtaaatccggtgaagatgttgattacattatgctgattcgatccaacgaacgtccattgaagagccgtgacgcgattcttcagtgtaagaatcgagatttctatagtgtgctggtgaattctaccaagagagaagaagagagacagaggattgagtctcatcagaggaaagatggattagttgctaagagtaggttaatgggagctgaagaaagaggtattgtagggtttagtagtggtggtggtgatgataatggttatgatgctaatcctaaatctaagcttcattttaaagctgggaagattggtgaaggtgtgccgattattcttgtcccgagtgcgtttcagactttgattactatatataacgttaaagagtttcttgaagatggtgtttatatacctaatgatgttaaggctaaggagatgaaggggttgaagcctgattgtattacggttcagaagaagtttagtagagatagggagagagttgtgactgcttatgaagttagggataagccttctgctttgaagcctgatgattgggatcgtgttgttgcggtttttgtattggggaaggattggcagtttaaagattggccttttaaggatcatgttgagatattcaataagagtaaggaaatatgattgttggagtattagatgctgaaaagttcaaatcttttggtttttgttttgagtggttttagctgacagtttgtctattgtttgcagttattggattcttcttgcggtttgaagatgatagtatcgaatcagccaagacggtgaagcagtggaatgtaaagatcatctcggtgagagatttgacaccttttttgtttgctgttatgttagagttatcattgagatatgatttaactgaaacaaggaacttcttttgtgttttttgaactaatcagattagcaagaataagcggcatcaagaccgagctgctgcattagaagtctgggaaaaactcgaggagtttgtgcgatctcggtcgcattcttagtacctaaattgttgtatcatctttcatcattttttcttctgtaacattatatatataacatagtgacaacaaagttgttgtgcaatgtggtggttttcaattaatgataaatcgaaactgttcattagctttgcttcacgtctcttggtcttttggaaggtgaattaagatcaatatattatatcttattgctaagatttgcatcatctccattcgattacaaacaatcaatgcctattcaacgcttagagaagggcagagagcctgcattgcattcacaggatttagagacttgatactttctggttcttaaatgtggcaaacgtttgcaaaaactgtgaatgggggtagtatgcgaagaacacaagccctcatggtcatcttcttctcgttttcttgttgttgttacaggttgaagttctttagatgatgtttcagggagactagcggttcttaattcaattatcttcagctctaactatggtgaggaagtttcttactttcatttagcttgtgctgtaaagactccgatgatcaaaccatggctcttgtcaactaaagtttgaggtatggaaacaaacgtaatgcatcatttcacatgtttcggctcttgttcataacgagagaggaagtattgatctcaaattctctcttgtaccttttattaaatgcagtatttgattttaacttatcaggattcttgcttttcgtatgtgaatagtatgtgcgcgtggttccggtgtggatattgctgtcttctgttggtttcttcccattgcatatagcggttgaaggttggttcttctcatatctaacttgaaaagtttatccctcataaggtttcatgtttcataattaaggctagattgttgcgtgccgcctaaagtctgtcatattctataggatgttttgtttcatgcaaagtgaaacaagtctttgggatatctttttctatttgccatctctggctcttgagttttgaacccaaaacagttagattgctgccatctaaacttgatatttgttgagagagctaaatggtctgttcttcaaactgtgttctggaaagtaatgtttattataaaaggtaaagagatccaaaatgctctccgttggtacaacaaagcaatatcacccggagagtagggatttacagagcataaaatacatcacacaaaatcacaacgaaatgtgaataaatagggacaaataaagaatgcaatctgagtggcacaaaagcgtatgggaaaatagtaactcagaagattgccatgtaggaaaccgcggagaagaaggcaataagaggaaatgagaacttgatagagcttccatcagacgatgggggtccgtctccttctcctactggtacggttttcgatccattacctggtcctaaaataaattcccgatatggatgcattagataacataaagactgtattgaaattggtgtttcttctttatatctgttttaagtcatttacctgaagagtttggtgattctgcaggagagtcagaagtagaaccaccaccaccaccacctgcaaaaacagaattccgcgtaagattcgcaagaactaggattggaacaatcttcactaacctatgttttgaaagtcttaccggtattacagcgactgacaggaggagtctgaacattacaagccctaggcagaccaagagcttgtgtttggttaacattgatcccaagctgagagcctccaccgttaaggacttgacacaaacagtcaggagaagactggactactctactcaactgattacagcattgctgattaggagaggtagagtttccagttatgtagttgagacacggcgacatgctaatcaacgcgtttgtgcagcttgactgagcagagaccattgtagaagacatcacagccataaaaactgtaaggaacactaaacccatttccattttcatgttttcttgaagatgttgtgtttgaagaagaatccttttgagtttgttttgttggtttttgttatgtttgatttggatattgtggagtcttttgatggtataaataaggaattgaggaagcaaaggtggcttaatttgggtgaccaactctttcctacttttctaacagtttttggtttgttttgttcagattcggacaaaatgatgagtgttgtgttgtgaacagagaactggtccgtttgtaatatttggggtcggtggtctttgtgacggtctaggctttggttgttgaactacttcctttgattaaggtttatggagttttgctatatctacacaataatacataattgttttgtattattgacttgaccaataacaggtgtcgaaaattctcagttagtacatcatcttttacaagtcttttgacgttctagaccaaattatgttgatttttgaatcaatggtgagttattttagtcatctggttgccgtgttttgaaactaagaaaagttgaattatataccgtaaagaagaagataatactaaaaatccgaatacgacctacaatgaaactaagaaaatcagtagccaagaatgattttgagtcaatggtactaaatggcaaaaaacattacaaactaaataaatgacttttggtggacgtctaataaagtaatagcaatgaataaaagtaaagtttttgcaatagagtctttcatttaattgtaaatggatgtcttgttaaccaaacaatattttgattgttttcattgctatgtgctttattgagaggatgagagcacatgcatgtcttgttttgtaagctgtacctttttttgtcataactcaacatgatagtaatggaatggaatctctttgatctcttgttaagttaccaaaacagaacaaccgtgagagagtggttcatctaatacaataacaagacatgtatctaccacaatcctcacatacacatgtacgcatcccattggccaattcacttccaccaacgaccccaattaacaaaaaccaacatgagttagttattagtagttgacctatactcacttcttttatcttccctccactctctccaatctataaaaccaaatccaacaattgcttccttctcatcacacttcaaacacaaaaccacaaagctttaaacttccaaaagaatacaacaaacaatcaaagcttaatctatccaacaatgtcgaagattatttcccttgtggtggcgatgatcgcagtgctagctttgccgattcgtggtcaacaacaacctctaagccaatgtactccatcaatgatgaccaccgtgagtccttgtatgggcttcataaccaacagtagcagcaatggaacttcgccgtcgtctgattgttgtaactcgctgaggtctttgaccaccggaggaatgggatgtctttgtctaattgtcactggaactgttcctttcaatattcctattaaccgcacaaccgctgtctcacttccccgtgcttgtaacatgcctagagtccctcttcaatgccaaggtaaataaaaccaaatcattcccctctaatcattacatttaataaacttgcttgaatctattatctaacaaatgttttgatcttccatctttttacagccaatattgctccagctgctgctcctggtaaacaatcaatgacattattatctcaattaatcacataattggtttcttggaagataaactgatataaaaaattctgttttggtaataggacctgctgctacatttggaccatcgatgtctccaggaccagagacggatccaattgttccagagccaactccggcagctcagacaccacagtctgatacaacccgaccatttacaccatccgtcgacggtggagctccaacatcagacgacggaggaagcaccagtcgaccttctgagactccttcatccgcctacgcactctcaccatctcttctcttcttcagcatcgccctcgtagctctcaaattctactgatgattccttttgtttctttgcattccttatgtgatttgatttatgcatcgttgattatagaaagaaaccatttatttggtcattgctttgtggaataagcttttgtgtatactgttctctgtttcgagtgagatttattttgtgttgttgaagtaatacatcatcatttttatggaatcgcaaacactattgatgctcaacgattaaaaagtgtcaaaacactaactcccgacttaaaatcaaaagcaaatgtcacagacacataacatctgaaaaccaaacacaaaaccaactcagacaacagcagttgtgacatcctttacggactgacgccaagcgtaatcacgagctccatctttgtcaacaatcttgatcacaaagtttggtggtgcaacaacgagtcttgaccggatctcaagtatgcatttgtcaactagttcaatggcttcttctacagacatgtcactgcggtaatgcctgtccatcgtggagagggagaagtaggagccgtaaccaaaagctcccttgtcgactttgtgaagagttgcaatgtagtcgatgtagtaaagtgatgcaccagactcatcgtcatagccagccatcaggatattcaccgaatacggattctgattcaatggagcataaagaaaacacacagagatatctcaaattttccgccatcaataataagtagccaatcataaacaaggaaatccagagcaaaggccatatgagtttatcagcaaccttaatgttatcataaccacaacatcacagagggaagcttcaattcaagctttacaatatcattcttacaaacttaaaattgctttaacattcaattatcacaggcacataaggcttaagataaaaaaacataaattcataaatctcgcatagttctatgaccacaagaccaaataaccaaaaccgttccctaatggcagagctaaaagaagaagaagaagaagagcttaccttcctcaaagcagtagcgagctctccgcgagtgaaattggcagcagcggcggtagtcaacgggattccatttctgaatttgtacaaggacacattcttctgaacgtactccgtaaactgaaccctaatcaatcccaaaatccgaagacagtcaaaattactacctccaccgctaaattacagagctacagagagagagaagagtatcggaggaggaaattaccggtcaccaggctcgccactagcagcaacaagcttgtgtgagtcaagtaccatgatcttgtcttcgttgtttttgtgaagaaggatactatgaaccgccgatgtatcagcagcaacgatggcgaatccattcccaacaagaccgaatacacactccatcttccgtctaca

SEQ ID NO: 63 - DNA, 71327 bp, Arabidopsis thaliana
atcttcattgatgcaatctgtattttgtgcattgagcttgagctgttttgtgatgttatgttctttctgttttgttgtttggttcttagaacatttggacccggtaaatgttaagatagctgagttgagagaggctttggaatctgttgttgctgagcagaagtatttgaaagctcgtgacactcgtcaccgtcatagtaagttttctccattcgtcttacaagcctcattcccttgattacccgagtaacttgcttagatgcagtatgacaatataatgagtttttagacagacatcattgaatggcgaaagatgcaacctttatacgatctaacattgttctgtgtttggtgcagcgaatgagagcacgagaaagcgagtgatattctacacagtaggagagtacattttccttgccgcagctagtggacttcaagttctctacatccgcaagctcttcagcaagtcggtagcatacaacagagtttgaacatagcaaaacctcagagcgaggtcttgtgtccagtttatgtttgaatcggtgatcaaaacacaatcctaaacagtgttagttaatttaaaagcttcaatagcgaaagacttactttttgtttttggtttctacacttttataagtttactaatgcagaacttgatgaagcttttttctgaattcattgattagtgaatatcattatcttgttattatcgtagacaaattgatatgagatccttaattatgataccaaataaaaaccaccactaaagtgaaagaaaaaacaaagtcaaagtaatatacaatatcatacaaatatctgcaaaacgtggaggaaaagaaaaatcgaataattcgatgattctctctatcaaagaaacgaaaaagtcgtattgaagttttgccatttgtttataaaagaagtggctgttcaacgattctaaagtcatttactttaccattttgatctgttgctctgtttcactgtgcgtgatcgggaagaagaagaaaatgttggcgattttcgacaagaacgtggcgaaaacacccgaggctcttcagggtcaagagggtggatcggtttgtgctcttaaagataggttcttgccgaaccatttctcctctgtttatcctggtgctgtcaccatcaatctcggatcttctggtttcattgcttgctctctcgagaaacagaaccctcttcttcccaggttttgtacaatagtttattcctcaggatgatgttttcttcttctgtcctagatatgagagatttgctatcttaatgtttcactggcttgcaaagatagtttaggatatgtttcactgaatctgagagattgagatatcgatctgttgttatgttttgatggaataatgaagttatatatctactttgttgtgatgtttaaaatgtgttgaaactggaaggatgtgattagataagtggtggtgattttttcaaaacaattttgtgtgtgtgacagattgtttgctgtggtggatgatatgttctgcatattccaaggacatatagagaacgttccaattcttaagcaacaatatggactaaccaaaacagctacagaggttaccattgtgattgaagcctacagaactctaagagatcgtggtccgtattcagctgaacaagttgttagagattttcaaggcaaattcgggtttatgctctatgactgctccacacaaaatgtcttccttgccggggtaagtttgaattctgcttctttactatttgacacttatttctgcatattgtaatgctgaggttattattattatacgcgtttcaggatgtagatgggagtgttcctctctactggggaaccgatgctgaaggacatcttgttgtttctgatgatgttgagactgtcaagaagggttgtggtaaatcctttgcgccattccctaaaggtatgtagcaagccgtttttcgggttttgaagacatctcactgttctttgatctagtgcaaatatgaattaggatgtggttgtgtgtatgcataatgcaggatgtttctttacctcatctggaggtttgaggagctatgagcatccatcaaatgagttaaagccggtaccaagggtagacagttcgggtgaggtttgcggtgtaacgtttaaagtggattctgaggccaagaaagaagcgatgcctagggttgggagtgttcagaattggtctaaacaaatctgaactagctgaaaaaggcttgttttattttttacttgttggactcctgtggctgtgttccacagatttactcttttcctgatattctcactgtagccattctaaggactaatggtgctcttattgctattgtacctgtacttggtaacaaggaagctaagaataaaatattttataaacgtctaatgattccagtgtatgcatatgatgtcatattgataaaaccagagctgcaagaacatgagctccaacaataacaattcataaacaacctttggtaacaaaacaaaacctaaaactgtaatgaaacataatgacaggtcttagactcttagtaagagcctaaggttaacactgcctgcagatttctccacattctctttacgcagaaacgcctcgggtaagacttgagccatccattttcagacctctgttgtctgatgctgctgctgcatagtcctgactgttttcccttctccttgaagtcatatcaaggccaacaccaccagttttagactccattgcactttcgttgctttctgctagagtcgcgagtttttcggtaatctgaaaagccaaggattgtgctctgttatgttgcacttcatggaagacgatgcattgagttggctggtcccatgttgcattaagctccttgttgatcatcatcttgctcacaatactatagacgtgtgactcagagatgtcaaacattttggctagctcagctagacttaaggacttgtaacaggagctcgagtatgtgaataaataagtccttagagccacttcactgatactagctttcaccatatcgagtatgctgtcgcggttcttgaacagtctccagatatcaagagagttcaaaactgaaaacgcttcttggaagtttcctttgatcagggctctggtggctgcaatgacatggacacgtacattttcagggggtgcagtgaacgcttgcttctcacttttctcgagcaggcgctgaatattcttgctaatcggtttgtgtttggaatcatgcgagtttgctgccatgtttgggacttcaagtagcatggcacaagtaagataaacagcctccaagagctcgaggtttatgttcatatggtacggtatttgtgttctcctctccataagcatctatagttaaaacaaaaaacagagaaattagactctactaaaatgaaaaagaacataatatgttctataaggtcaatatttacctgctctgttgtcttctcgtggtctcgactttgcgagacaccttgaccaagcaactccctaactctattcccagagtacagctcagagagacagctatgtgactcagttatcattccaacccgaaaagcgcaaagaccaagttgtgccattgtcctgttaaagagaatctgtgtagagatgtccatgtgttgaatgttttcttgtagatgactcatcagcaacaagtctctagcagtaacaaaattgtccattaaagcatgttgatagatatcacatagcattgctctggctttggtcctctcatctccatttttgtagataaaggatacaagtgtatccatcatagctctgctgctctttgcgaaggtaggcttacgaggaacaatctccgcaacaacaatgaatgaagaagaagaagatccactttcctcgttagcctcctcaatttcctcatcagccaatttactcatagcatcaaaaacttcttgaggcttgtaatagattgactcgactagtataaaggctacctttgaagcagctttagaatcgcctgtccgctccaagtagtcttggatactctgagcaagagccaagaacataggctcatctttcaacctctcaacataatcattggtgtgaggatcaatgcactgcaaactcttgaaaaactctgtctcaatcttctctaagaatgcaaccaaatttcccgagacccgaatggttccatcgtatgccgctggctttgaagtttccttctcatcaggttcaacggtatcatccacaacaatgttatagtacttgacaagaatgtcaagtatggtaagcatgttaaccacacatttcttccagacatcgataggcatgtatccgctgagaccaccagaattcacattaaactctgctgaaataacactaaacaagatttcaaccttctgtgcaggagtcttggcgatctttgtcaagtccatatgcttctgcgcatgagtctcgccgggtttgagtttaaggctagaacttcttcttttgctccaacgagcagccctaatttctttgaacttcttgttgaccatgttccaagttatctcttcatgatctaaactaaacaacatctcccaagaaacattatcagcagaatcctccaccacctcctcttcatactcatcatcgtcttcgatttctggagactccctaaatcttttgatatcttcttggtactgcagattgttcttcttcagtttctgtctcattgcgttcaaagccttggagttactagtactcatcttctcctttgttttcatattatcttcattcaagaaatcttccaacatcacaagggtcttgatatacaaagtcggagtctttacggacttactaatctgtttgttgagtttctcaaacgtttcttgcaagtaaacacaatcattgatgttcatggcatgcttcatattctctatagtgttggccatctcctcaaaacgtttatctttttttggcttaaccacacgtttagtatccataccacaacaaatctcaccgtcaggtaagtctgcaaggtaacgagtgttgttaccctcaacctcttctttttcaaagtcactctcatcttcactttcacttccactctgtaaacgaaacataagcaaagaaaaagcattaagaaactgttacaaaaaaatataggttttgataagtaaacaaaggtctatggaaagaaacctgagcgaaaaaacgagaagtcgtcgtcatcttcgttagcaaggagaagaacctgatacatcaaaatataaaactttgagacgatggagatataattgcaggggggacacaaaacatagatgaagaacaaaaaactcgaacctaaaatttgttcaaggaaagatgaagaagaatgaaattacctttgattgatttgagacgatggagagattgatgtgagacgatggagatgcttgactagagaataacgaatcgttaagaagagaggcgaattagggtttactataagagaatattacgtgattagacacttttttgaaagtttatccgtaattaggcacttaaaaatcattaggcactttgaataattaaaattacttgttcaccctcgtatcgtcggttttctataaccaaacaaatcaaatctattttcactaaaccaattcagatttatggagtccacgattttgtagttgcctttgtgatttaaattttttttccagaatcgtaaaaatccaaatccaataaaaaatcctaaattacaatttctcgaaaaggggactccggcgacgggatatccatctcctccgtcactgtccaccaccactgcttttcacactacactctcgtttgctctttcaaccgtaaaacaccaaacccaattctcttgtcatttcctctaaatctctgcaatttcttaaatcgatttggatttactttgcctgaaaatctcttaactcgtactgtccaaactcaatttcaatttcaattgaggttacttcgagaaaagttcaagaatttcggaacaactaaggtaaagttttgtcatgttgacttcggagatcttgttcgtaattctgtgataatgtttgataacttctctgcccagtttgtttgaaattcagtacttgaggttctctattggacagaagatgaacatatggactacaacacttggacaatccgtaatggacaaccacacattttgtttgcagcgtatgtgtcgttacaaaattgaaaatcattgtccacgaccatacatgactgcacagcttggtgtttgataattcaaggaaaaagccatataaaggttctatttcttaatcttacattttggaagaaatcaaatcattgatttaagaaataatatgtaagcttggatgctagagctttaggtgatcctatggccagattaggatattgatttaactttgttcttactgctactcaacattgattgtctggtattaagttgtaaaagagtaatttgacttatccatttgtgttgatataattggtcattataatgtgattagtcaatagaaaaccttagagtacataatatcaaacttttaactttgttaatttctttaggcgagtgggtgaatacatcagttagacttgcttttgcacatcatgtgatcatcgttattgatgtcatccaaagaaatttgtccattcatacgcaaacatgaaggtactgttgtttggacactccttactttaaaaccccaccttagtttgcaagtcattacttgactaatttactttaaaaacaaaatttaggttaggaacattgtgtcagatcctattttcgatacaagtgggaacatccaagtcaacaaacctacaatggggtaccaaattttattaatcgtctactccttgttacgttggacatgattttttggatactttcttacattttttccttattgaaggtcgtgtttcttatggtttttctgaccatcttcatttctacttcaactcaatcagaacattttggagaggcttcctgcatcccaatcattgaaagatccccaaactgaaaaaaaattctaatgagcaaatgaaggtctacatgtacactaaattatctttatgatttacagtccttgtaatattggacagtattttttggatagatatttaaataatcttcttattggaggcatcgctttttgttggtgatctagtatttgatatcagttccaaacttgaccaacatactcaatcatctcccacacataatcccaaagttgggttatctccaatggaagtatttcttatcatctacaactgtctatcgatgcactctatctatcatttgtaaatatgtcttagtaaagtataataatttcacaacatcattattatatctttcagtataaaatctctctctatcaagatatggatctacacgatgttgtggataatcaggtaggcataaaattaaataactagaacatgtatatttattattactgaaaagcagtcaatttttactacaacattcttagttctattattaattgtttacagaaaacataagattgctatcaaagtcttgttagttatgttgtgaaaccaatctctgaagacctaacataacgcaagttagttatgtttgcagacaaatccatcttctcgtccgtttaattgttatatgatcggacggtcattatttctcattaacttctatttaaactgcaaatcttaccacgttcatttgatccgaattaacccattattctacacgtgtttggtacacacaattacaaaccaaaaccaatgaccggttattcttcttttcgtgattcagtttatttggggtataatggtctattttcactccaaaaacaaagaaaagtgtctcaaccttggaaagtgcctgttttgtctaaactttttcccaaagtgccttattacgggacattcccttactataaaacctaagaaccgattgattttatagttccaaggtaaaaacgaaatttaccactaagaaaaatgtcgaaagtgaaactaaaaagtaaaaataaaaacaaaggcggtgatagtttttctagtaaacaaaaccgctataaaccgaattgaccgaaccagaattaattgaataaaaaagtaaccgagtcttaattgtcacataaaccctaaaattttaaggacttggttactttcacagcaaggaccgagagatttttcagaggaagagaaaagggtttgaaacaatgacgttgacgatctccgatcttccaagggatctgaagaagaaaatattctcaagaattccgttgagatatgtgagagcattgcgattaacctgcaaagagtgggaaactttaatcaaaagtcggagcttaaagatcgacgaagaggagtctcagatggtcgcgttgatggattacaatctttgtttaatgagcaaatcctttaatggaggagatccatctacagagattaaaggcaaacttacttgctttgacgaacaagtaaaggtatctatgttgtttcattgcgagggtttattgttatgcatcttgaaagacgataatactaaggttgttgtttggaatccgtatttggggcaaagaaggtttatccaagttagattttcacacatcccaggcggatgggaccagttcagttacgctctcggatactacaagaataataatatgatgaaatcatttaaactcttgaggttttttgattatttctatacctccaatgattttgttttctatgaaatctatgatttcgactctggtttatggaaaactcttgatgtcactccatactggcgtataaggttttttgatgatattggcgtttctctcaagggaaacacttactggtgcgctaaagaaaggaagccagagtggaacgcagacccttttatcattgttgatcacatcatctgttttgattttacaagtgagaggtttggtccgcttgtgcctttgccgtttagagctatgaaggagagtcttgtgactctatcttgtgttagggaagagaagcttgctgctttattttgtcgcgatgttgttgttgaggtatggattacgactacgattgaattcgataaggtgtcgtggagcaagtttttgacctttggtgtgcgtgactgcccgatgatttattcttgtacagggagtttcttcattgacgaggtgaacaaagtcgccgtgattttcgggcaaccgttgaaacgcgacaaagttttcatcattggagaggctggacaagtccgagatgttgatctcggagaacctgcccaccaagatagttggctatatgtgtgtccttatgttccaagtttagtgaaaatcaagcaacctccaggatgcaaaaggagaagacaaagcagttcagaaaaccgtcgatataagcgaaacatgatgagacttgtcgaacttgaaaagtatcatattgccatggaacccaaaagaggagacaaaacaatatgagagttttgcagcaattatgaaatcgattgatgtgcaggaaaaaactggcaaagtgagaaaacgagatgattaaaattattcatccctttcatttctattttacgttacttagatgaataaaaaagagaaatttaaagagttttttcatccactaaaatagagatgaataagttggagaggaataacacattattcagtgcaactgattaatcaatgatcataatgaacttttacttgttacttgttataaagccattattgtctttttacaaacgaaccagagttgttttgtttgcagctttatcagatacatagattggttttgtaagccgaatcaagtaatgatcgtcttatttggtaaacaagaaactaagaataaaaagacttaattaaaacgtctgattcgatgcagaaacaagcagcaagttaagaacagacataattcgtgattatgacatataaaagagttcgctcctctaatccttcgcgtcagcaatgcctccttgagtaatctggaaactgtgatttcttcagttaaggaaaaaaatgaagtcattgcattatatgaaataatcaaaaacaaagcaagtgtgtgtgtgtggatttggttaaaaggatatggcttcagcttcagcgagattcggagcatcgtagactttgcagacacgtgtatcgcctttgcctttcctgaacaagagcctgatggtggctgcgtgagctagtacatgaccacctgctggcttttttgggtctgatatgaacattccaccacctgggtcagctatgactgcaaaccaccaaatgaaacagatgatacttgctaagttagtgcaaccaagaaacaaaaaaagaattgatgctttatctcattatatcaaactagtgtaaagtaaaccttggttagtcatgtagacagcaacgttgaactcctctgcaattttgattagcctggaaagcatctgagctagtttttgctgcaacacagaaactgggactattgagcaaagccagattgtgccaatgataatgtaagtaatgttgtgggaggcaagtttaacctggcggtctgcgagttctcctcttccagtgaaatccactcggaataaagcaatgatcgagtcaacaatctggaaacaaggtcagaaaactcagctaatttaactcatatttgaatggataactaaactaaaattatcagacatgttttacttaccagaatcctaaatggttcctcagacatttttgcagcaaggccaagaagcaagttgtactgatgctcataggtataagcacgagcataaatgatctgttatatcaagatgaataagatttttgaatgtcagtcacagtcctgagagtaagtaaagatgtgaggttaataatgcttacattgtcaagcacagctcctggatccattccaaatctttcagcaattgggacaatcctatcaggacggctacaaaatttaggggttaaggaaaaatcatggaatatagaaacaatctaatgaagacacaagatctggtcagaagatttgttataagatattaaggatacaaggttccctctgtgtcaatgtatgccacttttccattccctcctttcatgtttgtaggtagctgtaatacatcaatacagaaaatgaataccaatgacattgagagacagagtacctcaatggtttatatgctgaaagaaagtaaaatctcatctcatgcctctgaaatgtaaacaagacaacatatatttcatattgagactgtaggaaagaaaccaacctgcgtagtgacacaaagggtatgtgctaattgggttttcccagacctgaagtgaaattaaactctataagaatacaagctattaacaggaaacttatagagcttggctcagctgtttctcacctaaattccccaaaagcctctgtgatggctgaggtttcaattccacctagcaagaaatgtgaaataattaaaccagaacttaagtagtgtgatcaagatggcaaaaatctaaagcaaaacttagcatacctcctaagagatcatcgagagcttgacaccctgtagtgatttttacaactgatttcctctgtaaacaattaaaaaacaacttgtaagtttcaatatctaatatgaaatgttgaataggatatcaaaatctaatagttctgttagtgggatcaagcaacaatgagtctaacctttataagagcatcacttccagtcatatatccaaagttctgaaggagaaatggtttgacaattaaaatgacgcaaatgcagaaagtaacactgatatagcaacaacagatggaaacgttaaacttaccacaattttctcagcagcttcacagattttgtcaactttggcctcagataaacctttgattccagtaaggttctgcatcaaacataagtttaaacaatcgactcatgcaaccaacatctacatagtataaacccaatgagcaaagctaaataagctggttaataccttcttggtatgcatcatgagaccattgcaggtatggatcccagcttcttgtagctttttcacatctcctgcgtttataccttgtgcgatcactgacacaagcaaaaataaaagtcccgagatcaaatcagctagagattttagccagatacagaaatcaaacaactatgtacactaatatacactcgaattccacaaacagtaaacgaaatggaccataaactattcgttaccaaggagaaccatgttcagaaatcaatatcgatcctagattcatacttaaattcgaaatctaacagagattgcgagaacattcctcaaattagatgaacgattctagatctgatttcataagacccagcgattaagcaacaacgaggtttagataaacaaaagtgggcgaaattagaagagataaacacacagagacgattccaaaacagatgatgaagatttgaaacgaaaaagtgaagaatcgtaaaagttgaaaacgaattcaaatcttacatttgtcaatcatctcaaatagatcttcgtcttcatcattttcttcacgctcaacgagctgcatctggctcgtttcttcagctctatgaatccgaaacaacacaaacagatcaggatcatcggaaaacaaaataaaaacgagaagaagcgagtcaggtacacaaaacttaagacaaagcttaaaccaaaacgatgaatggagaagaagaagaagaatcgtagtagagagaaagagagagatcaatcacttacttaagagaagccatcattttctcgctctaagagtctctaagcttggaagagtgagagagatagaattttgaaattcgaaatttgaaaatctttgctcgatttgcttcgagggttcaaggtttttaatggcgggttacggaattgaaagcgtgattctaattccgttgatttgaatttgggttccgcaactgaatttgttttcgtttgtgtgctcttctttgttatacatgactttgtttgatggctgcgataatgccacgtcatagttatcatccgtctatcgacggtcaatagaaggaatctaggtgaaaaaaagagaatattacactcttaaacacttttttaaaactatttctgtgtttaggcactttcaaaagattaggcacttttttatgtttttttactaaaataccctcttaactaaaatattatcttaacccacgttttctctctttctctctctctcttcatctctctctttctctctctctctctcttcatctctctctctctcttcacctctctctctcttcatctttgtaaaaaatgagaagaaacttcttcttcttcaacaatggcggtttgatttgatttttgctctctctcatgtgtcaaactcgtttcatctacgtagcatcgagatttcagttaatcgaatctcctgttatcatggacatgttatataaaatggatatagatcagtaaaaaggtttccgaatggatatatttaaatggattcgttattatggacaccaaaaaattgtttgttgatttttttttcagtttgcagagacctccaccttcaaaaccttatggacatggaactttggtttctttacaaaacacggttaatcgaatctcctattattattgacatggtatatagaatggatacggatcagtagaaaggtttctgaatggatatatttaaatggatttgttattatggataccaaaaaattatttgtagcaaatcaaccgcatatagcttgtttttaggatgttagacatgcttctccaattcttcatcttttactcttaacatgtaagaccaaaagatttacaaatctcaccatatcaatccataatatacaatccatgatgcgtcatccataatatgtcatccatgattcatcatccataatgtgccatccataatttgccatccataatggacatcaccaataacaaacgccgtaagagctacaaacacatccttagccaccaatgaagatttaccaaacacaaataattccaatgaacaagatttcaacaagaacacaaattctttttaagaaaacacaaataaccctagtcatacagaattactcgccaaatcaatgagaacacaaatgccttgtaataaatcacaaataaccctaatcatctagaattagtcgccaaatcttacttaaattagatccatcttgatatctcttctaatctatgttgtatgcttagttgtttcctattgattcccaacttgattaaaaacgaaatcaccaaacatagccaaagaattcgccagaactccatgacactcttccgtagccaaagaatcgttcatcataaacaaacaatcaaatttttttaatccatggaaagaaatcacaaacctgtccaacacaaggagatcctccttcgtctagagtaaccataggaaaaacctccatttactactattatcatgttcatgaggaaagttgtgtggattaaagaacttcacagagaataatcgattaatttcatgagaaacgattttcaacatctctctgcttcgtttttaaactactatggatttatgaaaaaacgatcttcaggaaggagaaagggagaaacgattgtttttttagagagagagatttagttctagagacgaagagaaatacctttttctaatcagattttaacatcaaaaaattaatccatttattgtctttaatctcagccatagatcttaatttttatttttcaatctaatggtctatattaataactacgtatctaaattcttttatttttttaattgtttggttaagatatatatttagttattgttttcgattgtttagttaagaggtataaaagtcaagttttccttcaaaaagaaggaaaagtgcctctaacttggaaagtgtctatattgtctaaacttacgtttaaagtgtcttatattggaacattccctgaaaaaaattagccacttgcacttcataacggcgcacattagacatttgactcacattttatcgataaaatcaaatgcatataggcccataagcccagtatactaattattcggatgcatataggaccataggcccattttactgaaattacagaaaaataaaaataatatagatgcatataggcccaatctaatatttgtttgcggatccactaatcaaattaattttaaaaagttggggagtttaaccaacgatctctattattactagaaactatacatttctaccaactatcatattatccttttgaaatatttatccctcgaaattgtatatattgtgagacctgatcaagttcaagtttaatttgttagagctcatgaaagtttatggtgacaagccattaacaccaactttgagtttttttaagataagtgtagtgaggagtcccaatgtcgtcgaatcaatagtaaaagatagcggtgcctaattcatgacatatagaccacatgtcatttgacaaagagatatgatccttaacccttagaaacaaaaacccaagctaagatcatagctaatattttcaaattaattcacatacaacaaaactgataaagaaccgacttgatttgatttggactaaaaaacgattcttctagttctaggtcaatacgtagaaccggatgttataactttaagagcacttcacaactcatatattgtaaagtatcaatgtttttacacaccatgaccttaagtaacatgactctaccattcttcttcattttttatgcatatatgcttaattatattatatcacattgattttgaaaaagaatcatcgaagttctctagtgtaaaggtatatgtggttggctagatacagacagaatagtgtcgattgaaagagcacatggatgctcaacgaatctccctatatcaaaagaagtggattacaaaagaacctttttatataattttttctcatatttaaaaattttctttggattttattatattactctacagttgcctctcacttcacatatgcactttgattatcatattcatataccatcatcactttttgccataagttttttttctcttaaagtgaacatagtaatatccaacctaaatcaaaattttatgtgctagctatttcttagtttatgcacatgatttttcacatgaatcaaccggtacatgtaatcaaagcatgagaaatgaagaccaacaaatggctaaacaaatggcactctaggtttagacgattattttaaattggagtttatgtatttagatgcatttgacatgagtgttcaaagtacacaatctctaaatgtacacttcaaattttcaaaatattctcgaagtaatatcatggggaaataaaaagaaggagaagtggtttgcttttatgggtgtgaatctataaatgggatgtttcctcctcagtaaacactcatttctttaaataaaaacagaaaggggaccatttgcatgttgcatcttctattacatagactcatccccacttgcgaattcactacccccaccaaacgttgccgttttagtaaactccatactctatgtaaggtacgtacaagttacaaaaaacactaatatatgtatgtatgtatatacatggtcctagctagctagctacaactcctagggtacacataccggagccatcatcatcaatttatcatcgacatcgatttatcattatgatcatcatctctctctccttcaatatatgtagcagtggcagtaatgtgggtgatacgtttgtataaagctggaaagcaacatttggatccactctctgttggcttaagcatgcttcttttaactcttctcatgtattctctctacatatttgtaacattataataactcgcaatttgcaacatatttttatcacatacttgaacaaaagaaaaattagtacacgacaatttgtattttaatgaaaactgttatatcatcagaatctcaaaagtatatatgaaaatattaaaaaatatcatatattagtttgtgataacaatatttctacatttatttgttccacattgaaattaggttttattaatcttccaagaaaaaaaaagaagaattctaattaagttgcgatcaatatgcttcaaaaagttggtagcaattgttatttttttataaaaaaaattcaatagtaaaatatgtattgaactttgccgttatatacaaaaaagaactgtactaaaacctttttacatattttacagtacactgaattttcatgatattagaactaaagaactttgtttttaaaacataccacaaaattatagcaaattaactttagtcgtagtttttttaattttattataatattgttggcaatcaccgattaggtgtggcttattaacgttggttggaatttataaatatgaacacttttatttgacttcgggtgcaaagttaatgattttatcagactatcagtcatcacaatcaactaactctttatttagcatctaacgttgcttttgatactaaagaaaaagaagaaaaaaaacatttaaattatagtaccattgtattcgatagatgatccaaaacaaaaagataagttcgagcatcacatatataggtctgatcaagtacttctcaatttgcatacgtatacatcaaactgttacatcagcctcctcgtgagccatatcgaaacatgtatgacaaatttgtatgcctattcttcgcaattatattcgtgtatcgaactatattatttaatttatactatttttaattaattagagaattgatacacgagtaatctcatagctgattttgtctcatataaacggtgttaacaaaaaaaaagaagaaggaattaacgtacatatgctttagtacacgaacaatatcgcttcaaaattaaacttgtttatgtaagtttcgtacaaaaatatagcatagcttatagttcactatcactacgtacgatgaaattcttcaaccttttatatattcactattaggaaacggatgaagtatgattaaaccaatataggttaattcttttacgcaaaaaagtcaaatcattaacaaatttaaaggattaagtttcgagtagaccgtgacaaatcactaaactagaaattttacttcagcagcttgaagcttataagagtaaacatctttacccttacttttgcagttagtgttgtttgacttattggtaccaaactaaaaccttaaaaaaaaggaacaatgaaatagaaaaaacttctagaccaatcagatttttttctttttatctctaccaaatacaaaaagtcgttgtcaaagattgtccatatcaataattttcaatatcttgcaatatcgcgtagctgtcacaaaccaacagcttgcccagaacctatcgaattttaggtagtttttgcatagaaatggtatcatcccattgttagtgataaggaatctttttgaggaaagttgttttattattcaatttttctttctatacatttacagcaataaataattaaataacaccagtttcagatactttatttattacatcttctatattaaaaaaaaaagttgtaacgtctagagctattaatcactataccagcggtaattggcattgtggtaaattacaagaacaaatggccgtaaaacatgtgaagtcggtaattaagcatggatactgtatgtacatagataattatatatgtcacttttagataactaaaatatttttgtgacaaagactggcacttgagtcaataattagagattaaaaaatatataaatctcatttatatatcatgagaatattccatatgagctcacttaggtatcacatgtattggttataataccactcacatacaaggtttttcttttgttacttttcctaagaaaatttctataacgtcttataaataaaaactataaaaatatctccacaaaaattcttaatgtttttttgtgtgagttaaactgttatttattggtatgtaagtgagttataaagtagttgcacgattagtttatattgaggccagaaaaaaatgtaatgcttcacatagtattatatagtctaagagttcccgtaggttatactttatgcatgtgttaacctcactttttcatggcttaggtcttaataatattgaatatgaatcataaagataatgtctcagcggtggagttttgaaaactatattaaacctaatgatgagtctaataaagcctagtatcaatcaaataggacaacaagaaaactgtcatttttttctctccgacatagaaaatatagtccataattctgaccatatatataattaaacagttaatataaataaaccatatatttcgtactattatgaatgaaattaaattaacttaattaaatcaagaccggatgcaaaattacaaatcgtccaatcttttcaggtaaatgtttgatatccaatattaacaattttcatagtaatttacaatatgaaagtataaaaacagaaaattcatccattgattaacaagtcaaagtggtagaaattttacacaacatgttattacatgcacatccgattaaaatctaacatcttctagaacattaatcacattatataatagaaaacaatcaataattattcattggaattattggttatcaaaacaaaactttatttccaaaaaccaagaataagaagataaaataaagaaagaaagaaagaaaaaaagagggtccccatcaatgtagtagagaagtaattaatagagttacagaaacaagcaaaaacaacacacaaaactaatctgtctctgtaagatgatgagattagagaagtgcatgaggctcggagaatcggcgtgacattattcaattttattcacggttctactttggaccacttttctttaacgccttttgtttgtcactcgttctttttttctttctctcgattttatttcactttcgacccttaaactctccataaattccgaaactgatccctcaaaaacattattctatctctctccttcacgttctcctccttatcccttctatataaacactcgtcttcttcttcacttgatgaacagaaaaatctctctttctctttcttgatctgctacggtgaagtctatggtgcaccggcatctgatgaagctgccagcatgatctaattagctttctttatcctttgttgtgtttcatgacgatggttaagagatcagtctcgattagatcatgttcgcagtttcacccgttgactgtcgcacccttctataaaccctaaattttctctctatcttttttagtttgattttcaagacactttgtttctcaatcttcagtctgattttgtgagcttacttctctttctgaggctatatatatttctttttcataagaattttcactatattgttgtgtgtatgtggatctgaagaatttatgttttgttagggttatagagttgcatgactttaggaaaccctaatttggtctttgacaaattgagtatatttttttgggttataaatatgaaaatcttcttatgatgaagctaggaaagaggagctttgttttttttacaaagattatggaatttagcaaattcagttaattatctataattacgtttttggggatctcaagatagacttcctagttcttctttttactcatatctgttttaagaaaagactttcatgtacatttttttattttttttggcttatgttagtttagggtttctgggaagaagttgaaactgaagttgtacactattgatacatatgtagtttatataagttcgactaaagatttttggagtttatatatagcagttgcccggagctcaaactctacttcctgatagattaaccacagatatgctgttaatcagaatttgaagaaaaataaagaatctgaattttttgaatagtttactagaacaataatgatggttgttctaagaaaaatgttgtgcaaaagacttttaggctttggagtcattcggatttggcctcgaaaaaaatggatgctttctgtaatttggatggcctcatggatcttaaagatgcatttagataaccagaaacatggtgagtgatggaagaatcaaatagtgtttcaaattaaacccaagaaaacacgagatatacggataagtcaatttttactgtttcattgctggaaatggtccccttcgcatgtttaagataatacacataaactagtgtcaagactcaaaatcactacattttaattgtaaaaatcaaagttaataatataagttttgttcattatcgaaacatttctcggcctcatgcttgatcaaaatttctttagtagccaagtacaaaaacgatcatcaatatcttcttccttttttttgcttttaactcagcgatcgtcatcaactaataggtacgtctattaaagggatgatatgattcggttaatgggattttgaaactttggcttttctatatgtatgggaaaactccaccgaatgtacaattttttctttttttttgtcaaatttaaaaatgagattctccaagttgctttcgtctctttcagactttcctttaatggttttagttcgtcagttacaaaagaaattcgtctgtatgtacataattacatttgtggatatatttacaccaaaatgtatcactctctcttccgtatcacattcaattttctccaaccgttacttttacttctccaagaaaaggtccagcatttctttgcctttttcttttatcacgtacgtttatatatacgtgtgtgtgtgtgtgtgtgtgcgttttaaaagatgacttagacattttattttctttaagaaagctttttaagttttaaagcaagagactatattaaggatcatcgtaagatttagcaaagtctaacccaaaaaatacattaagggaaatttttcagcttaatatcaaccaatttagagatttctaaaaaagaaaattaaaactttttttagagatttatatttttaaaagagatataaaattgcctacagaaaatcttcaaataagccaaaccagctcagtttatgaatcattaaaatgaaacttccttaccaatataatttcaaacgaaaaaaaaattccgtatcgaatttttttgtaaagaaactcattttagtgggtttttataagctagactgatgaatttggtcgaagtacagcttattggcatctaactcattaaatgcaaatatcatacaaaattcgtaattacatgtaaatttcttccaaaattcgtaattacatgtatgtaataatctaattttgtgtgtgttagtgatattagaaatattattgaaaaaataatataggcatcgtgtgcaattttcaattaccttcacaaatgaagaaacattccgagcatatctccttggcataatgagtgggattttagagttaagccaacgaaatttgggcctaatttttcatcaaatacttgggcctagtcatcggttatgtcattgctacttatataagacccataggtataccgataaagtcttcatattgagatccaaaggccgggatcgaacaagttttgttcttattgaatcagcgttagacgcagccttgtctttattatgttcttcttcatccgttagaaaaagtatccgtatgatgtccattcgtttcatttgtaataatttgatgaagtcttcttaaagacatttggattggagttagaatgttccttcttttatttttcttcaggacacttggagtctcggattagtcaagagacttcgatcatattttctttatcacctcttcttcaatttatatggatcatctttaggaaaactataacgtgttaattgtgaaattatgatacaaactttataattcataaataaatatgtctgtgcatagtttttttttttaaattatccggataatgattatgagagaaaagcaggtaggtcgatcatgaatgtttaattttggcacatgttgaatgtgaggtcccagccaccaataaactgatcaagtcctacattatccaattcctttaattaccttaaagtatttacaaaatttgaattagtcaaatctttgagttaagacaccaaatgattttacaaaactcgaataatataagaagagtatacttgttgtaaccttggagtactacgaattcaacaatttgatgaagtgaaaacatagttaagaaatgattgggagattattcatctaaagctaccagtctaccaactttccagttttgacaatatttaccacgtggccctgaggaacatcattgtcagtttatcaaacactccatatttcgtggcagcttcgggtcaagaatccaaattggtattgtcacttggtcaggtcaaagttgaggagcttttatatatagtataatcaatgagtcggctaaaatgtaaaatacatgttctaaattaaacgtaataaattactataatcgtatcaaatttatccctcttatcaaattagtactttcgagtttcgatattgtttttctttctctgggaaactatatatatttacatttctagaaagaaagaaaaaaactatatattacattttatacgtgctaagcctagaaaagattaattacaaagaaattatacattttattgatcaagtggtgcttaaagcagtaaaaacaatttgaactcataaatcgtaaatacgtcgacatatttcgtgatctccattaatttttctttttttaaagattgacgcaaaataatattctgaaaatgaaaaagtaaaataagaggggacaaatattcgagatgtgacgtggcagatcgagtggtttaaatattctattagcaagtggtttgtgtaataagcaaatgggtggtcgaacctgaccgtattcttggatctattcaactgtagcatcagtccaccttccttacctcatctttcctaactttttaatacctttttaatttgctaaaaacatcactactatttatatttgatctctaattactgtttcaactctgaatattccgtaatccttatattaatatgtccaaaaatatataatttctggactttcccttgagatgggaatatgaaagaattgcatcatttacctaatcatatgaacacaaatagatattggaaaaaatgtggttttatttttcatgttttgttcgattatctttatctttatcccaaaaaaaaaaaaatcattcgattatatctaaaattcaaaatagattacagaaatataatttattagcaaaacggcatgtttaaagcgtttgaagttattaaatcattagtaagaatatataagaatgtaattagtggaaatacatagtaagtatcattggtttttgccacatatggtgagcaattttttattttaagaagggaaaatcaatttgtacatagatttatgtcacttattcaattgaataatacagaaggatttaaagtctaaagtaaaaacaggcaaaataataatatgtttttttctttgatcgctcagattatcgtattaaaatttggattatgacataacaacgataataatacaaactagttggttatgaactctgaataaattattttaaagaaagaatactactatttaattataaaatgactctgcatcatatcaataaggtaacctcgttattataaacgtcacactacacactattagtattttaattacacagtgaaaaaatttaattaattactaatctctgtccaggtacataatattattccaagatacggtccttcgttactataaactctataaaaaccaattttcacttccaattgaattgggaacaaaccaaatctctatctctctccattagagcttgaagcagccatagcctaacaaaaccttcaacaatggcttcaatggctgccgtcttaagcaaaactccattcctctctcaaccactaaccaaatcatctccaaactccgatctccccttcgccgcggtttccttcccttccaaatccctacgccgccgcgtaggatcaatccgagccggattaatcgctcccgacggtggtaagcttgtagagctcatcgtggaagagccaaagcggcgagagaagaaacacgaggcggcggatttgccacgtgttgagctgacggcgattgacttgcaatggatgcatgtattaagcgaaggctgggcaagtccactcggaggtttcatgagagaatccgagttcctccaaactcttcattttaactcgctacgtcttgacgacggctccgtcgttaacatgtccgtgcctattgttctcgctattgacgatgaacaaaaagcacgtatcggcgagtctacacgtgtcgctcttttcaattccgatggtaaccccgtcgctatcctcagcgagtaagtccttcttcaacatactcagattcaaattcagatcatagattgttggagaagacgaaaactgagatttgaatttgattttgaacttatctctctttgagattagttaaatacagtataatctcgataaagtaatactcgataaattaataactatgtattcacgattagacttagactagatctgattaatcttgagattagaatttggctatatgtgtaattggttactgaaatctgtttgtttttatgtttgatcagtattgagatttataagcatccaaaggaagaaaggatagctagaacatggggtacgacggctccaggtttgccttacgtagacgaggcgataactaatgctggaaactggctcattgggggtgatcttgaggttcttgagccagtgaagtacaatgatgggcttgatcgtttcaggctttcgcctgctgagttacgtaaagagttggagaagcgtaatgcggatgcggtgtttgctttccagctgaggaatcctgttcataatggtcatgctcttcttatgactgatactcgtaggagacttcttgagatgggttacaaaaaccctattcttttgcttcatccgttaggtgggtttacaaaggctgatgatgttcctttagattggaggatgaagcaacacgagaaggtaaaaaaagttattgattgttgtgtgtctcttgagtgtgagtgtgtgtatcttgaaatgctaaatgtgtttatgaatgtaaaacaggttctagaggatggtgttctcgatccggagactacagtggtttcgatattcccgtcacctatgcattacgctggtccaaccgaagtgcagtggcacgcaaaggctagaatcaatgctggtgctaacttttacattgtgggtcgtgatcctgctgggatgggtcatccagtagagaaacgtgatctttacgatgctgatcatggaaagaaagtactaagcatggcaccaggactcgaacgactcaacatccttcctttcagggtatatacaattcgaaaagattcacactttttgtttgacaatgtagagatctaattccttggtgtaactgcaggttgctgcatatgacaagacgcaaggcaagatggctttcttcgatccctcgaggcctcaagatttcttgttcatctccggcactaaggtaatataccagtcctacattgttaaaattcttcatagtttgtttataaaacaaacctctaaatgtttttcgattattctagatgcgcacattggcaaagaacaacgaaaacccgccagacggttttatgtgcccaggtggatggaaagttctggtggattactatgagagcttgactccggcgggtaatggtagactaccagaagtggttccggtgtaagacaaaactgttcgtttcaaattgtaacgtttgtgttgtgaagccttgtagcaacaatcattgttgtattgggagagaagcctatgtataatctggcttgacctttttccaaataaaatacagaagaaaaaaagactgtttttcgtttgcaagataatttacgaaacttgtaatatttgggcctcaaactttgtaccatattaatgaaacgattgtttttacatataaggatttacgtatttttgacttttgactacatctttttctatttaatcactcacttttttttttttttttttcgccatttaatcactcacttttgacttcatatatgtattctagtagtcgtacccaattgttgtaatgggccttcaaaggcctcttgtagtaatgggcctattaatttgtaaataaccaaacccgaagtttcgtctcctgagtcatttcacgactgatgtttttcttctccgacgctacaatcggtgtctgtttccgaagttgttcgttccattagagcttcagatttcgtcgtttggtaatttcaagttagagctacttaatcttttgatctgtcaaaccaatttctcagataaattcactctagggtttgtgaagaacgatgatatgatcacatttcacaatgcaaacggtgctaagcttatagtaaattaatggtggcttgatgcttaattgaaaagtcggaaacttttttattcttctttattgtttgagattcatttcaatggttgacatgtatgccaagtgtttgttaaaatgtctaaaagaaaacttcaagttgatcactttggtaaaattggttagcttgtttctgtagaatgcataatctttagtgaaaatgtgattgactacttctgattctttgaaatgtcactgtttcaggctgaagaaaatgttcatcaaagtgaaattgccatgggatgttacgattccagctgaagatatggacactggccttatgcttcagagagctattgtcattcgtctactcgaagccttttctaaagagaaagcaacaaaagatcttggatacttgataacaccgacaattcttgagaacatcggtgagggtaagatcaaggaacagaccggcgaaattcagtttcccgtagtttttaacggaatctgcttcaagatgtttaaaggagagattgttcatggtgtggtgcacaaggttcacaagactggtgtctttttgaaatctggcccttatgaaatcatttacctatcacacatgaaaatgcctggttacgagttcattccaggcgagaacccgtttttcatgaatcagtacatgtcccggattcaaatcggtgccagagttcgtttcgtcgtgttagataccgagtggagagaggcagagaaagacttcatggctttggctagcatcgatggagacaatcttggtccgttctaaaaagattgtaatcttaattttcactctatatatacatgttatgtaaaaacgctgttcaatgaaaatgatcaatctttattcaaatctgttaaacatactaaaagaaaaaacaaatcaatgcttcataatgtatatactaatgtaagatcaattcaagagcctctttcatgatctcttcttccatttcaggtagctaaagaagtgtctctctggaaccggaacagacttcactaaccatccaatcggccacgatgcagctgcgatggcaatgcaaactccccattgacccaagtttagcctctctgtatcagcaaatctcttgagaaactcaaccatcacaacttgcaaaaccacagtcacaactataattccaatgaagagtctgttcttgtgtaaccctttaaacacattcttcttctccaaactcctagcgttaaactcgttgaacacctgacaaagcacaaatgtattgaagatcaaagtgttcttcactttctcagtcacgttgaaaatcgatcttcctctaaactgaagcaccaagagcacagagatttggtaaaacgcttgagctagtagattcctccacatgatgtttgtgatcaatggcgccactctccctatcggtttcttcttcataagatcgtttgttggcttctctgtagctaaagccaatgcaccgagtgtgtccatgatcagattaacccacagtaactgaaccgctgtcaaaggaacgtctccagctgaaactgcagccacgaagttgatcactagagcagctacattgacagtgagctgaaactgaataaacttctgaatattgttgtacacgcatcttccccatttcaaaaccgttgcaacagaagcaaagttatcgtcaagaatcacgatatctgagctctctttcgctacttccgtaccttgaatccccatagaaagtccaatatcagcttctttcaacgctggtgcatcgttagtaccatctccagtaaccgccaccacatgacctaactccttgagacatttcaccataagaagcttatcaaagggtgaagatctcgccatcactttgattctttcgactttctctaatctttcttcttgagtgtagtttcgaaacttttctccttctaacacagcttcactattcatctcatcttcaggtgtcaagattccacactcaacagctattgctctcgccgtgaaaatgttatccccggtgatcattttgatgtttacaccggcgaattgacaatcctcaacagctttcttcactcctggtctacacggatctttgattccaatgatcccaagtaagctcaacttctcttctttcaacttcttgttgtcctcattgtcttctgaatacgcaaaggcgatgcaacggagagatttagctgccatagattgaataatcttctcaaactgaatcttatcatcttctttcatctctctcacaactccagaaccatcacagaacgttgaacacatagctagaatcttctcagcagctcctttccaatgaacaacattgttctctgtgtttacgcctttcttcttcatcaacacaccacttctcttcttctctgaattgaaaccttccacatgaacaacatcatgttcttcaatcactttctccatacccatctccagttcctcaaccgcccagctaagaatcgctttctccgttggagaaccagagaactcatactctgttcctgctttagccttaaacacactccctgtagtgttcattgcaactccttgatgaaacaattcaacaactctctgagacacagaagaagcttttcctgattcgagaccgaaccagaaatcggttaccttcatctggttaagcgtcaaagtaccggttttatcggtacaaataaccgttgcagagcccattgtctcacaagcagagagctttctcaccatagcattatctttcatcattctcttcattgaatacgccaatgtcaatgtcacagctaatggcaatccttcaggtatcgcaactacgatgattgtaaccgcagctgcaaccatcttaaccacagcgttcactatctcatcgctcttcgtagtctttccgttatactcacggtttccgctctcgtctttcgtggttcccgtgaagtaacgaattaacagaaccaaaagaaccaagaaagctacaagtaaaccaactttacctatggaagaagtaagcttatcgagacgagactgcaacggagtttgctcgttagtgtcacgcgagatatgactcatcatttgtccccaagctgtgttcatcccaacggaagtaaccgccattttaccgaacccatcagctattttagtcccggagaacaaaaatgtgtttccggttaggctaacctcgacatgatcgctttctccagtcatgcttgattcatcaacgtgtaacaaatgtccttcaacgaacactccatcagctggaacttgatctccgatgttcaaacaaacgatatctccaacgacaatatcaaagatcgaaatctcttgacgacgtccgtttctaacaacatcgatcttaatgttactacttactttagagagtttatcaaactgtctgttctgtctgaagttgctgaccgcagagacagctaccaccaagaaaaccgctacgaatatacttcctccatcgtaccatccttcttttaatccatgctctttgataccaaacccgagagagagcgttgcgcaaccgagaaggataagaatcgttaagtccttgaaagcttccaccacaaaatggaaaagacccttcgatggttgtcttgtgtaagtgttggacccgaacgttgaacgtctacgttgaatctcatcaccttcttcgttgatcccgagacgtgtgttactcttgagagctgagactaagccattaggaccaccaagagactcaagtttctcttggttcttgttcttgacgagatcgtttaaggtttcagtatcaatcttgaagtgatcatctccatgatggtgatcaagatcaatggcggtgtatgaaagagaacgagggaacaaaccgggttttcggatagcgtgtttggcgcaattgaggagagttcttgaacagtagagcttgatcaatgctaattgccattttttgtttgatttgcttagggttttgggaagttccagaagaacctcaacgcccaccttgtccttcttctctgcatgatcagatacgtttctccgcattgtttctggtatttgctgaaccggaattgataaaccgaaaatagaacgaaaaccaaaagttgtaaatttgttgttttgtgaaagcgatgggtaagaatgcaaaacaagagttgatgttgtgatgtcaatacaatctgcgttggttttttatagttagttcattagtcggtcatttttgtagcatccacgaagtttcctagcaatcacaacgaaagccacattcaccaaaaaaatctaacgcttttaaagctcaattaatattacaaaatgaatgaatcaacaaataaatttaacattataaatcgaggagtattaaaaatattattcaattaagcaaaaataatccaaatgaatgaataaatgaatgagtatcaaatattaatccacgaaagaataagtcaaccaaaaataaattaagtagatatttgcttgattttctcaatgatccaaatcccaattgaacagtgaaatttctgagaagcaacagttcgaaacagtttcgagttttttcagggaaacacgtgtcagcttgagctttataagataaactcaaaactcaaaagtcttttgacctggataaatttttttttttttttaaacagagatgacctgtatttttttactatagtatataggatatgtatgaagtgtgtatagaccgtgtttttattaggtgtaatatctaacattcgttattatcaatatgaaggaaataagagaaagttggccaagtagtggtatatcgatcgacatgcctacttttatacatgtaagtatagtatattctttgattaacgattaagttattgaatttgataattttaatttatttctattaacttcttcaaaatactttattaaacatttaaagagtttgatacgtgtgaaattcgaattaatctcagactgtagtaatggctgatcctaacatgaaatctatttaataataaggtgacacgtttactattaaaaacctaattaactcctacatcaagtggaaatattgtggcttgttcatgtgttctagtttgtggtttcgaatacacaagttatttgaaaaatctataaaacttgtcctcgtaatactagatatcaatcatattacctagaccctacgttatcaatcttgtttatccaaacgttactttttggctatatattattacctactaacaaattacttggaattgttgtaaagttgttaccaaaaaaaaaaaaaagttgtaaaagtggacagtaactttttgacgaagtcagggctttccacctcgaattatccgaatctgatcgtcaggcgtagagaaatttcatatgttgtggaaagaatttaaaggtattgcttattttagttaataagcaataataacttaggaaaatgagaaccaaaatttctatggggacttaatgtagcaagtctcaaccactattaatggattcctcgttggaaccactcatcacattttcgtctacgttatatatttcccgtcaagagaaacaaaaaaaatggctagatatgacataaggaagaagacgtaagcaacaaagagtcataagaaagtggaaagatttgggaataaattggtatattatggcgaaatagggttatggttagtttacaattgagaattgacccaattttttaactaatttgtggattacttatagctgaacacatgtattttgcttttgcactttgtagatgatattttttgttttgttttttaatcatctggttttcgcttaacttttttttatcaaactatatttgctgcactttaaaacctataggccataagcccaatacaaataaacatattatgaagattcaagaatgatggatagtgaaatttaacatgtaaaatctaccattcaggtttagttttaggctgttggacatttgtgaaatcgaaaacttgtcttggacatttgtgaaatcgaaatcgaaaacttcttgataaaaaagaagtccctaaaaatacatatcataaacattttatggggcccaaaaaattctgttctttttttttgtttataattgagacttccgtcgttcatataacttttcttcgatagtacgctactgcaataacaattataaaaaagaagaagcatattactataacttatccaatgtggaagaatctgtggtcatttgttattgactacaaattatatataagtcaattcttaattcttaacgtccgttgaccaaagtcattttatttgtattgggcttatgtatagtcggtccacttttgttctctgagtctctgacgctgatgttttgttcttgcaatagaagcatgcttttccattcacacggataaaatttagcatcatagaaagtaaaaactgtcaacaagaatagtgttctctacattacattagcaaagctaatttgatcatttcaaaggtccttcttcccagctcattagcgtacacaggtttgcgtaagtatccttagatgtaaatcaatcctttgtaatttgtatgatctgcgatcaaaattttgttaagcttataaaaaaggaactacatcaaaattgaaaacactactaactaaaggaacaccaactgctaaaaaaatcaaactaaccaaagctattttatttatcaactccattaatccacaacaaacaattaatataaccctaaatcaaatcattccccttaacagctcttcaattctcaaatattccgctcagatttatactattcagtcataaaaaagaacaaaagattgatccgaaacgataacggaataatacccatatatatgctaacgaaggagcctcctatcctagcctaccaaaagtagaagaaactgaatcaaatctaattccattttcttagaaaactaactccgaacaaagttgagaacacaatttattaaaaaaaaaatgaatatgttgtttggtcaacattagtcaatgccagattttgatgatcgaaacatcaaagtatgatgattatggtgttggcaacattacttatgtttgttcgtgtatgtctgtatgtgatgtcaatacttcgtataactaacgagacatttttaaaatttgcatgtgtgacaatgtgttcggttgtacttcgtgtagctgataaacatttttccaatattaaatggtagccaatttaaacgggaacaccaaactcggaatgcacgaaacacaccaaaacacccaaatattaagcaacacatgctatggcaaatatcttctatgagcttacaacagattttcttagtagcaaataatagctaaaatttatgcttatcattcattgataggctagctatcttaaactccaaaagttaaaactaaattaaacgaaccaagaccaaaaacacatcaaaaccatgcaagcaacaactatatttataagataatatctttcagatctatcatctgaaagcccaccgcagtccgcaatcaccacgggcttgttatcctttgctgttttaattatgacctccttctcaatgttcttcataagataacatctttctgacctataatctgaaagctcaccgcagtccgcgatcaccacaggctttgaaggcgtccttgttgtcgtagttatgacctccttctcaatgttcctcataagatccaatccttcaacaactttgccgatcacaacgtgatcaccgtccacttgcaagccatagtccttcatgtggatttggaactgagatccgttggagtcggccatggagatgatacctggaccgtcttcgtggttcaagataaagtactcgtcgtctaattcttcgctgtggatgggttcgttttcgaagatgatatctcctccacaccacatgagatcgggaacaatatggtcgaaggttgatcctttgtagtggattggtttaccacactttccgatgcctctctcgccggtacacagacccctgaagttctccgccgtccgtggagtcaagtcagcgaagagctctatcacgatccgaccagcgggtttgccatccacggtcaaatcaaagaaaactttagggttagccattgtcggagagaaatctagtattagggtttctatggtttagcacaatttttataacgtaaataccataatggagcaaatagttcttatatatcaataatatagattttccttgtacaattgctatttagtttaggaaaactaaatccaacagttgaagggctttataagcccaataaagaaaaaaaatctttaagtaatgttaaaaacttaaaattcagagaaacttgctagtcaataataacaatttcatattggataattaaagcccaagtatttgtgaatccatctctttttatacagtactttcgatcaccaaaaaaaaagaagtgatgaagaatatattcatccaaatcatatctctagttcttattattttagtatggttgaactcaatgatatgatagtatatatatttagatcacatgtaaatctaaaacaaattagtggggaaagaactagtaaaatttattttacatcaattttgtagttgtaactgaaattgtataaatagcggttgtataatgctaaacctggttgggcttggtatatttcagcccattggtccatactggttggttataatttgtaaatggcttattcgttgattatattcggctattcgtctcatagaagcatatatatctcttggtcaaagtcacgcactaaaatttggacaaacttcacatcgactgaaagaaacacactatacatcagatacatagtaagaatccacacgcctaaaagaaaaatctacttgttcaattgaatataaaagcttaagattaatttataatgcgatattccgaaaaaagaagaaggattaaacaaatttataaaagataatacaatgaagagtaaaaatgattaggattttttaaccattgatcatcatcatcctgacaaattcatcataattgacttggccatcaccatccaaatctgcctcttttatcatttgatcaacctcttcatctgttagcttctccccaagattaatcatcacatgcctcaactgtaattatatatcaaaattacaaagattatagaattactatctactaatgatgtttattgttaagcatggatcatggccaatgcataagatatcgtccgtcgaatagtttttgtagataaataaatctatgaaattcagaaacaaaaagatagggaaaaaagagcaactctaactaaattgtaaaaataaatgtaatagatgaatactagtctttgttgagttcttatattccaagagcaaaaatgttgaactatatattcgaacgaaaatgcatgattaagaagaagaaactgggtgtgaaagtataaacatattatttacgcttaagtgagacatatgctctgcccaataaaccaatagaatcataaacacattttactaaatgttatcaatatttttaaatatttcttttgacctcgttatctccaaaaagtcataatgccagctagctcgaagcctcaaacaatttagctttttacgacacaagacacttttcaattaattaagaaaaacataattagccatatcttgttgtcattttctgctccaagttatgaataagacacataaaggatctcttgtaaaactcgaaatatcgtctagacttgtgatctgatgttttcattaattcaaaagattctaaccttgatttagctatcaatttgttgtcattttctaactaaatgcacaattgttgataaaaataagaaaatacataaatctaaattccgagcttgtgttctactcaactcaagtaaaataaaaaattaatactatttgttttttgaaaaattggttcatgtaacgaaactagacaaaataatactacaatcagttaacacataagtaacatactcctttttatgcttccaatcattaattaaaggagtattagtatgaattagaattaagagaagaaagagtaaattatttgcttacctcactggcagagatgtaaccattttggtctttgtcaaacactttgaatgcttctttcagctcttcatctgcatcagtttcctataaccacaaaaaaacaaaaaaaaaacaatcaatatatgttaaaaacaaatatgcttcattgatgtaacattttagaattgaacctggagttggttagccatgaggttgagaaactccgaaaattcgatggtgccgttgccatcggagtcgatctcagtgatcatatcttgaagttcttgctcggtagggttctgatccaatgagcggatcacagtggcaagttcatcagcagtgatgcatccatcaccatctttgtcgaatagacaaaaagcctctttgaactccattatctgttcttgcgtcagttcttgttgttgttgttgttgttgttgttgttgttgttgttgttgttgttgttgttgttgttgttgttgaatttcttccatccaattaaaacttgcttagtagtcttcttcagagagaaaagagaagagaagagaagagaagagaagagaagagagagagctgaaaagctttgaagtgcttcaactctcattctgttttcttatttgtagaagtctttgcgactttcttgctttggactcattcacctttttccacttcttttcattaaaagttatattgcacaaattattggaaataaaatactggagtggcattttcgtaaataaaattattctttttgccatgctgaaattaaataataatggcattcctgtaatattatttttcctaacaaagcaaataaaggatattttagaccaaaatattactcatataactcacatttttgatatatcattctagtaattaaacctaaaatatgggtctccctagtaaatttcccaattatttatttggaattttaattccagtcacatgattcaaaatattatttcctttaacaaagttttatacgaacttagagctttttttttttttgaaagggatatttttaggctaactagtaatttgattgaaactctttaaaaattctttttgtactcgtaatattatatatttgttttcttattatacacggctaacttgaaagccttgaagatcagaatcacgtcaatattcttgaaagttactatagtgtggtaaaaaaaaaaaaaaaacaatttttgtcgcacaaaatacatataataccaagcaaagacattatgcagatgggttgtgaattgtcttctctgtttaaatagtgttattttactatttttacgtaaatttttaaaataagaaaaaaacttacaattttctttgttacaatattcaaactaatttttcttctctaaataaattaaaaatagagaaaaaatttgaaatttgatttaaaaatacaaaattactttttgtgaaatgaaagtagagtttcaaaaacgatactatttgttttgtgaaacccaaggaatagacgaagagtatgtagtaatttgttatagtaaaaaaaaaaaaaaaaaattataaaaacatgaagtatgtgtatatgtaaaataaatgggtgtgggtttcaacagctgtaagatagatgacgaggagacaaagagcattgaaataggtagaccgagcacttgcgttacgggaaaacgtgtcgatctcttttattcctcaatttagtcattttcttgatttattttgaataaatgtgtaatttgataaaacaaccatcatttatttagaagcaaatcgtactttttgaatcttctacacatatatatatatgttgccaagaaaaatgtacatcttgtggttaatctgtttcttgtaatcttattttcagttattgcattataatctataaatatagttcgacagaaagaaaaaaaatcctaagtttcacaattataatttttacaaaatatttttttttaaaatgtacttgattaattgattatgtaagttacatttgaaattgtatgaaggtgttgcaatttgcaaagttcatctaagaatattttcatattactattaatagtttgcgactttgtgtagataaagacttttctaattaaattaaaagctgactcagcttcaacgaatcacacaccattttgtgtagactttgcataatgataccgacatctaaatgcatgcttaaacttgttgactaagctgaattggccgtgtcgcaaacaatcatttaggttcttaatcaaattagccattgtggaaaaaagacagaatctaatgcgtaagagtgattaaaacaattcagaatctatctggaccaaaatcagacacacaaaaaaaaaaagacattttgatatgattcagtaatatttctacatatgaaatacgtaaacctgaaacaatttcttaacccctttaacctattacctatacaaaagaggaaattaagtttatctttaaatttgtccaaaaaaagaagaagttaacttcaactcggataggatttcgaagtgttaaatgatcgcattgaatcctaaactattagaatttgaacctcatatattatggttttatttctatacaaaatttatgactaaaattccaactgtacagggatctggtgattcccaagacctaaattcaatactattgaacttttcctccatcgcaacatgttgacttgactagaatgtagatattcgaaaatattaaagggaggaaatgatgcatacgataacgatacgaatatacaatcatttaaatgagcaagttctttttttgattgatatggtcttgatagaacttagtgatttaataacttttgtacacaacaatttaaataatcaaccgtattcttgtttacatggtcttgatataatttagtaatgctagctttatggtaccattatcattacactaactattacacaagcttacgtatagtgtttggatgcgttttgattttgtaaagtcaaaagtgctaaatgtaaagttgtatatgacccaattaatgttattgcttttagttttgtcttttgtatttgaccttttttgtcccgcaaagattattgtagatgttgaatggcatcttttaaggggttgaaaacaatttaatgccgtatatattaagaaggtacactataaatcgtactagtgtgtttttgagtacacatttacataatgatgtgaaataatagttagatttagttagagtacttgtcatctgaattagggttaaaatatgaggtctaacctaatcccaatctgatcaaagagactgaaaaatgggatttttttgccatttaaatctatattatttagaccggttcatcatacagtatatagttggtttactctctattttaatggccatggactcatggacctattcactgattatttcctcattaatcaattttgtcaaaacttttggttatgattagtttgaagtcaaaacatgtacttttctttttttacaatgaagactataaaaaagagcaacatctatacagtttatgttataccgattagttcttaatgagtatgaataaaaatttcgtcacttaatgtttataaatagaaatggaaaatatgataaacaaatgagaattgtgatagacgaaattctaaaagtcgtccaaatattgtagatggatttcgtggtcctttgtacatatcatgttgacgtacgcaatttaacactatttcatcatttctctctagtttttttttttcttttttggttaattcaaaaatgtcaaattgacaatgagaagtgtgtggttcatccgaattgatctctcctaatttgatgtatattctatcaaataaataaacaatcgaataattaaattatttcagtatccaacaattgatttgtctttggccttaatctttttttagtgactgaaattaaaaatggaaagaaaacagctcgcacagcttggtacgcggtttcactcttttgtcacccgtccaagatcttaatgagtggtcgagactcagagatggcattacagattcatcatatgtaatattgtacggagattattgctataaagattgataaatcaaacgtagtttcgttctcttgaaaaggttatagaaactgacattgtcagtcgaatactagctgacccaccatgccaccaagtaactctatttttctttgaaattgcaattttgattgttaaatgtggtttatgtttatgcttataaacaaagaacagtcgtttaatgaccaaaaataacacagtgaagaaagccataatgggccgttaaacatttggtatacaggcccattaacctttaatcgaccttcctcgtttacaacttttcctcttcgtctctgtgaattctctgaaccctaccaaacaaactccaattcgtgtaaaaaatgaaacttgctcgtcagattgaagcaatgacgatctctcatcttccaacggagttgttaggccaagtccaacgccacgggaaaacgttaaaataacgtgggcatgtttactttttcactccaatcagacagtataatttgcactataatagtgtgattctcttttttttacagtgtaacactatatttggtgcactattatagccacggcaaatattaaaataataattttttcttttgtgttaacattattatatattaaaatagcttatttagttataatagattatatatgatttgtaatgagatttaagtaatctaactaaggcttgtaactaaaaaataatttataagtactatttttgtaatctttaatgtaataaaatgatggattagtagaaaatattaaaactaataccgaagttgattgaaaatacaataaaataaattatacatttataacataattaaaaaatttaaaccacacaaacataaaaactaaatgcaacgagatatgttttaaaaacataacaaaagcttcacaaatggttaaggaaaattatttccggttccgctaagataattataatattgggtaaaatcttcttggttatttggtgatctttggtcttcaccttgatccggttctccttgaacttgttttccatgaaatggactttcttgataatgagatgctcgatattgagatccatgatattgggagccttcaccatcttcttcatgttggtttgtttgcgctcttttttccaaaattctttttctctcattttcaatatatgcacgagaggatggatcagttatagaattcaaatctgcaaataatattttattctcttctttcattctagctacctcgatcttctgcctttgaatttcatttctttcagaagtacctttagtaatagctttgataagtttatcattttgctccaaaagttgtttaaactgttcttcagattgttgttttcgctttgcttttttcaaactcataggccttgaagataaactaaaattggcatcttcactatccatatttagatcaattgaattcataccaggggaaggtgatgactcggtattgattgaaaatgatgaagatgacgtaacggggccatcacgcttatggaataaaacaatattacatgatataatgacatcttgtatcataatgcataatatgatcatcgaagatgagcgtgatattgatgcaccaattgaagaacgggtcgaagttccaattgaagaagttgagatgacgggtgatgatgatactcgatttcaagaatttttggctcggcaccgacaaattaaagaccgagaagctcatattgaacttagaaatgctttaattaaacatttgtggtcgcaatatactaattctgagaattagtacgatgtaatttatttttattatgtttggtttatcgattgtaatattatattaattaatgaagaataaaataatatgttgtgtttaattaaataatatgttgtgtttctttattttgtattaaatttgtttaatgtaataatttgttgtctaacatttgtttcaatattattaagtatttttaaagtattcatattttaggttaataatataataatagagaatagtatttttagtgtgacttttggtgttgtggttggagatgaaaaagaatttagtgtgaaaatcacaccaaatatagtgttattctaacacaattttagtgttgtggttggagatgcccttagaagagatactctcaagacttccattgaagtctacgagagcagtgagatcgacttgcaaaaagtgggactctttattcaaaaatcggagctttattagtaaagcagcagcagcaagagaaggagagtctcagatggtcgtgttgatggatcacaatcttcatttagtgagcttcttcttcggcagtgatacttctgtagagattaaaggtaaacgtatttgtctaaacgacgattcagattcagaacaagtcaagatatctcaagtttttcactgtgagggtttgttgttatgtatcttgaaagatgataactttagtcttgttgtttggaacccgtattggggacaaacaaggtggatcaaacccagatgttctttcgaaataccccagggatgtgacatgtacaggtacgctattggatacgacaacaagagacgcaaccacaagatcttgaggtttatagattatgaattccattaccctcgagacaacgttgttttgtggtatgaaatctatgattttgagtctgatttatggacgactcttgatgttactactccacattggttgataaattgtggtaaccgtggtgttactctcaagggaaacacttactggtgtgctaaaaaaaggaactctgacctttttctcaatgctgatcatataatctgttttgatttcacaagtgagaggtttggtccgcttctgcttttgccgtttagtgatttggatggtgttgttactctagcttgtgttagagaggagaagcttgcggctttagtttgtcacgaggatgttgttgaggtttggattacgattaagattgaggccaatgaggtattgtggagcaagttcttgacagtgaatgttgatttgggtgatgagattccgagttcactgacatatggtagttttttcatcgacgaggagaagaaagttgctatgatttttgataaaactttggatcgcggcgacacagttcacatcatgggagaggctggatatggtggacaagttgatctcggagaaccggttaataaaagacgttgcccacttgtgtgctcttatgttccgagtttagtgcaaatcaagaaacctgcaggattccaaaggaaacagcaaagcaagttagaaaagcgtcaatatgttcgaaacatatcgaaacttcgcgcacttaaaacccaaagttcttggacattaagtatgtcacttgaatgtcatcaacagtaagatttatgtttcttggctcgtacttcgatttattactgctatgttttagactgatactttactaaatattacatggcttcatcaggagcttggtagagtgagaaagcattgccagccgatttttgcccgtatagctccgtctcagtttgtttcgggccattgttgaaaggacttcctgtgcgcttttttgtcgatcaatagtttagaccgctcttttttgttgccactttcttgcttaggggagtctttagatcgagttttcttcatcttcttactaagagcctcatcgcttaaggtttagttgatgcgatgaatctcgaaaggattatgcttccatgtttttttcctttttttggcatgggaccatgtttgtaggttttgcttcttgtaactcctaaactttcattttatatgatatttacattcttatcaaaaaaaaaaatatatatattacatggcttcatgctaaaggacatgatattaatcagatttttaaaatttaaagatggtggaacctcaggttttcgataatataatttagagatagcttctgttatctggcctagtctctacaaagtttttaaaaccgaaccagcgactcgactagatggcattgtcgatatatctatctagcagaatttcagtagcagagtctttttagtgagagggtcaggtgcattatcagtccttggaaacatcaaagacaagagcaagttgttcatgctcaaactaaaagattaccatccaccattttgggatatatattcaacttcttactctttgacatcttggaagtcttccacatcctcttcttcttaggtcgttatcttcataaacatcttcttcagtcaaatctgcctcaccttctgagtagcaaatattttaaaccagaccatttgtacttctgactattcttctgtccgatatgtatctctttagaagatcttggtgcataatggcctaatggggatcatcattaattaggaaataaaaatcaattcttatatgtgctgagaaaaaaaaaaaaaagctttgaagttaaaactagaaataataaaacatattggattaaagataattaatgtggatccatggaatgatcgatcatgacgagaaataaaatattatggggaatatataaagaaagaaaaatgtgcaagatgattagtatgaaaataacattcccttagtttcacaatataagtgttttggagaaatttttgtttcgaatgttttcaaaattttatgcaaattatagatttttttatttttataattatatatatatattatatggtctattttatgattggttaactttttaaaaaaataaacatgagttattgaggtttcaagaagaaagttttatgtttatggccatcaagactgaaataatgttttgtttttcttatttccgtcgactttcgtctttttcaaaatcgcaacttttatatatatttttttctctcgcctttcgatcatcggaaaagctctttttcaagtctccccaactcataactttgaattttctatttgccccctcataaaatttgcttctattctctttgtttgttggagttctcaagatctgtttgattctgaatccttgtaatttttgtatccaaccagtaacaaatggggttttgtgaaggtttatgagtttcccatattcaaatggcgatcttttagtctgagtaaaattgtggttcttatctgtttttgttaaagtttcgatttttattttgagggttgaattcgagaaattttgatggaagcgggtagctccaattcgtcgggtcagctatccgggcgggtcgttgatacaagaggcaaacacaggattcaagctgaactcaaaaggcttgaacaagaagctcgattcttagaggtattttactctcctcttaatcttaaaccctttcttgtttcgacgtgcttgggccttttggctgattatatcatataattacagattggatcaatctgttgtttttgtgcttcggctctttttggatggaatagtataaatctgagtggagtacggtagagactttcaaagtttgaaacttttttagttttgggaatcaatttgatttaggggtttttgttgttgttggtattcaatgagtgaaaaaaaaaaaacaggttttgttgtagcagttggtattgtggggttgcttttagtgagttaatagtacttgtctcttgatatagttcctttttatatgcttaacaagattggatcttagattaatggaatcgatctgactttaagaaatgtagtgtagaactgtctccttttaaagagatttttgtgatgctaaatgttacttgagtgagagagtagatcctttgcgaacaatatgcttctgttgataaaacaaatcaccagggtcagtaattaggaaggttcaagaatggtgaggagtgaaactgaaatgtagtttaagctcttgagcatatttcattcaggtgtaataatatcttgactcttgatcccttgaggtttaagctcttgtctacgtagctgttatgacatttgtgaactcaaatgcttgcttaaaagcgttacaaggttttaactttcttccttcatttattatattcaggaagagctggagcagcttgagaagatggacaatgcatcagcatcctgcaaagagtaagaacttgttacataactgatatccggttcacgaataatcattccacaagcttgactagtttctcgaatggatgcaggttcttagacagtgttgacagcaaacccgatcctcttcttcccgagtaattcttcttctgttttctgatagtttcatttcaatagactgtgagatgattaggtctgatatgtttgcttttgtgactacttgcagaacaacaggtccggtgaatgcgacatgggatcaatggttcgaaggccctaaagaagcaaaacgatgtggctgctccattctttgatcttcctttccttctctcaaaatatttttgtctctacttcttccagaagagtgagtttgtgtttttacgttcccgcggcagtgaatttgatgtaattggcaaaaaaaaaaattgattcatttgtgcagtaaaaaatctattgatcttgatgtgtctcttaatttaagaagaccacagtgccaaattcacgccaccacaagaaaatctagcacagtggccgtcggtgatccccacaccaatgcatctcagttccagattgtcttggaaaagttctcgtttctcgatggtttacatgtcgtgttcgggcaagttgttgaaggactcgacgtgctcaggagcattgaagacgaggttggaactttgaacaggattccttccaagccggtggttatcgcagactgtggtgagctctgagagaggctacaatggtgtcttgtcttgttttaatggttgctctgtttttgtttttagttcgtttggattttgagtttggtggtagttttaaatctgaaacaaaacaagatttttttcttccatatatgaaaattctggacacagtttcaatgagagcaaccaaaatagttgaagcttgttacataaaagtcaagaggatacaatgttaaagaacatatgaaggagacaaaagaaacaaagaagaatagtacgtactctctctgattcagttctggtttccccttaactcgtggctttaccggtaactttttgggcaatccaaccgagcccatcatacaatccttctccagtaaccgcacaacttgcttgaatatgccaatcatggttcttgatactgtgaaggttaagtgcatccgtgatctcagcaggagtcattgcgtctttcagatcctgtttgtttgcaaaaactagtatgaccgagttttgaagatcctcatgaccaagtaacctggctagctcatctttcatgaaagagattctggctctgtctgtgctatctataaccacaatcacagcatgtgttccacgatagtatgttgcccatgaagttcttagcctatcttgcccaccaagatcccatacctaaagacaacatatcataaaagtaaacatcgcctcaaatattcgattgccagtgtccaacagttagtttttgacaggaaacaattcaaactttagtaagtttagttacgtttatattcatcattgagttttgacatataagaacacatgcagattgtcataaaacagagatgaattcatctcaggccatgactttgaccactgtataaagatgttccaaacagtcctctggcaaaaaaactaagctaatgggaaatagcaaacagttcctccggtataacaaacaagctagataaacaacatctacaaaaatttactatacaaaaccataaatcgcacatacgaaaacgttcattatgagtttctgacaccttctcaaccaatcatgacaagaacttagacaaaaacatcatccatttttcaacgagaaaaatgcacacacccaagcaagaaacatagctagggacaataacacaatcaaaagatggcaatggcaaatttaagaaacatccataaagtttcaaacttctaaaacacgtccctagataagaagctaagaaacaacttcacccaaatgaataaagaaagagtccagtacctcaaagcgaatattcttgtagacaagctcttcaacattgctaccaacagtaggatgagtagtaacaacttcacccaaatgaagtttataaagcgtcgtcgttttaccagcattatccaaaccaacaacaacaatcttatactcttttgcaggaaacatcatgaaccaaaacctcgacatgaatgctcccatctcctccaatttctatcacaaacaagatcctaatcaaataaaacacatcattacttttacgatcaaattgttctacaaacagagtgaaatcgagaaaccctaaagatacatcctttaaattgacccatcaattttacaaacccaagtaattgaatcagagaagcccagatcagatttggatacaacgatcccagattcgataaagttaaccaaatctaaattatatatatacaaatcgggaaatttgtgatcaaaccttgaatcagctagaatctgaagattgcagaggtaagaatcggagatcaaaaaaagttcttcttctactattttgtaagcttttgaggttccttccttaaagcagatgggtggagagaagaagaagaagaaaagtatgcgggaaacaatgtcaaaactgtaaatatgatgatctaaattattaataacttttaatataacaaatattaaaatgaaaactatatagtaatgttttcttttacttacccaaacggctgcagcctctaccgtaatggcaccgaacacgtcaccgccattagccacgacgccaaagacgaacattgttgaagacttgaaatccacaaagatgtttttaaacgagaaaaaaaaaaactcaaacgggcttagggcctttccatatattttagattataacaattacattttctcggcccacagaagtatataaaattaaatagaagtaaattatattgaggatttaaaataacaaatttaattataatttgaaatcatggttataatacgatcgtgtgaaatgttaattaaatgcttatattgattattttattattaaatttgtgctaattttggtaacgaatcttatttttgttattgtatacgatgatttaaaatatatatatatatatatatatatatatatatatatatatatatataatagttctagaaaagtctaattggattttttagatcctatcatagttgatagttctctttttgtatatggctagcaatgcggaatcgactctctacattagattcaatgaaggcttggaatgtgaacttgaatcgaacatgtgtgttatgtaacactcttatcgagacacgagagcacttgtttttcagctgtaagtactcgtcggcagtctggtcctccctagcgaaaccactactctagtgacgattctctacaatatggcaagctctagtcattattattacttctgatcactgtaacagaatccatatattcttcctctaatacagttttcaaataatggttcattcgatttggcgagaacgcaataaaaaaaacacacaataaaactctgattcttatcacacatcttcctaagtgaatagataagctggaaaaaaaaaaaactctcaatcatttgaaaggagaaatatagtagatacgaaccaaatctccaaacatggtttgcatctaaaagtccttaaaacctctcttgtataatctaatttcaaaacaattttggaaaagttacatttgatgtatcctaactttattttttcttggtcgaatttaatattttattaaaaataataatagtaataatcacaaaatctaatttgatcattcttaggtgggtaggtacacttattttacatacagcctcgacggcaccaaaacatagaatatatatataaatacaaatacaaatattccaaatataacctctctcccaaagtcctatcatatcagaaaaaaaaaaaaaaatccaaattcaacactctcacacttcgatatctccgccttcattctcctcagagccaactgtcctgagatttcgatttcgatttctccgatctctcttcctccgtcgccggcgaaaccatgtctcagtctattcaattctccactccttcacacactcctcaccttctccatctccctcactcacaattcaaccgtcctctctcctctatctccttccgtcgcttccctctaacaaccatcaaatacacttccatcagagcctcctcgtcatcatctccttcaccggatctcgattcatcgtcctcatcatcatcctcgcaagtacttctctcacctaacggtactggtgctgtgaagtctgatgagagatccgttgtcgctacggcggttacgactgatacgtctgggattgaggttgatactgtgacggaagctgagcttaaggagaatggatttagaagtacgaggaggacgaagctgatctgtacgatcggaccggcgacttgtggatttgagcagcttgaggcgcttgctgtgggaggtatgaatgtggcaaggcttaatatgtgtcacggtacgcgtgattggcaccgcggtgtgattcgtagtgttcggaggcttaatgaggagaaaggctttgcggttgctattatgatggatactgaaggtagtgagattcatatgggagatcttggtggtgaagcttcagctaaagcagaggttgtttaatctcttcttattttgatttgaattcgatgtagacattgctgtgtttgtgatttagatgtttaagctttggtggtgatgacatttttacaggatggtgaggtttggactttcactgttagagcttttgattcttctcgtcctgaacgtaccattagtgttagctacgatggtttcgctgaaggtatatgcaattatgtttatgtaaaagtggaagtgaaaacattagatgaatattatggtgactgcgtatgaaataggaatcatttggtctttgtgtgtggtgtagatgtaagagttggggatgaacttttggttgatggtgggatggtgagatttgaagtgattgagaagattggtcctgatgttaagtgtctatgtaccgatcctggattgttgcttcctcgagctaacttgacgttttggagagatggaagtcttgtacgagagcgtaatgccatgcttccaacaatttcttccaaggtttgtaattttgtatcttccctttaagctttgaattatgattcactttacttggtaaatttgggagggatcaaagcaatggtgaagatgtacacttttggaaactagatgagtccatgttagcaaaacagatgatacctgagggaaaacatactcattttcactgatgatacctcaattctttatattcaggactggttggatattgattttggaattgctgaaggtgtggatttcattgctgtatcgtttgtcaagtcggctgaagtcattaatcaccttaaaagttatcttgctgctcgttcccgtggagggtaagtaaacatgctcaatatcaacacatcatactactgtacaggaaacatatgatctactttgggattgggttttgcgtcatgtattcaccatctttagttatagttttattttgatgttgtattcaactatgatgcagggaaattggagtgattgcaaagatcgagagtatcgattcactgaccaatttggaagaaattattctagcatcagatggggccatggttgcaagaggagatctgggagctcagatacctcttgagcaagttccagcagctcaacagagaatcgtccaagtatgcagagctcttaacaaacccgtcattgtcgcttcacagctattggagtccatgattgagtacccaactccaaccagagcagaagttgccgacgtgtctgaagcagtaagacaaagatcagatgcattgatgctctctggagaatcagctatgggacaattcccagacaaggcgctcacggttctaaggactgtcagtttaagaatcgagagatggtggagggaagagaaacgccatgagtctgtaccgcttcaagccataggctcttcattttcagacaaaatctcagaagagatctgtaactcagctgctaaaatgggtaaatttaggttctttgttttccatagaaggcaatatgtctttagtgtctcattttactatccaaaaacttgcagctaacaatcttggagtggacgcggttttcgtttacacaacgagcggacacatggcatcactggtctcccgatgtcgcccggactgcccgatctttgctttcacaaccacaacctcagtgagaagacgcttaaacctacaatggggacttatcccattccgtctcagcttctcagacgacatggaaagcaacttgaacaaaacattctcgttactgaaatcaagaggtatgatcaaatctggtgacctcgtgatcgcagtctcggacatgctgcaatcaatccaggtaatgaacgtcccgtaattctctctctttatacaatttcgcaatcccgcaaaagagtgttttgtttcctacttttgttactgtttttagactactcttacattagattccagaggcatcatcatcttcggtttgttaacaacagtaatgtgtaagctttgtttgtagtgtgtactgtttgtttttggttttcaataatatcagtaatcttattcaaatattcgattctatcatttagtccttttgttttatctttttgttaggatatatatgtaaacccaaataggatgagttcgaatatataccataaccctatattataaatagtgtatatataatcacaattagaatcgcctctccattagagaagatatttgaacaaacatgaaaagttgcaagagacctcggatgaagaatcaagagagagatttttatgaaactccgtcggattgttcggaagaagagattcaacggagttgcgagttcgtgaaaaaagttaaagagttggatgataagacaatcatcgttaaatttttaaatgcaatgaagtcttatcgatctaagtctttaagttacatcgatctcaaaaccaaagtcgcttctattcttcgtaaccacgacgctctgctccaagaattccatcagcttcttctattagattcacctatcacagagaaggattgtaactcggcaaaatcagacgtagaacgcacggttgagttgatgaagaaagtggaaggtttgggaaagggtttacacggtgcgttcctaaatcagctggtgtttggcggtgatattgtggatttggttgaacaactcgacgtgattctctgcgatcacgcatctcttaaagaggagttcatattgtttctagttgattcccgtttactcaaaaaaccgaaacgtggttttgaggcgggggcagaagagtataagactagacttgaaactgaagaggaattatcatcctctgatgagtttttaaatgggaaatacgtttcaaagagtcagtatgatctggatcaagtgaagaagaagagactgatgcaagagtaagaagacgaagatgactgatgcgaaagaatttaaggtaaaaacgaagctatgaccgtcaagaactaaagagcaatgtgaacaagtgaagagagttttgtttcttttatttttctagtcttttttttttattattgatttgtggctacattgtgattgtgattgtgaatctcgttatgtttctttgcattcgagtcttccaatgttgttttctattcaccaaaaaaaaaaaaaaaacgttgttttcttaggagggcgtaatgaatcctttttcaaagtttttatgcacacttgatttaaaaacgtgtttaggaagtttatgaaaacttctgatacactttggttatcaaaaagttcatgaaaacttcttaaaagactctgataccataaacataacaaacacaatgcctttaaatgttcttgtcctttttgcctattttcgtcaattttcacacttaacacacttatacattgatgccttctttgcttgctacgtaaactcgggattctacattctaaggatgacgggcttattttctaatgtttggcccatttaggcccgcaggttttaacccaacatcttcgaatatataatcatcgtcaatatattgctttttgatgttgttattgctatggaccggtgagagagatatattagttcgccccaatcaaagttaaaccaaatttttttggtcgaggcctcgagtgaaacaaaaaagatggtgctgtgagttacaaaaacaatcacttatttgtgtataatttgtagaactactacacttatatgttattttttccaagaatatctctattttaggttcaaatatataaatttaccctcagaactagttgataaatttaatttaaaataaataaaaagtgttgatcgaaagaataaaaaaatcgtagctctatctcaaatagtaatttctttttaaaagtagtatttctattacaaaaaaaaagaacaaatgtctgtttatctttttgaaagttattcaaaaaaaaaattggcaattgataaaatttctaaaatgtgatataaactacttttacggacttacttgtcacaacggttcattttaatatctttccgaaagttttggggtcctcttgaccaatcgtttctatgttcaatattccgaaattaaaccgtgaaactcactcaaagaatgattttaactattttgcaacaccaattttacactccgacactaatgagaaacatatcaacataattgaatgcgtcaagtataaaaactaagctggtggtttaaattaatccactagattagagaacgtaatttttatatagtttagattaaattaatgtaaatcaaataatattggaggatttgatcatatcttcccttctactgtttgcatcacttaaaccaatggtcccatttctattaaaatagaagcaaatggacccaatcatatattttaaatgcaaaagactcacaagttttagattaatcatgaaacagttcaataattcaattattatatatagtcagaatagggacctttaattaagtagttaatactttacgggtccgaattataaagacatatacaaacaatgtaataaattgataatagagacaacaacaccaacaatagcaaacaataaattaagaaattctatccatgttattggctgtgaattcaaccactaaattatgatgaacatcgtacatataccacccacttttatgataaataacaaatgtattattggaaataatttgttacattgcatgagaaaagtctgtctttggttcaactatttttaggttatcttctctaaatacctcaactaatcaaaagatccaatcttcactaaataagcaactctctttaaaatgcttcctttagcaaatatgtatatacgtgctttgttttgtctgcacaaatctgaattaccagaaaaataggaatattttcaaaagaaacagcaacaaaactccaaaaacaaaaagaagcaaaaaacaggtagggtaatgattatgtaaagcagtatatatatttgtgtaaaaaatatataaccatgatatcagtattatcattacaacatccacatagatatatgactataagtatggacaagaccttcattatcaaaagcctttatgtcttcttcagtccttttctgatttgctaaatttaatattcagatctgatcactgatctctaaccctaaactcatttttctcttatccatgtgtgcaagcaatcatataatatatatttttatttatttattttatttcaagggtccacttacttttatttttgtttattcgattctgcattttatccggattcagaattttaagatatggtgatcggtcaataaaaactccaacaataccattgtacttacgtctttgatcatatgtgatatataaatatttactctaaagtttattgactttgtatttattgaaattcctgaaatttcaaagcatcttcgagaatgcttcttatgcaacaaacttattgatctacatgtacgtttctatgtttgttgtcagacatgtgcatgaatgtaataatatgaaacgatataatgcgtataaatacattatataccggcatagtaggaagtgatcccaaaaaaaaaatcataataagagtgtagaaatgaatgtaatgaatataaaaaatttaaagagtagattgataactaagataaggttagatttaaacttatggaatattgaaatggggtaggccaaccaatggggatattttaagatgatgacgtttcccatttttattttgtactgtaacaaacttattaatttcttcttgttttgaaaaaataaaaatatatttgtttattctccgaaattttcgcattattcttaccatatgactttcaaagtgttatttatcgtcacgaaataacaaattatttcaaaagactcaagaatataaaataatagtccctatgtttcaaaacaattataaaaaaacgtttaagattcattgtgaattcaacatgaacctatgaatctcacaaaaagcaaagatttactacattttcaatttcaacctcacatactaggatgtgtttttaaattgaactatttgttaggtttgagcaaaaccatttattaaaacccaatccaccgaaaacgaaaaagagtcatacctgaacttctgcctaaaccaccaaattaaaaaagagttcgccaaacccaggaaaattaaagttcttacatgaaaaagagttatttaggctttcaatataatatgtttgcccaaaaaaaaaaagctttcaaaataatatcagatgtacaatttgtatatagtgtctttggatcagtgtagaaagtcaatagcttagttaattttattttggcacagatcaagagtttgaaactatacgactagatatgaattagactctgttcatgggtttggatcgtgttagacgttacatagtacatacgtttctatagatattatatttatttaaatggtcaaaactcaaaactccaatttcagagaacacaattaacaaaaaaaagattgatgagtgatgatgagttatgtaatgatatagtacaaaatctcttaatcatatataatcataaactctcttacgtagatgatatatatatccacataataaaaattactatcatattaaattttaaaacttaataaatgcttctattttcatgtttttttttaacatcaaaaatatctcttagatttatcaagtttttaattgatgtaattcatattgtcctggttcgagccccgtgaaagagatattaattgatgtaattcatattaacgtataaatgcacttaacattattcattaaattactagatttatcaagttgtttgggttcatgtacaacttcaactgtataagtatacacacttttagaagaaaacgaggaaaattttttctttctatcgctttggatactttatatgcaattttgatttgtgtttaagagtacacaatctaattgattattttttcttttgagaaaacacaatctatataactttgtaaaagtgaatataatacgtgcgaagataaaagaattacaatctattttatttatgttattgttaattagataatatgatattgtcataatatatacagacctttaaaagtataatataaacttcgagttaaaaggcaagactcgatgacaacaatattattgattgatgataaccaaaatatggagtctaatcgtatatactgtatattgtattcttcgatctctaacataagttacgttacatctatgtgtagcattcaaagtaggccaaacatgtttaatacaacaatattctctaaagtctactcaatgatagttaataagtcttgaggttaagtatgtttattacaaaaatacatacatatatacatcaaataggtgaacggtaaccgtgttgaattgtctaaccttcgctttctcgcgttattgtctttgccctatgaattaaacaacatgtatattaaaaacaaatatgcagaatttgtctattattattatttctacacagtaattatgcagaatcattcatccgtctatacaatgttctaagaatatttcagattatatagtatactttcaaaaaatttagagagttggattatatatagaattaccttttagatgaaactaattaaattcatgtgaatcggattgttaacttgtaaaaaattcctcttcagaaatttgtatacgagtagtttaatctgactgacctgatttttttttgtcaacatttgaattttacattattcaaattttgtgtttaatacaaataagcttaaaacttgttttttttgctagctatcagcttcctcattagctaatcgaattattgaaatacaaaggaaatgaaatcaaacgacaaattgattgacctgattaaagttacaattgaaaacaaattcattgggcttcttcttcacaaaacttgagacaaatcaaacggcataaaatatgtcaagtatatcaatatatcaacatcttgtagacataattgtgattaatttgttagtaaaataattgatggttaaaattttgaataacaattaatcaaggattttgaaataaaatcaaaaatgaatattattcctgtatcttatcatattaacatctataatacataattttattacaatcaaaatggtttgtactgtaattaaatatatcccctgaattatataataagataatatcatttaataaaaatcatggaccacaaatccacaactaattaacaggaaaaatatctctttaatttttgtggaaaggaaagtgtcgttattgtcaatattacttcacttagaaaaatagggtacactttctaattatcagttcttaaaatgttccaggaataattcgaaataacaaatttattaaaacataagaataaatgataaatacattctaaatatatatatatatatatatatatatattcttaatgagctagatttaaagacatggtagaaaaactactttctactttaataatatttaaaattcataaagctatgaattggctagttagttaaaaaaaaactactagtactagttagaaacatatagaatagacagcgtattactatggtttagaaataaaaataatgtggaaaaatatggacaaactcatgaaattcatcaaaaggtaggaccttaacttggcaactcccagagcctatcaagcaaaaagaaaaattagcaaaggctgcaactttccctaaattaattgaaaaatcaaaagtgttaattatgatgatcttggaaacagctgatctccaaatcagttcaaatgtggctatgtttctccaccaatgttcttaacaagatacgagcattgattcataaatttgcattttaccattttctaataaatccagactgaatcatatcacattgttagattataaaatcataaaaattgcatcacacaatcaagtattatctaccaaaaaaatactaataattataccatcttaatatagagaatgtttatacggattacaatcatgacttgagttgttatcgttgttagaaggggactttttttattgactcaactaacataattttatagaataaactatttccaataattgcaattcatcaactatcacaaaataacattaggattataacgaaatgaaataacaaatccattaacaaaaacgaaataaaaatggaataccaaattatttaaactagaaacggaaacggctaatctataattatcatattcaactgcaatttggcaatgttgatataaatactgggttggtatttaggtatttaagtagtactatttcacaatttaattccaggaaaaataacaatggtttttattggtaaccgggggatacgtcatctaggaaatttcgatatggtggttgggttaaggcatgacaaagtggttgattttgaaaccaaaggttgggtaaatactaatttaattgcctgaaaatcatgattaaggaattaaataaactataaagaaaaagccaaaaggaagaggataaaaaaaggtaatttgggagtggaaataattagtgttgtcaggtcccagaggtgtattactgttccctcttaattaatactactatttgggaatctaagaaataattaaggtaagaaacaaaaaactaggggattgtttaaaaatatatttgcacataaatgctgggattttgttacccattgtttcaacaaatcattttttctcaaaaagcgaaaaactttcatgtagatagaaaacgttaatgcatataatgacttgcaacaagccaacaatgcgtaagagcttcttaagatttgaacataataatttgcaacactgtcaataacccgtacttcaaaatcaaactttattagaatatatagcgaatgaagtaatgaaccatggtacttcaaatgtactactatcttttagagttagggttgaattgtataaaggatattcttaagcaatgtttggttagtttagtgtttgctttagctaggttagtttagtgtttgctttagctaagtaagacttaggcgtgggcattcgggttcagttcttttttttcgggtatcgagtctattcgggtaagaggttgagaaccattcggatattctaaaaatttggtttggatcaggttcgggtcgattcggttattttagtaaaaatttaaaaataaccaaaaatacccaaaatattttcgggttcagatcggattcggtttttttactcatatatacctaaatctacccgaaataccagattaccgataaatatattggttactttttatccaaatataaccaaatgtaagcaaaatacttaagttacctaaaaaaaatctataacattggttacttttatcccaaatatatccaaatgtatatgaattactaaaaaaatctagtatatttggatttataattttaattttgggtgtttgagatattacaaatataaatataactaatattttaaggtttacatttgtattcgggtacccacaagtattagattcggttcgagtttggttcgggtttttttgggtagtgagttctaggactcattcgggtaattttaaaaatcgggttcggtttggttcggttatttttcggattttcggttcggatattcggttctggatattataaaactaatacttaataaaattagatttattttgttacatgtatatacatggttatatatatgcacacagggggaaaaagtcgaaataaagtgataagaaaaagggttttgataacttgattgctgtagagggaaagtatcatcagcttttcgttttggggagacgaatctttgtttcttttttcgtgtttttcaatgttacttataactccattttctatattgctataacaatctagcattactcttttataacacacacacacacacacgaataatcgagtatctaatttgttttatacaacagaacaattactgtattaaacagagttccacaacacttaactatggtcaaataaagtttatgtacttgttttcttttaacttttgtagttgaatgttcaaatgactaaatgagtaaaacatgtacactatcaataactttaatacgttgacaaaaaacaatggtctagtacaaacaatataagatattgatttagatgcatggcacaattttggacatgaaaatcgaggcaagtattagaatacaatagtacatgattgataggtataaaaatacgtacgagtagtcactattgaaactcataatgtatttgtatcattgtcctctaatttaccagcagctaggataattgcatacatgcgtacaaaggaagagtcatcttcttttttattcgttttttaaaaccgtacatttctttaaattctcgattccacctttttctttttttactctatttaaacttttatttttgttgtttacttttacttttctttatatgaatagaccaaacggtcaaatatttggggccccttcttttgcatgatttttagtaaatttctttttgattaatggttgtgattttaatgtgggttaataaagtaaagcttaaagtctcataattacagcatgggtttaaagttataaaaattgtttaaatagcttattattctatattgttctcatttcaacattcagattattactgccataacttttactttttcttttacaactatttaaaaaaaaaatctcagcctttttcttcttttgtcctttagtggtcagtctaatattgttttccccaatttttactgacattatattattattactcaaaataacccgatcatacaattaaatcaaaatttaccaggacgagtagtgttaatagatttacttaagacacgtgttacataattattggattaaaatcagtttccaaaaaacgaataatccattttcggatatgcccgatattccacggtagtggaggacaaaaacgtaatttcggtattaccacaattactgacacgtctccagtaaaaaggattcaccaccacgctaagatgaaaacgacaaaaaaataaaaaaaccatctcctcccattaaaacggtaaaacaattaatatccgacgtggcatttacagtgcctagtcagcttttttacctttgaagtctcttcagcttcggacctctctctcttactcctttataagattaagccaacctctctttacccacacaatccacacacacacacataagaaaagaaattaacaaattatcacaaaaatacgttttcttgtataataatttttctctagatttgtcgcttaccttttgaaattctccggcgatgaatctcgccgggaaaaggaatattccggttattatttctgtttccgttactagtgactcttaccatcgccgtcatgtcttccgtgaacatcgtcggacctgaaaaatccttctcctagactttttttttttctttcttctctttgtattattattctttgcttcgtttttgtgaagaagatgatccgctgatttcagaagttttcttcttctggattttagctgagaggtttttggtagattctgtttcttcttcttcctctgtggttttcgaatccagttttggaatttttgaagattttgtttagtttctgttgaagagatctgagatatttgaacgaagcagagtgtatatgaaatcaaatctgtgaaaatttctttgaatttgaattgactttggacttgtgagagaagttagatcttcttcttcgtgagctatgccatttacgatgaagatccaaccgattgatatcgattcttcaccaaccgtagctagagctgaatcaggaaacaaaccggtgctcaaatctcgtctcaaacgtttgtttgatcggccgtttacaaacgtattgagaaactcaacaactacaaccaccgagaaaccattcgttgtcaccggtggtgaagttcaatgcggcggagtagtgacggagttcgagccgagttctgtttgcttagcgaagatggtacagaacttcattgaagaaaacaacgagaaacaagctaaatgtggacgtaatcgttgtaattgctttaacggcaacaacgatggttcttccgatgatgaatcagatctattcggtggttcaatcgacggttgcgacgcttctgatcatctcaaggtaaccacaacaacaacaacaacaaattcttaatctctcttgatttaaacatgaaactgaatttgaatttgtcgatctgaaacagagtttgattccgtgcacaaccgtcggagagaggaatctgttagccgacgcggcgaagattgtagataagaacaaatcggtgaaacgaaaagacgatatgaagaagatcgtcaatgaaggactcttatcacttaattacaattcttcaatctgcaaatcaaaatgggataaatctccttcgttcccagctggtaaacaagatcttcatcttcttcaacacaacaactactttttttttattcatgaaatttgtttgaactgatgaattaattaaatgttacaggtgaatacgagtacatagatgtgataatcggagaagaaaggttaataatcgatgtagatttccgatcagagttcgatatagcgagacaaacgagtggttacaaggtgttgcttcaatctctaccgttcattttcgtcggaaaatctgatcggttaagtcagatcgtgtttttgatatcggaggcggcgaaacagagtttgaagaagaaaggaatgccttttcctccgtggaggaaagctgagtacatgcgatctaaatggctctcttcttatacgcgagcttccgttgttgttgtcgatgagacggtgacggtgacggatgttacggcggcggatgcggcggtggagaaggaggtggatagtgtagagattgagctggtttttgaggagaaatgtttatctccgagagtgattgttaattcttcctcctctccaaccgacggcgatgatgacgtggcggtggagagagaagtgaaggctgtcaccggattagcttcactctttaaggaaaagccctaaataaaaaattttggagtttttttttttaatttctttttctaattttcaaggtaaaaaaattaaaaatatataacagtaaccatatattcgctttttttttttcttacatttttgtagtttgttttgacctctcttgtttttttctttacaaggggtttttaccactttgtactttagtaccgtccacggtgaaaaaaataaaaaataattactacttcccgaataaaaatgttatctataaaaatttagtacttccgaaactcaaaaacacctgagaaatcgtgcggtggataacatttttttaattttaatccaaattttatcggttttgtgtagtcttaaaacgatagcgttttgatatttgtaagcatataagggaacagaagagtatgacacgatctttagttttcttagtttctcatcttttgataaaacctttgaatttgttgattaattaaactttaagcgttacggatttgtttactaatctgtttatttaattttagattagtgacgacagcattgagaaaagagagaagctcgtgggctctcgatagttgtggagagtgccagagctgttcttgaacaacgtctcatattcttctctattcttttcttttttgctttggggttaatcttttttttataaggtttttttttgcttaattgttttgatttaatgatctttgtttcgataatctcatttttatttctttattggataactttagacatttcccaaaatcttgacacgttaaaatttggtctagtttctgtcaatttggctctccaactaactaataaaaccgtataagcttaggtggatattttcttgtttttagtctgaaaaaagcttaggttgatttataaatcataataatatggataatggaattttttcgttatgtatgttgagaaatcagcttagatactaagggagatcaagactgcccgatataaaaaatatcgagataagaaaaagatgtatataaataaaataaaatattatcaattaagattacaaactaaatttagaaaccaaaaattgcgagattataaatcgagtttgagatttataatatgtttagtttcagtcattttgatgggtcttccaacaatgtataagaggcaatatgtatttatgtaatttggacgttaattggattactattttgtttctatgattttttttttcttttcttttcatgttgcatttcaaatttgaagagaaaaaattagtggcttgtgcttgtaaaacgtgttagatatttgttcgtgcagtacccattggtatatgtattattttgccggatatcttgaagagaaaccacaatttttgactctttttgaagacaataaatcattttctgtttgtcttaaagatgtaaaatattcgatcgttttcactataaaataatgttatgatcgcattgatgttacattgtttaaatatttgtaggattatcgtgttatatctatatatctataatctatcatctattaataaacaaaaataataaatattttccaacacaaatttttcttatttaattgtcatgcggtaaattcttattacttggattgaaaacttttcatttcttaccattatcagtattttagtttatcattctttctttctttgtgtggttaaggtgaatacgtaaacttgtaatgcaataacagaattatgtggtgaaagttaattcaagccccatggggttggttaaccacacaagcaatgatcaacaacattatgattgatcatacgtacaaatgtttactactattggaacgtcgcttctttattttataggtttaatttttagtaacataggatcatggattcaatactcttaattagtttccagatcattcccaatcataacaataatccaaattttgtaatatggtccattgaacatttgtaagatatatataatcggtagatgatcaagttaaaagaaaacaaaatacgaaccctattggcgaatttctacgatttttgcaggaagcaaccaataggaagaacaattatgttgaagacatccccatgatgtgctacttctcaaactttaggaacatgatataaagtaaaagtacacacatatacgactctaaacccatccatatatatattaggacattttaccgcaacttatctaattgtagattcagtattgtatttttacattatatttgcaacggtgaattaatcgtgaatttgtgatacatttatccctcttccaatccaaaagtttacaactaaggaacttaaccatagccaacaactcgtcatctataatttctaaagattaattacctaagtcatttaaccaatttggtaaaatcaacatcctctacatttgttgtgggacgaaaaattgccttcaaagtgactacaaaagaacaaaaacaccacgtttaatgggtaaatctagaatatgattttagccgatcgtgtacattttttgtttgaaatttttatatatcctatttgatacgtttcatttttttttgttcttgttaattgagcccaaggaaacatgatcttcacttcaaattatacacttacaaaaaaaaattagtgatattaagtcactaaattgccatgtcttgtcagaacttttaaaagggaaaacaaaaattgggtgtttggaaatagttaaaggtcttttttcctccatttctgtcgaagcctaaaccaagtatttacatggacctaactatgttccaaatataagtatgtaattaaatatgttttttctttataaacacatacatactatatgatattatatgtaatatatcacaatcattgatgtgggggcaccagtcaattcatccgtaactatagtatttattatcattgttattattattttatatgtccatataacaaatgttaattgtatattcgaattatttgacaataaggtagggtcggttacaacaatttcacaagctgtggggtcttaattcccttttcttattatcatccactctctttttttttctggatttgacattatttgcacgggtagaaaaataaaatatatcatattaatgtcactatagtatttattgttatgaatatcatattttggtacgtttctcttttcttttgttaccaatagaaaaagagaaagtaataaaccatgggttagattaatgtctatagaaaacgactctccacccactcttttaaatagttttggagattatcttatctttgttaattcacatgagttttggctaatgagacaatcaagatttctgcactaaagaggcagatataaatggttttattatcttaatatatgtttaaagctattgcacaaccaacttgttagtatattgttgcaattattattatgattattttttgaaacccccacatgaacgttacaatgatttgtttatattataaggttatgtctatgtagagagacaaagaaagagaacatgataaagaggcatctttttataagccaacatttgatcattagacattttgaaagtgcttttcttcaatgttgaattcgaaaacttactacatactctcttgtccgtttttctcccatctctcttttaacttttggaatttacatgtcttcttttaccacattttgtcaaattgagtttttcttttctttaagctttatagatatagatgactagctaggaagagtaaagatgttgacatgttaatgtgagaatgttaagaatccatccataatttcttcatttatacgtattgatattagttttgctctttaaattacgtataggtgaatgttagatatttttttgttgttgtcaacgaatataagatttataaaaaaaagagaaaagaaaagagagacacggaggagatgtgaagagagacttatccactttgacataagacttggaatattaggtgacaacatgtgattcctctcctcactctcttcctttttttttttttttttttttttgccttaaaattcggttttattatttattaagagatacaaaagaactactcgatttcatcatattgatttggtcgcacttgcattataaatttataatcttcaaaaaaaaaaatcttcatcggttctattttcccttgatatctattattacaagatgatgtgccataataaatattattttctaaaaataccaaataatttatatcaatagtgttcaatccagagtttgattcaatttgggtttgatttttatgtatcttaagatttttgttttatatctagtagtaaaaagtggaatataatctaatatggatgatttgttatcgcttttgacttcgcttcgtatttgagtttagatgttagacaatttttaaataagttaaaattttcatttttttttaatagatacaaataatatatccagctagatcgttaagatatagttagacttttggatataatattcagttaggtttgtattatatcagatcggtttgtcttaattgaacacccctaattgtcatttctattcaaagaaaatatttctatactagattaagaaattaaaatttgagtttatataagcaagttctattgattttaaataaatatatttatgcttcttgtttgcatattgtttatttaaattaaattgatatatttaaagtatcagctatatttgtttttgataaatagtattaaataaattaggaatatatgtattaaattgtagatagttaatttttgtacacattgatagtgagatatcaatttttcttaagatacaataatttcaagttattacatgttgacaactaaagaaaaaaaaattctaaatatttttgtcttatttgagaaagaagtagccgagcctaaaaccacaacatcgatcaaaatgctataaattgattagtcatccacagcaagtctctagatatagatatactaacccaaaataaataagttccttataggcaacttttaagtaacgaaaccaagctattcaaactactagaatttgtcttttcaaaagcttgaattctagattttaatacatgttgaaactatcataatatcttggtcaactataaaaccaagaaaggtttcatcatttaaagatatcatgaacatagtaatttttttaaacctttgtgttttttttgttaaacacttaaaacttaatcgaagttagattatgttttcttatatggaaaagttgttattgaagtctttacaaaaaaaaaaaaatatgtgtacaatatgatcattgtttgaaaacaatattaagtgggttgggtacaaactaagtaaaagaacttcaccccttgtcgggtttatagataaactatggacaacttatgaatatatttaatacaccattctgaattattacctgttaagatcataatgatttacataaatccaaaaccaaagttattaaacatatataccaagagaatccaaaatgcatgaggaggcaacataaaatctcaattctcagacttttaatggattctcttattgagta

SEQ ID NO: 64 - DNA, 2490 bp, Arabidopsis thaliana
catgtcattgctattaatggcaaatactatagactacaagtattaaacacacaacaaacaaagtatagactatagaatacaagtctaataactaataagtaataaccctcatatgtgagagatcgataaacggatttccattcaattaagtgatcttttttttttgttaaggaaaatctaatgatcttaactttataatctcaataattatataaaagaagcaaaccatttgaaatttgggtttgattttttgttacaatttgtatcgaatatataacaatcgatgggttttataaaagtcaattgaaaaggtggtttgtacaatctaccagacttccactgttccatacacttaggtatagaaaacaataattttaaaatatatacatatatatatacttttaaaatatatattcatgctacatagcctacatttaaatgtcaatatatatatatatgctatatttttcttttttcaaataacattaaaaatatatataaataagatctgatggaaaaaaaaacatctattttgtaaaaaattattctgttgctaaataaacacaattttaagagaaattatacgcctattttgtttttgtataagagcgaaaagtccaaaaaacaaaaaacaaaaaacgaaaaccaagtgaaaaaaattcacatggtccacaacgacatgaaatggaacagttagatttgattgattgactcaacatttctccttctttattaagtaaccattcaaaaacacactccactggtcatcttttccctctctgtccccatgcagttttgtacctctgccacaagttaccccttgccgctaacttctttcaggggtaatatcgtcttttcactccaggtgttgtccactcacaccaagaaccaaagccatcgtcactatattctctctgcccaaccctactgtactagtctctcctctaatttagttatattgttgatcactcactagatttgtttccatctttctcatttaacgataaattactgtatttgtctagatttttataggagtgtggaaatgagtcgtcagcttaagttagtctagctttttatgagttccaaatatatgtttttaagggtcatacataaaaagtcttccgttttatcctatagtagtttcaagcaaaagaaattgtaaaacatatttcaaagaaaatgattgtaaatcgattacgtaaacgtaagagaatagggccatggctcctacccatgtaactaggtcggttccttcttctccggtccaaaatatcaaggaaatggcggaatcaaaatttgttttaaagaaagcggtgttgactgttgactagaaaagttatgagaataagtccattgcaaattttgtagtgtgttaagtgataataaccaaagaaaggtaatctaggagtggtgattcatttaaaaaaaaatctatgagtggtgaataatttccatctaaacttaggtcaaagatcattgatttgccactatgcaaataaacatttttaacaactaaagtaattatactaattaataagattttatatcttatatatatttgttaccatataacattttaactgttttcggtcaacaaaataagaagtataaataaacaaataacctcattcgcccataatattaataaataccccttaatcttcatccgccaaaaacctattcaaagtcttacacacaacaataatgattttaagagatatacgtaaccttagtatttagcttagtgtttaactcaatctctatagactatagtaaaaacaagcttgcattattatttgttccactgttattagtcaagcgaaaacataaatgaaaagcaaaaaaagaatatttatatgactccattcaattcactcttttatagcaatgactacgatagcctctcatcttcttttttcctctccatcatcttctcttatcaactttagactcacaagcctcctctcatcttcaccataaccgaaaaaccaaacaaaaaatccttagataatcagatcttgatattatggatcatatcatcggctttatgggcacaacaaacatgtcacataacacaaaccttatgatcgctgccgcagccactaccactacgacctcttcgtcttcctcttcgtcctccggaggctcggggactaaccagctaagcaggtacgagaatcagaagagaagagattggaacactttcggacagtatctacgcaatcaccgtccaccactttctctctcccgttgcagtggtgctcatgttcttgaattcctcaggtacctcgaccaattcggcaagactaaggtataacatatacacttacatatgtgtctatctatctcttacatcaaaatactctttttgataattttccattgatatagaaccaaatgaattgaaaccctatgtctaatttggttctttgacctaaaggctaaaacgtatttttgttatatatagttgagaattggattcttatt

SEQ ID NO: 65 - DNA, 78921 bp, Arabidopsis thaliana
gatctcacctgccatgactcatatccttctctactcgtttgatttctgtttgttccaaatctgtttctcaccttaaatttgattttgttttcaataagttctgtgttttgtttgcacgactgttcaattacgaaacttcgattcggttggcgtgttatacaaggctgaaatgacctaaaaaattgaaaatattagggttttgtttttgaattagttattgtcattgatttctccgccttgaatcgtatggttttgaagttgtaccaagactggagattttggatgctcctttcacgagttcttgaagggtttgctaaattttgtgtgcttttatcgattttgatctgaaagaaattagcattgttttctttaattcttgcttttgttatgattgcgaatttgcacgaggaagtcaaagagagcgtgaccgtgaaagggctctagctcgaaccggaggcaaaggaaagaacaaagatgatggattaactcctgagcaacgtcgtgaaaggtaaccaaatttgtatatgttcttgaatctgattacaacgttaatctctatggattgatcgatttcattgtgctttagagatgcaaaagcattgcaagagaagactgcaaagaaagctgctcaagccgctgctgcagctagttccggaggaggaggaggcaaaggaaacaataagtgagaaaaaatgatctatgcttcgatgtttgtaactgtgcttttgaatatgaaagtttggtgtttgtgttgagaatgttttggcttcgtttggtttgagtttgtatcaaaacttagacttggtgatgtactttgattaaaccaatgattactcttacaatatctatgattacaagtacatttgtccaaattctttgttctcaattgagacagatcttgctttgtttttacttgtttgatagtttgtttgttggagtggtttgagaatgatacagagtacatatgtacagaggaaaccaaattaatcatttgatacataattgataatggaatatggtttttgagaggtaaaatatatgtgcagaatcttttgtttaagttgtttctttagctgctcataaaatcatcatctgcatcatcaagaccaacccaactcatgaaagcaaatagaaactctctaaaacccactttcccttttcttccccaatccatttcttctgcattacaccataaagatagaatccaatgagtatatataatccaattcatcaaaacaatgagaattgaagagtgtgcgtgagattcatatgtaccaaatctcatgttggtgacatgtgaaggagatctttctagcggatagtcttcgttgttcaatgtctttatcacatcagccttgtttaatttccctttaccgtctttgtccaaaaacaagaacacttctactattggatcaaatatagactcaaccaactttggacccatctctctcgattcctaagaaacacactacatattttagcttaaatagtcaatatattcatcatcatgtcactgattattaccgtgctggattcagaggaaggtttcgccagaagatagatgagacagagaaggactataaactcattgaattgtatccctttgcttccatcaacgtcacaccaactatataaacctttcacttcttcatccgataaactcagctttagttcctctaaacatttcttcagctcctcgatatcgattgtcccgtttgtatcattatctgcgaatgtatccgcagaacaaaaaaaagttcaaaactaaagtggaatcttgctaaagaaaatacttaatccttcttttagcttaggaaacttcaagaaaaaatgcttcaagaatatcaagaaaatgtaccgtatgattcgaaaacgcttctgatgtttcttaatccttctcttagcttaggaaacttcatgattattgaatccatagactttaaactcctgtgtcccggataaatactccggctctccaccattttccgtgcaagcttcgcatccagctctgcatacttcttgttgttctccgagttaacacagcagcaaagcatgtttcctacacggttttttgtatttcaaaactatgaatcaaaccataagaacatagcaaatgaaatttcgagaaatgagaactcactcatgttaattctgatgtttgttgaaaagatggatgagaggaacaaggcgtaagtagataaagtaaagcataaagagtaatgaagaaaggcattacgaatagtatcaaagttaaaggcttaaactttggtggccctttcatcatttcaatgtttattatagattatcaatagatctttttcttatgtctttatagtttgtacctttaaacctttctcttgaatacaagaataattagaggcaaaggttaaaggaaacactaaagcttcagcttcaacattgaaatatatatacatgagtaggctaagatgaaaatgtgatgacaagtttgtatcgaataataatacaggcccctcaaagcaagtaaagaagagttaaatcttatctctacctttcccataatgaactttttccctctcctaaactttatccaatggtgctactaggcataatccagcctgattcataccctacgcccaaattgtctccacgttgacgcttcttcattgatgcagcagatatagagctcccatgtgtgatggaagtcagagagctttctactgaacagttggttgtgatgttgtttttgttgtctattgctactgcaagctctgacaacgatggcatcatcatcatctttgttgcatcgaagtacgggactgatgttccttgagagctattggagactttgatggctagctctgatagctcttccctagcagcctcaagtccagcaaaagtagcagcttgctcgtcaaaggccttgcaagctttttcaagaatcgattgcaggtattttccttgtgcctctatcctcagctggagcctccgttgcacctgcccatactaaaagaccaatcaaacgtttgcactttaacagcacagcctgttgcataaactcctacaaaagtggtcattgtttcaatctcaagggcgtgtttattcattccacctaggtagagatccaggacagatgttcatatgtacatcagtaaaagaacgaataatttggtagcaactccatcctaatttctggattggacatttacttttgagtcaaactttttgtaaacatggtggtttgtatcttcaatatcaatggcaagagaaatgaagagacctaacctccaattgatcgtgtagtcttctttggacttccatctgagcacgtagagcttcggtgacttggtaacccctggcacgcaaacaaataaggagggttcatacaattgtaattcactaaccagcagtacagagaaatgagaataaaaattcaattatatccatactcgttctgctcctgctgcgccattctcattgatgatgtcgaagatgaacctgtgtcctgactctcccctacacaagaagctgcagcatccagttcacagaattagtggagccacgagatatggacacacaactggaattcaacaaaacagggtcccaacaagttgttattcttattttccttttttcaaaatcaagtctttgtttgacgatttaaaccatgaacagttactaaatatatattgtgcctctcacatgatatagttctacgaaacttctaacaaatatgattccaaatagccatatgaataaagagtagaaccaaacggcttcaaaaacagagatatagacaacaacaacaacaaaaaggtcaactgaatagataccatctttagagttctcagttgattctttgccagcttgcctccctaggcggaatttctgtcgagcaaaacacatacaaaagagagaaacacaacaccatcaaacacccaatattactatgaataacacatataaatgaaacttaaatccaacctagatacaactcttaataccaaagcaaatttcagaatctaaggcgtcaagtcattgaaattctaggtgtggtctcatcaaccaagatagatctaataacagttaattaggaatcagttttgtttatcaaacctgaagatgtgatttgaggtggtagagagtgagacccttcactcccattgttctcataatagttttgggagtcgcttctgtaaattgaacagacagagtcagaacggtctcttcaaaaacatgtgtgaggtaaaagacaacacaggagttaaatcttagctacaaagcaattcacaagcttcaaaatatttagagatgacactgacactacttaattacaactgactaatttcgaaaaaggaaacaaatttatacactgcagaatctgcttctattttgggacacataaagagctacagttataaagatctcaattcaagtctcgagaacaacaaaccataaacttcatcgaatcaagtaacgagacatattcttcagaaatcagaaatatctaaactttgagagaagaatccatcaaaccctaaaaaaagtcgaattttgttaacggaccgagcaacgaaactgaacaaagagataagtagacaaagtagtactcactgtcaggaccaccgagctgagtaacggcgtcaacgaatctctcatgaagctcagttgtccaccggagacgaggtttagggtcagtcgttaaaaccaaacaagcgtcaccgggaagattggttccgtcaagaggtccatggtagtcaccaccaacgtgtccaccatcgagtggaagcgagcgaatcgctgagtacattttccaattttggtcgccgattttcccgggaaagtgagagaaagctttaggggagatgaatttgggtggtatggagattgtgggagtttcggatccgggtcaaacgtcgggtcaggctccggatttatggacagcgaagagacgggtggatatagtttggacgtattaggctccgatttgcgtttaaacatagaaggaacatgtttataatcaaatcccatttaattatttgtagcagaggtactttaattaaactattagtaataatataatcaacaattttataatatttagacatttgattgctctaatctaaattattacaccaacaatattaaactatttagaccctttttcttgcttatatgatattataataaaatagttattcaaaaaaaaaatccatgattgaatgagaaagaaatggtgaaggattagtaggaacccaattgtttatgcaattaaaataaagtttgaatacagtaagtcagtaatcgcattcaaaactaacaaaagtttttttgaaaacatacattgaacgtaaactaaaaattattttgtgtatagccttattcatgttatatcttatttaaattgatcgttttcttttacattaaaatggaaaaggcatgagtcttcttcttaaaaaaaaatatttataattgtgaaaatgttttttttttatttgtaaaataaaaaaacagtttcataaccaataaagacagttctcataaattctctttataaaattgtttagttgggatgtcactattttatactttcaattttgctgatttgatcaagtttatatatatatgtttgtgaatcatttattatttagctagctcgtcaacgctagctttctagaatgttaattagcgctaatataatgtagacattagtgaagctggtgtcaaatagtttctagtttgttatcaaaatacataattttttatattggaaagtacattaaaacctctatagataatattcgataaatcagaaaccattatatattaaaaagtaaatttggtcccgaattgagcaaatgtaaaaaatgatacaatttgataaatgataaaataatatatatttctgaaaattatatatatatatatatatatatatatatgatcttatcaatatcaaagtgaaatgaatcaaatttgatagaatttgatagaatttgtttcgtgatatgagaagatcgggttttataaactatacaatgtcttgaaatgtctatataatatagataaaaatgcagagagtgaacttggagaaagaaaatcctctaaaacattttacttacagtttttttttttaaattcttttattatagaaaaagcactacttgcatatattttattataggaaaataccatgcaaagaaattaatcatcctataagtatacataggtagacgttttaaaattcatttctaaaactaaaagttagtttaaatatttttatatctactagaagtaaaaacataattttatactatcgttttaataaagtaagtttaacatgaatattatatgcataaggcgctgaggattacctaatgtagaaagcaacaaagagttaaatcataggtagttgaaaataagaataataattaacgactaaatttcattatcatgtattaaaaatgtaaaactatctctatccaccaactcagttttgattatataattattgtgaaacatacgcccgtcatagtagactaatagtaacatgagtacagactcttgagttgtttgtgtatttaaaatcctttggttgttggaaaagaatagcatatgttcatctcttaattaatcgtaagtacgaataacgaaatattaaaaaaaaaaaaatggatacgattataaaaactcaactagggtgaaaacaaatcataaagtttatatagttcatgtcagtacattttcttaaataaactttcaatatatgatttaggaaaaagaaaattgatgatattgaactcctagatggagaatattgttaaagactttcgattccagatacgctttaaaatcttatactagtaaatattggtaacaaaacaattataatcattaggaacatagattacattgcaaaacttggtcattgcatgataaaaacaattgctggtaaatccaaaggttaaaaatttcgacaggtacacattaaaagaataagcttaatggtgtataaaatgaaaattcttttaatttttttgattttttaattagtttgtcaaaattccaaattctaaaatccgaactaataatatgtatcatttataaagatcataggttttatctaagaacatatgttctcgagtattataatttgcaatcaatcacaaaaaatataaagaaatttgatttaccaactctaggaaatttttgacatattatacatgttttaattaaagtagaataaaacaaaaacatagaagagaaaggtaccaactgaacaagttgaagtaacacatggctttggcgtatttatattgatgtctctaccaacttcgccgattatgaatataaatgtttgttattgggatatataataatgtagtacgattttaactgatattataggtttctgatgtagatgacaaaggttgtttcatgcttttctgtttcatcagttaaaatagtgcgattaacatgattagtattatgataataacttcagttgatacaatccatacgatcattcaagttgaaattgttaattccacatatctttttgaataaaaaaacgatttatttgttctatagtgttgatccatcataagttgagataaatttaagagctgttcagtgttcgttagggtgaggacaagatgcgactgtccgggactcaataaattaaaatatatttcttgaataaaacattaaaatacaaacaagattaatatagctaaatatattaaattaagcaaaacaaaacccaaattaaaactttgaattattggaccccaaaacttataaaaggcccataatattcttggaccattgcgatgcactgctgaatgcttgtgaactaggacaaccgagtaaaataacctgttttatatcctctattcaacgactgaattctcaatttttgacgtcgtgtgacttcactttcacaaaccacaaaaagccatcttcgttcattcagaagtacatacaattattgtggtacgtaattggataaaaccgaaaaaaaattcaaacaaaacgatgcactacagttatggcggtgtaatatgatttttacaaaacttgtgttttacaacacctgtcacaaatgtaccagcatccgcttttgttaaacacattcagagaaaacacaaaagttgaaatataaaaacaagttctctgaaaggtttgttatatatttttaatgtcaatgtcaaagctaaaagaacataaagcataacaaattactacatttggttaaactaaataaagagggatgatcaataagaaatctataaaaaatacaaaaattagaagcaaaggaaagatcaagcagggatgggcaaatcttcaacccatccaccacgattaataaagctgagatcagccaaattttgaatggcagattcactaagcttcttaacccacttcacacgtcttcctatatttgctccacttccaaagcatccatgttctgcaaagaccagctggttttcgtggcccacgaaattccatgcatcccatccttcaggaacaactacatcggtcaggttcgagttgtaaaagatcactcgagaataaccgcgccacggcctgcccaagaaggccatgcctgttccatatacgaggcagttgatgaagatgaatccatttgcatcgtacgggttggtccgtccttgagccgttatgtaaccggctagccccggttctagctgcccacctagcacttgtatcacacagctctacaacccaccaaacacaacttttatttaatgaaacttggcccgaataaataggaattttagttttataaaggattattaatatgtgaaaactacagggctattaagaatggttccattagctatgtatatttagttttttttcgaaaatggttatcaaatcaaaatccaatcaagaacattcttagtttggttcaatttttaatttatcatatctttacttttcataaaattaaacttcagttcgatattttcctttttgtgcataggaaaagtgaaaaaaacattccaatcgcagtggttagaaagatatatctagattgaacatcacaactatctacggacatctactgttaacaattccttggccattttaaagacattctaaaagtttcaaattatttagatttaggattaatatcatcctgtcataatctcaaaaccaacattattatgtgaagaatgtaacggatcacctggtaaatagattgaccggtaccaaagatgaaatcgaccgcgccttgtatggtacaccggtggaagtagtgccggccatcaaagtcccacaaggtatcttgaattccagcaaaccctaccgagtaaaaagccgacttatcgccgcctatcaacgctgccacggctggagttctagggttcttgttcattttccctttgctagggaaattataggaattctataaaaaaaaaaaaaaaatccataaatttattcaataaaaaaaaaaatcaacaaagaaaaaaggcaagagaacgaaagataaaaatcaccaccgtacggcgaaagtgatgcttttaacaacggtgttatcggcaagagtagaaaaggtagggctttgtgcaaccgagtaatggtcgtcccattcaactctcgttaacctttttccagctcctactagtactatgaacggtttttcatacggtatctttattttctctctttatatgcaagacatagagaaaaaacattactaagcactttcgcatatataacttcattacaagacatatagaacttcatgataattactcaatcaaaatattgctagactaacctgtaaagaccggctttaacgttgatgaagaaccaatgacgattgttgattggaacagaatcaatagctttttgtattgtcgtgaaatttccatggccggattgatcaacaaatacttgttgttggtatactccgaatggcttagcttcaatgaggtgaggtagacaaaaacaacaaagagcgatgagacctatgaaaattcgatgagttcccattattacagtttctgattttgattagatggtaacgaaacgtaagagttttaagagagggagggtaaatgagagtagtggaagaaatggaggatttttttaacaaggtcgtgaggttaatgcttttttagttaattgtaaatattttgatgaagattttgttactttgttttcctttgattatgtgaggtttttattgtgctattaaagtagaatctaaatgaaactggaaagtttggctttgtttctagatttggtgatccaatatcttggttttatgtgagaggtccgaaacaagaaaggaagttgtaatatttgttttgattgtggtaactgtaaataaaagttagtggtcgagactaaaattgaaaaattattataaattattttaaaaacttaatacatagtggttttattttgtatagagattacactgaaaaaatggtagaaaacttgaaatttgtcatacaattaatattttaggttaaatctttgtagatgactctatccacattgataaatgataagtatatctgtcttgtttggaaataaaaaggaagcttttatagatttgggcgtatttctccaaataataggaacaagtaacacattggaataaacccctttataagaaaaaaaaataacacatgtgaatgaacaatacactaaccctttatcaattttttgttttgttttaataatactactattcctttaaattttatttcacaaaaattttcaaaaaaataattacaattttgcatcctcagaaaaatatgacgtgttattttcaaaagaaaaatagaattctatatacaaactgtcaccctctaaatatttaccgctttttgaatagagatgagaaaagtctcaaactccaaccatttatttgaaggccattctaggatggcaaaaaaaaaagatatgtttattttcattttcttgttgacatctagtgatcactgatcaggcacgtttcaagtatcaaatatcgagagagtacttatacacgtgcttacactttttagccccaagaaaaatcgattaggagtaatcaccagtggtcctcatgtatctgtcttgccatattttcacataccttttgaaaacaaagactgtgtagtgatcccatttcttgttaaagtgctcttagactgtaaaaagagaaaacaaattctatgtacaaacattgaattctaaatcaactcacgacaaaagaaaaaagtaatcagaaatctagatcaactctctccattttcaaaagtaattacaatgattatcttaccatttaacacaataatacgattgacaaacacgaatcttttttgcttaccttcgatgaattaatataagctatataacaaaggatcttcaagtcttggacggatttggaattggaattctctggccttggactctgtcaagatcttacccccgtacgaacctacttggtgtgagaagaaaaccaagcagtgcttttggaatttattgtgtatgtgtcggatctgacttggattagagctaatggtgaatatataaagaagatgaagacaagagtttcgtctttgttgacgtacgagagaaagattaaagacaatcattttgagtctcctaaatgaatttgtttttctgaattctgacacttagtttctttagtcaaatcacttttgaaaaagtgtaaaagcgtcactttgtttaaccgaatggtcaattttttgaagattaaaactggctatttctaaccttttttttcttcatgttttcttgttgtatatatattggcccatttctcatagacaaatctcaagaaaatgatagttcctctccctcccctcaagaaaagttttcatgcattgtttttttcttttcttttttattttgtgaaaaaagttatttcaagtaaataagtggtttagcattctaaaccgcttgttcaaaacctacaaatcaaagcagcagaaatcacaacaacgagttctaacattacaagcgacacaatcatcactaaaatttaaattgcatgaaaaaagccccaaaaaaataaagtaagcactccctttaacttaaacactcttccaaatgcttggagaataaaacccaatatgtagagattattacgtactgtaatcttcaccagtgtacaaagttgtcgccgtgtgatgattttcaagtaaacacaatatttcccaggttagagcttccagatctgaaataaaattgtttccaagctttaacacttcaaatattgtgataaatatgttacaatatatatatatatatatatacacaccatatgtaacacacaaagaaaataaccatgatagattagatacaccatatatatctaacattaaaagcaaataatcataacatctaaaaggtaaaagaacaaacaaaagacaaaagctagacatctaaaatagtaaaatgtataacatcgaaccaccaatatcttttactctaagactttttaccagactcatatactcacacactcacagagtcacacacacacatagtaatgatgtcttgatgattagatagaccacattgcacacaaaaagatataatcatgacatctaaaaggtaaaaacaaacaaaacacaaaaggcatgtgaaatggataacaatgaaccaacataaacttttgttttaagggaccaacagaaacttatcaaaagtatctttaatcgaaagaatatttaaatagcagaaaaatatatatccttacatgttggtatttgcatgaatgaaactaaatatctgttggatggaacttgctatgtcttctgccgtaaacctcgtttcacttgttatctgcacatattttacatctacctcatgttagccattgatagttattacatatactttaacaatacaaatccataatctatgattatattgaaaaccctaaataaaattataaatgtgttttatgacagctaatccagattagataattacatgtattatttgatgagtctagattttgcatatgaaagctgaatatgaatgatgaattactttttaacatataaacttgccttgacattaaaggagtagaggacggtttgttccatggtagtgatgttagtgtgaagaatagagagatgaagatcctccaaagcagctatagtcttaatcagctgtcccggccttcttcttgaaagtatcttgatcatggcgtcaaaccctagcagcttcacctccacgtcagccaagcacgacttgttctccgcagtctcctcccgaagccctcctccgccctctagctcggttacatttcccgtaataatgagcggttgtgcttggttcgctaccgtagttatgggagaagaagaagaagtcgttgtcgttgtcatgtccctaccggtttctcctaagattcttcgacgcttctgtgattcaagacattgtaggagttgctcgagctctctcacaaactctattgctcctcctatgattgacgcttggtctccctattttatacaattaatatttggtgtagacagtataattagttgtacatatacatataaaaaaacattcacgaaaattctttctttaagatataatttatgaatatcataccctttgaacgtaggagccaggcatgagagatctaaggacacgaagatgctcattcatttgcttcctacggtttctttcgaccgcgatatgagtcatccgttggctttccacttcttcgctggtcttgctcgttctagctctcttcctcttgctcttcacctcctttttcgtaacattcttgttctccctatcttcttcttctcctccaataaaacgtagttgcacggagttgttgtcgttgtcatcgtcttgatcttctttttcttcaagaaacacattgcctatgtttcctccacactcacctccttcttgagacgtctgatgagaaggcatgagatgttgggtttggttatggtcctctattttgtcgttcaagacagggaacttcaagaaataaacggggtcaatcccggtttcttgatcgtcttggtttctggtctggttcaacgcaagtttcgaaccgaagtccgcaaactgcatcacatcagagaagttcattttatcaaaaggtgttgctccaaatccggaaggagagagttgatgttgctgctgttgtggcatcgattgcttttgttgttgttgaaggtttctattgaacatatagtctatcataccagagctgttatcatcgttaccgcctgaggattcacctaagaagtttggtgcctaataaaaaccagaattggagaatgaagttaatatcataagcaggaagatttgaatcttatacatagatatctatcaatttgtataagaaaagagattaaggatcttgaaatactggaaaaaaaaacgtacgtaccgagtaatctttatccattgctattcgtggtagttgattataaactgcttaagtctaatgaaggtcaagcttcttgacctgatgacaacaatccatgagcttcacagtcagttttaaaaacatatacatgaaacaaaaacacacgtagaacaagttaaaaccaaacctaggcagattacatgtttcaccatatacatatacatgtattttatatgtacaaaacaagttttcaaattgaattttgacaattaaaaaaaatgattaacaccaaatatattagagctttgtttagtaaggagttaacaaaataaaagggactgaccttgtatgatttgctagggtttacgagagatgtatataaaagacgcaagacatgcaagatagtagaagaagacggattagagaagacaaaacttaaaaaagtgaggggagctttttgtattgagaagtcataaatgagtaagcatcaccaagctcccatatttatagagagagatacattatacatgtgtacacaaggtatagcaagggggcattaaatttcttaagtatgtatattcgtaatcatttgtttctctaattactaattagggtgtgaatggtacacattcgtgacccaataaaaacaaattaaacgacttaaaaaaagatacgtaaacatgtttcaaaaaaaaaaaaaacaattttctaaagaataaagataaatgaaaatctacataagttaatctaaaatattgaggattagtagtaagtagtttgattgcagtggctgttttattctactatcatattcccattaattatcgagacatcattgtttttcgcaattttctatgcattctcttttagtttctaaaagtagagaaatatcaaccatcacataaaatgttttagaaaatctaaaaactacaaccaaaagatatcaatcgtgggaaaaatgaattttcgttactattgtccttttttattgctttgtaagaaagaaaaagggatgttattattgccctcttataattgttagagatacttaatgcttagtaaaaaaagcttccaattgtagcaggataaagccgtgcagtcggaagttctcaatgtctccccaaatgcttttgcagaaaatcatgattggctaatcaaaagatgctcattcaatcaatccctttgtattatgcacataatgtgtcaatattaattttcatcccatttgatatataaatatcattacatatatagttatctagttcttctctatcttctacatagaaacacataacaatccaaattttacggtcaaatttgaaatgggggatctagagcaactccctagcttattttgaacaaaaattaagttcaatattgactcaaaagaaagattattgaatattccaaatcatatcttgtttttgtaataaatactctatttctttttgcgttagacgtaagggtgaggagccacaaaatacgaaaaaagaagtaacgtgaaaacacacgtgtatcagctgatcacctctctatctatctatcttttttttttgtttgtcaaaccataaatgataagatttgagtttttagagttcacaagccaaggccgctctttttccaccgcttttcgtgaacttaatcaaatctctatacgcttctcatcttttagtttatttctatagtatttcaaattcaagcacttatattagttatgtgttgtcaataaaatatgatttctaataaaaatattctggtcaaatatatgaaattagtttcacgaacatgacctatactatttgtgtgtgtacgtggagacatatacatttaaagaaaaagacactggtgtggatggttacgttttaacttttaacaaaaagtggagtaaaaattcacgttgatcaatccagtgaactttttcgggaataagagtcgcggatccataggagtattttagtaggtgcatattacacaaatactatgttgaaaagaaaaaaagaaacatgaaagagcttgcatcgaagcatcaaccaaaaaaaatacttgctgcaaccattcccaattgagccaacaaaacaactattacgatacataacacccacaggccacaagcatcgaaatactgtaagatatatagattttaagatcaaacttcaatgatagcgagcgaagagactgattgatatactcaattcttttttaattccaaaagaataatttacattcttttttatcataaaaaaaagtaaaaaacataaaaatttgcattcttataccataaatttattgtcaatatacaagtgcagttcaaaccaagtaaacacacatatttattatatctatatcatatacatacttttgttttggacttttttttcccactcatatcaataaatttttctttgagtagtaaatttaacactaaaaattcactagtaaaaccacttagtgatggtgatcccaaaatcaatttccaaacttttatcaccaccaatatcattaccaattttcaattaatttcactcctttaaaaagtgtttttcgcctacttttttctttaagatatacaaatcttttttattaaggaatctaaaaaaagcatattgttagatgaatccaagtaaaactaagtcaacagttttgtaagttataagttgtaactctatagatttaagagaaatgaggtcaaatggcacaaaaaagctttcagtaagccaatgacaattgctctctcatatattttaccaagttaatgagaaacgtacccctccattacaccttatcttcctctttacaaaaatgttttttttttgtttttgcatttcatcgttttctttccgctttgttctcttaataatctaaattgattcaatcttgcgttctttttcttttttaacagtttacattttttatgtatgtcataattttctattttaaataagagacataaattacttgacatattagtaagtgactctaaaggagaactcaaagcttttatttagaacacatatagtaaactttaacgcgtaatgtaaaactattataggcatattcaggaattacgaaaaatttgaggtagctgcgtgagattataatacgagtactctataccagtttggaatcatacatgaagtttggaagcttcaggtacctagttcactactaataataatttgctttctacaattttgtatcggaaattttaattgagattgttaatttaaattttgtgtgccaacaaaaacttaacttttaaaaaatattttttaaaattaattgatttttcttatacatatgaatcacatattatacgtgtcgcttttttattacattaaaactaattaaaatttccgtttttacttctaattaatatactatataaatttttactatacataaaaaataattaggataaaactgaaatgtcatagaaactgtacttcaaacttaagggatatatattttgataaaaaaaatttatttattttaaaaatacctgttaatataataaatatattgtattaatgtgcgtaatatacagtgtaaccgactttctcagagtagaaatgttaaaaacaaaaaggctgtgaatcgcttggccttttggcttttattacctttttattgttttttttccagcgactttttctgtcgcctttcctccttctttttccctttgttacttttactttaattttctttctttcattctttatgtacaaaatacattataactaataattgatacatattttgattgactataattatattatatgaaaatatcaaagtttcttaaaaagatttataaaagataatttatataacaagcaattaaaattggattaatatctatcacgaaaaactgcttattttttttagtataaattattaaataaagtatgaaatgaaattgtaaaactgaagaattatgctttcgtataatttttagacaatttgatattgtctatcttttaaatatcataatatttgataattatcaaaaatatttcacttttctttttctaatatatgaagtatgaaggtttagatttgtatgcttattatttcattacttgaatgttaaaagtttacaggaattttttttatttgaagatattgattttatacttagttgagaaaaattattataacgtaaatctttaaaatactatttgaaactgatattattttaggaaatatttcattaaatgggtcaagccactagagagtaccttccgtagaaaataacaaacatcgaagtcaagataatatgatgatgaagtgttttctgaggatattcgcatgcacaaaccagtaaactagcctgcaagacttccttggaaccagaaaaaaataagaaaacgcaaacgaggaatgcgagttttagtaacaccggatttgaggaaacgtgatatacaatgttttcatcagctagttgaaatatggtgttcatggagcggaaatgtatgatgataggaaacttgatcgaaagacagtaagacgacgaagtatcaaggtcaaagaaaaattcttgaagatgtacataatagagaagatgtacatgagagattgatcgtatttatatactttaccagcctctggctcgggctactacatctggtagaacatggatcggtcatcggtgatgacggaattttacagtacaaggaacttgaatgctctttacctattttgtttttttgtgtgtgtgtgttatataacaaataatagacatgacgatcgtatggatcgttgataattgctttaaaatctcaacaatggacatagagcaactcgtcaatctacaagcttcgaaatctctattaattgttatataaccgaagctatttcgaaatctcaacaatggacattgacaatatccatccgattgctttcaactttatgcactttatttctccaatggacttagaggaactcgtttgatcctatttgatcccgacacatgtgaaagatatatgaataattttaaattcataaataaagctcgcagtaattaggctttgcgagaaactctttaggtatgaaaactcggtcttaattcttattagtactctaaaacttagattaagcaataatcccaagagatcaccagaactaattacatgcgtcgctaagaaatgcatctaaactaaaaaaatgatatttaaccgaaacatatataacttttaactttaaaagttgacaaggtgctaatccctcaatattgttgctaagtttagtttttttttttaaatttgttttttgattcttgcttattcgttttattgtttaagggtgtgacacttaacgattatggctaacttagataaaatcaaacaagtgttttattgttcttttgcaccccaaaaaaaagtgttttcatcattgttgtattggtaagaaataataaaaaaatctactacgtacggttttataattcattggaggtgaagtccaaaacttcacggttaaaagaaacataattcttttaacaaaaacttcaagaaacatatatataatccttaattaagatacgccaaagaaataattaagggagaaagaaagttgaatttgattgtgataggtgtcacggtaatcttacgtgagatgggtacgtaggatctccaaaaataaataatcatgcacttttatacgttacttttgagttttgagtttacaaatatatataagctccttttaatttattgcatgttaatgactcgtgaatcacgagtgtacattactttttataaagcaatttttttctttgaaaagaattttcttgtatcagaactggtctgaatgtttaacatcaaccaagatttacaaactgtttagtgatgaagctacaatgaaccctcaaaaatgctaattaatttggtgaaatagatcaatatcaactttcaacgacacacctttgtttttttatgaaaaaaaagtctcattttcgtttgttttgattataaacaaagttggtctctcgcatgcaatgtacgttcacgctgcaatgacaatagtgtacgttctttgttgtaatttagtcgagaatccatctccgacgttaggaacaatctatcatctttcctttttttctttgcacaaatatcgtaaaagtgatacccacgattatctacaccaaaagtggtcactgacaatgtacgaaaaaacttagaaaacaacttaaaaaaagacagttcaaaatgatggtatttgatcagtgagtagcttcttcagtattaaagctcaattacatttattcaacctatggttatgattatataaactctgttttctctccaatttaccctgaatatgttagcacttgtaactaacctaattctttctattaatttcacatttaaacaaacatatataaatggattaactaattcttggatccagaatttagcttaccatacttaagatcaatccatggatctttattataaaacttgaagcgaacgctaagactagtagagtcaataaaatagtaaaccaataaacctgaagcttttacaacaactaagcaagtcctaaaggaagtctccacacaaagttctgtgctttttaactctcgaatctgaattctgaccttcactatttgaaaaccattcaaacctatcattcttctttacctctgcgaataaacataactcttcttggtttcttcccgggtaagcccgactagacccgacatctattcttgtagacggttctgaagatataccgagcctcaaggataaatcacagaccctctcagttgcttcttctgagggctttataccaataggcatgccaatgattatgggcgcttcagggactctaaaagacatgtcagcttgctgcgtttgattattaccttcgtaatacaaaggatagaccgaacccaagttgactggagctggagcaggagcagaagcaggaccagttccttgtctaattgccaatggcttttgatgcatctgcatggattcatgaagaaacgggtaaccgcgaggagtagctacacgcttgttgctgttatcaagtacatcaacagggactgcagcttgaactgtctggcttggtttggttgatgattgttgagcttgctgacgatattcatgatggtaagacggctcattagtcgacgcagaaaccggttcctgaattttaggaccgaggtaagtccttccgctactatgtcgttggcttcttgaagctcttacagcaatacatcccaaattaagagcagctaaccatataaaaaaaaaccacatcaacaaacaataaacagtacaaagcactaacttctaagtagtttcaataaggatcactagagctaaagagagaaacaaaaatgacaattaccttcaacacatggaggcaaaagaggaccagtttctgtactctcatctcttctaataattgtatcaatggcatcatttactctattccacatagtatcagcatctgtatactcttcctaatggaaaccgaaacccaattgtcattttgtgaagctgaaaacacactaaaaaaagagaaggaaaatttgtttaaaacctcggaattggctttagagtacatgatttcttcagcttttaacacaaccacaggcaatttctcctgccattctttgttcttcctcgtcgctgcgctatgtgcttccattgcgagtctgaaatcaaacaaagaaaaccccaaattaagatacaaagaaaccctagcgtacggttttgagaaagatgagtgaatgaaaaaaacctgaaaatctggcgaataatcgaaccacgaataggttgatgacgatcgctatgccaagctcgtttcacacactcgtaaggtcttggtcctggcctcggcattttctccttcttcacacacttgagcagtgacacactcagctacaaatcgaagtaacaagtcactcactcatcaaactaatcggttcaatttctatccgggagtattttccgatcagcgagttcgatgtacgagtcgccaaatggtgtggaaagaaaaatcaaccttaaaactctttttaaccgatccaaggaaacagatctgaagctttgaagctctgaatcgtttggagatttcgtctacttgagctcataccggtcacatctccgtcatcatcatcgtcatagaatctccgattgttgtctccatcgttgccgcttctggaaatggaaatggaaatggtgtgattcgggaccgcttctttaaaaacgaaccagttttgtgatttgtctattatacccctatttgtactaactgtcgtttttttttttttttttgtcggcaactgtcgtttaatatggctttttactaaaccggaattgaaataaccgggttttgaacagataatattaatttcaaacgacaccgttttggagttgtgtctaacactttgattgattctgaaatctggattcgtctcctccattaaacatctctcgtctgataacaccgatccatctctttctttctctctccgtcgactctcgttcttaaagatgaaagctttctacgtattcgttgttgctcttcttctcaccttgaattatagggttcgtttttgttccttcgtgtcttgctctcgtttacggaattgcttgtatgtaatgacatggatctgacttttgtttgtgtatagggagaagcaagtggttctgttttcttcattgatggatccaacaatcaatatcttcgtccacgatcatccagtgaggtaatgattttcgtcccaaatgtgtggatgaccgatttgaaataatctcaaatttgatcattttatatttcaatctaagatcgtttctggaaattatacgagtttggtccattgaagtagtaaaataagatctattgtttggtctaagtggcaccaatttgtagttttcttgtctgtttttttttgttattttgatattgatgagagatcaatggacagattgcaaatttatgtttgacaagtactaaagtttgtgatttaatagttctttttgatgaattttagttaaatctcttttctttgaattgaaatgcacaggcacttcccatgtcgcctgttgaaatatctgcagcagtgtctgccttgttgggttttgcaccttcagcaactttgacagctgatggctcatccaaggttattttagtattatagtagagttgtttttctctctctgggttaaagtcctgtacttcatcgtttatttgttttgcattttgttatagttgaacaagattctaaaacctaatccatttgagaggcctcgcgctgcttttgtgctagaaatcgctggagctgatggtatgtgattggaaagctttagttttctgacatgaaccaaaaattttagttgtaaaatattcaagtgtttgttttttacttgcagatatgcttttggaaacctcccctagtcattctttcttgggcaatgccataaggagcagtattaagtctgattcgtacaaagctgatactgaacttccaggtgccctatcagcttgaataccagaaccatctgagcatgactagtttctaacttttttttctttatgggtttaagtcttactttggatattctgctaatcttttcaaaattctgcagacaatgaagtggttgttgtgtctgtcaatgaaccctcctctgatgtgactgacaaggacattaatgattttgttagttaacagcacctgtcattctaagtgcaaacactatttttttttcctttttaatataatgtgaccacaagttaatggtgtggttataatatacttaggcatcttggttgggtggatcatatgttgctggagctgaaccatcgtctggattgttgagtatccctctggctgggggtgctaatgtggagttcaatttggaaaaggtaatattcttaattccatgaaaaattgtatgattttatgtgggagaggttgctgtattacctgtagatattgtgattttcatatgaagaaggcacatgacttttgtttctctgggcaggaagcagagaggaaatttgcattgaaccttttgggtctatatcagaatatcagacaggcagtcagcgtttatgacgatttatctcatggtattgacagaactgccgaattaacggttggacgctttggtggtatcgatgtaagggcatttttgttattctgtttttttccctttcctcagtttctcagtcttggtatataaattagagggtggagttcattgcatacgcaaatgtgtcacctttagtctcttcaaaacttatgacatttctgttgatcgtaataatggctgttggttgtgcactcttttcgggatactcctgcttagctatttaaggaatagcagaggattcgaaagtgaattatgataagatctcagggaactggaaatgttttgagctggttgtagtcgtctaagctatctttacacttattgtatccaaggattgcaaggctgataaggaccttgtaatgagtttatatcttgagtttatttttcattgaaaatgtctaattgttcaaccatcatgttattgtacttagcttatatttgtttgcaaaggttgtcaatgtctctaatataatttattctttctggaaattataggctttagcacaggagtatggacaaggtatggctaagcaagggatggatgtattactttccacattatcaaagctattcaatctgttggagacatctcataaaggtgaattgtctctctgatttaataaactcgttttcaaagatatgtgttagaaagtagttcaagatggggaactcattctctggaacatttgtcttttttcttaactgaatttatgtaagctgagagatgtattggctcttgtaggccaaattgttggggttatcgtccttgatgagagagtaaaccaagaatcagaaaatcttttgaactttgggtcttcccgttcatctgcacgctcaatggtggaagtggagggaattccaagtgcagccattatcgctgaggttatacttgttaggctgactcttgcatggttgactggaatcattcttctcattgcaactatccttggggtaagatctcattactactagtctactaccaagcagattctttggccaatgtaaagttgaatgtttccacctaaagtggcctattgaagaactcaatcgtagtttgaaaactgaatgtattaagtcactcgaagttgacgtacttgtcatgttggttgcaggtatacttccttatgaacatgcctttgacgaaggatactcttctatattcaaatgtaaagctcgactaagaaatgaaacagagcttcaaaacggcaaaaggacactgattttctctacaggtcgttcgtttacatatttttgtgtgtatcaagccgtgtttctcaactggccgcctttgaaaccggtgtcatttgaatgtttaaagagaaggatgaaacttttggtggtcagagcagttgatgtgttatgtgtatattgccatattggttgcattctcgacttataattattttctttcttacatacattttgagtctcagtcctaataataaaagaccactttggacacttgatgtgtatcttctgtctctgtaagagcttttgatcatgaatctgaatatattattgcaacttctccaggagctttgttttgcataagacagcatcattaggctgctcatttacaaatgtcaccatcgacctctattagttcagtttgattcaatatagttcgatttggttctagttattacttagtagaccatatgcgagtacagaactgaagtaaatgatatgaccaagaggggttcatagaataattctttgtaataaagttccactaagcaataagagaagaaaccttgatgttttctcaagtaagtaagaagagaagcatcatacaaacaaacaaaaattacaaatcctttattgggacacgagtatgattaaactcatcgttgtctgactctttgatcaaattaagtgtaccgagttttcatgctatatagctctttatattttgcggttcatagatttgtcttaggtttgggtttgtgggcaatgcgtctggtcacactgcgcattgtcacaaattcctctgcagaagatggatgtatcccaacctgtgttttgttcacaatattaattatctttagttagagcaaacatcaaactggtgaaagtgaaacccaagtgcttggaagacgtatgacttaccgtgctatcaaattgtgctttggttgctccacacttgagcgcaattgcaatcccctgcattaagccatacaatataatcacttaaaatcaagacacgcttcggatcaaactctaatccatttacaatactaaatacttctcaaactcaaatcaggttctatatggttagaagaaaaattcagacatgcaatcgtctttaatcaacccaaatctttcagctaccctgtaaatgatttttgttcttgacacctatgcaccactcagtagagcagctaaagggaagtaaaataaatggtagaagctactataaaggaaaacttgcctgcatgatctcagctgcatcaggaccgcacatggatgctccaataaccttatcactcttctcatcaactattagcttcatcaatgtcttttcctggcgtctataaccaaaataatttagtgattagttcaaagagtgatcaggtgcaagcatattgaagaaaatcaagaacttttctaaggattttctaaaacttagaactttcaatgctttagacaaaaaaaaaaagaaaagaactttcaatgcttgcatacccagaaatggtgttcttcattggattaaagcctgaggtgaagaccagaatatcaccggttgcttgttctactgcttcttcttcgctgagacccactacagctagtggtggtatgctggaagacataaggaaacaaaaataaaaataaaaaatatttagaaaatgtaatatctatataactatgagaatactgatatttccagagtagcagatatgtttgtggagtaactctataattatgataatattggggctatacagtaaaaacatatgccaatataggagaaatgtttgtggagtactttcagatattttcagagtttgatattcacattttaaagatcacatagtttgtggagaattgttccgggacacaatacacatagtttgaggtaactagtgcctgcaatatgacacacaaataaagcaaactttcatcctatcagaaagaatacttaccaaaatacagcacaggcgacattgctgtattctgctttagtaggctttccaccaaaagcagtgttctgcaagcatcaaaacaatccacaaatggaatacataagtagacattcccaaacacaaaagctgaaatagttggtggtaggtacaactcctcgaaaggtttgtgtaaattatatgtgcaagataagaggcacagaccgcaaaacaggtggcctccattaacgcaacaggtgtaaggttaattcggtttgtggcatctcctacagcccatatgctaggtatattagttcgtgaatactcgtcaacctgaggataatgtactgaattagtagctgcaagaggagaatgtttccccagaaagtcacggaaaactttattcaggataaattttagtatctgcaaatttaggaaattgttaaaaccttcacagctccagcctgatcaagttcaacaccaacagcttctaaattcaatcttttggtattaggacttctgcctgtatcaaatataaacaaaagatacatccttagacagctggaggtaaagctacagagcttcctggtctacaataattcaggaattttaacaccaaaataccaatcatgctccatttcaataataagtagattcctcaaaaattaagttcaagggaggaagcaaaacccgcacaaacatacaactatcgaaaaacagaatgaagaaacctactgttccgtaaacccaaaaatccacgcagaggaacatgtattagagtagaagagaacagagataaaagtactctattataaacaaacgaaatttgagaatcacgtaacagaaaatttaccagtagcaaataggacgacatctgccacgaattcctccccatgggacgatatgactttgatcccctggtctgtttttgtcaactaaatggaaagatagtgtatgttcagtaaagtactatgaactcatgaaacaagtgaaaagaacgtatatagtaatgagacatgaaaagtaataatcatattcagatacctgagtcaaacttgtttgtggatgcagattaacgccccttccttcaagatttctagcaactagtgccctcatttcgtcatcaaaacccctgaaaagtagagttttagaaagaaaagaagctaaaacaaagagatggactttcagttattcaacataatttgacagagaaccagcaccttagcggaagttccttcctgaagaataaatctacagtagcacccattccacgccatattgatgcaaactccacagcaatatacctaattaaaacgtaaatagaaacgaggattaaaccattgaaacagctggcatgttaggtacagcaggaggaaaacattgaggaagacattaccctcctccaagcactatagcacgcttgggaaattcttccaagctcaaagcttcatcagatgtaatagccagctcctataaaagacagtttatgtataactcagtggactttccataaatagcagttaatagtttttctcacagactaatttagagaaatcatattgcaaacatacagatgtgtctgttatttctattaaaatctttccggacttactctgaagataatgatttcataaataccaagcacatcacactatagtagataaaaaaaataacatgaacacagaaacttacatgtccaggaatattaggcttttgcgcccgactgccagtggcaatcaatatgtgctttgcggtataacttatttttgtgccatctatttgtctcacctccacttcgttgggaccaactactcttccttcaccttcatacaatttcaccgcagcatttgccaataaccgcttgtagatattattcagtcttagtatctcatcagtctgcacagaaggaattaaagacagtaattgattatttatgaccgaattagttacatcgcaaaaatatccaatctactgagcacactagaaaaaactatagcagcaaaaaaccattccccaccatctaactttcatacttgacaaaacaataatataagtatcttcagtaggttgcggaaaaatatcaatgcttatacatcccagagttttagtagtttctcattgtgagaaatccaagacactatactgctattacaaccaaaacatccaaaaatattaacctaaaggtcactttcttgaaatagtttcaaccataatttcttcacaacttaaagatcaaaggaagatattacagtgtcaaggagaaagctacaacgctaatcgttttacaataagctgatttcattgggataacttcgagcaactggtgcaagtgtatcaagaaatatttcactcaattactgaaaaataagaatacgtaagcattatagcaattcctgcataccttcttttgcaaaagcttcttccatgtgaagtcgactttctcatttatttcccacccataatttttagcatcctgccagcagttaaacaacagtatacatcatcaaacacaattctctctcagttgacatgaattgttcatagacatatagcctaaacaataatttaggaacatgaatacaattttgcaaatattgctagggaaaatgactattaagaagtttgcttttacagcttaaagaaagacattgaaatgatgattaaaaaacatggttcatacctcaagttcaccaccgtaagtagctccatagacgagaatctttttaggaacacaaccacggataacacagctgaaagccaaaaaaagtggaaacaaataaaggtataagatcgtgtaagattccaacgtttgataatgcatcaacaaggaacttacgttccaccaacgcctccaatctcctcagagctaatagggtgaaatggaagctcacaaataccaacctacaacaattgattcagaacaaacaacaacaacacattaataccaaaaccagacatacactaatgtctagagatcatcactatcctcaaaaataattcagaccttagcgccatgattagccgaaaacctagcagcacgaacaccgccactcccggcaccgatgacaaacaaatcaaaatcatagtgcgtcgcgttggcttcatcagccgccaccttatcaatctcaccatcaacaagcatcttcctcgccatgattatgcagactcacacaaatccaaactgccaaaaaagaaaatcgaataatcaatcaacaccacatgaagcaaaataacgaaatgaaactaacaaacagtgaatctcgaatcagcaaaaacaaacccgatcgataggatgtttgtctataatgatgaaatcgttcgatgaatcgcgaatatcaaagaagaagcagtgttaccttaagcgttgaagcgacaaagcaagaacactaaaagatcaagagaagagagacacagatacggagaggaggaaataatcaaatgattgtgtgggtaatgttaaattggatctcttcttaatcacacatcgatattgttttacactgacttaagtttttttaggctaaagtcattaatataattaaaccattgagttttttagattgatcaatacctttatgtataccaacttagtgctccctacgaaacatatgctcaaacaattgaaagcgacttttaaaacgaagacatggaatctttcaaaacttaaggtctaaattgaacgctaaaaagcgtacgtaggcgttgtcattatatgctcttacgtggcttttcttttagccaataattcaaaaccaacagaagaaaagaagaacacaaattgttcttctcagattattatttattatctaaacaaaacaagagtcaagtcacctccacaccaaaatgttgaacaacatttacgtttccatcatctttttatggaaacttttcccacatactcctctctattaatattattacaactcaggaactatgtcggctagttcctctccttaaataacatttcctcttttttatatatgttactccgataatcatatcagagatgtgaatttacttgtatcttatatataacaagaccgaatgatttagcaagaacagcttaatgctgaattaccaaaacactttgccttgtgtttcacaactttgaagttgttcgagaatcttcggcttctaggggataagtgtactctgtccatcatgttgatctgtggagcgtccagaattgcctttggcaacgataatgcccattgcattccccatatcgcgagcggtctcatgtatatcagtgaccggtaatgcccatccattgtccaaccttccggtgtctggaaccaatatctgttattcggttcaacaaagatacatcatcatcatgctcgagtatatctatgtgtgtgtgatatcgaaacaattaacagactggatataaagaagaaagaaaacttacccgaaaccttcttctgaccagccagctgtgaaaattccctcagcagtggtgaaaccttgttcttccattccagagaggatcatagtagccgcagctgcataagtaacacctgtccatatctcacgagactgcatgcacgtgtcatccactttcccatccggatgcatcccatttacagcacccattttacctccttttgtcttcatcacattgaaatcaaagatcttttgcatagtgcttctgattttggattcctcaaataatggaggcagacctgaagacgcggcataccattgacccgccagctgatcggtctgtatagatttgctgttgctgcttgacccactgtcgtaattgaagtatgatccattccagagtttcgtttccagtgctgcctttgcattcaaaaacttatttttacaaagttctgcaaagaatttgtcaccaatttggagagccattgctgctgcagcttgaagagcagccagccacaggcaaccgcagtaggcactcacgccatgaacagtccatgtatcatatgtctgatctgggaaaccatcattctctattagatcgtcattgtctctatcaaactgttccatgtactccatagcagcacgaactgcgggccacacgtctattccaaattggtaatcccctgtagctgcaaaatctctatacacctgaagcacaaactttgggttcagatccttccacctgcttgtgtcatgtatgttgtaggcattcatttcattccaaggatcatgcatccccagatcgtgaggaacagcacctctgaccttgcgaattcccacatttccttctgccaggaacttaaccttcctaccatcttcagacaacacggctttcgcaaaatcacgctggatgtttagttcgatctttgggaatagcataaggagcgcatatgatgcgtaaaagtgtacatcatatgtgcaccacatcacatactccacaccttccaaatacagaaaccgaccaacatcatcgccatcatctacatggggagtatcgacaaataaaccattccggttatgaatggctgatacttcatcattgctttttactccaacgctgttgccattaccaaggtcattccgttgatcattaatgtcaagtccaccgaccttaccatctgaatttcctaatcccgattgttgatgctgactattcccattagcattgagtgaagaagagtctgcaaccaaaaaccgttgataaggtgatacaataatttcaaggcaccaaaataatgaaacaacaaaattttgttaaaagcgaagaacacaattttacaatcaagagtttgactttgaagaagcgtatagatgtgtacctatccaaactgtaccaccggcaaccaaaaagtaaagctcattgaacagagtgaacttgtacctacaaaaatacaaaatagttcagggcagaacggtgagagagcaaagtattcaaagatctattaggttccaaagcaattaccactcagggagcctttcatctctgagaatgggattctgccatgcttcaatatcttcctcccacctcttataatctgaagttgaaaaccgatgctggtcaataatgcataagcactattccacgtaaaacggaagacaaattgtgtgtatgtgtaacatggaacaatttcagttaacaacattatcaggtatacatccatacagggtggcaacttaagtgaagcatatgacacatgaacatcagcaccacaaatacatacttgtcagtgcatcatgcacaaggtccaacgctgctcttggcgaagtaccataaaatttagtgtatctcctgcaaaccaaagacggaaaaagacagaaaacagaacccagaaatcaacagtgtataaccaaagacagaaaatcaacagcgtatacacattaatatattggtagcttctcaaagcatgtattccatacactcaattcggccatgggtttaagctttgttaaacaaatgacacccaaaagggaaaatttatgcttccctctatttaatgctgaagtattaacctacgtttgcttgagcattttctatgtgtacaactagtgccaggcactatgctttatctttagcttgcctagaactatctttctctctcagagttattcttctctttaaaaatatataaaacacataactgagagcgtcttcaagattctggacttagaagcagatccagcattactgagaaaagatgtaaactacaaacaacacagaaaactgatgcaatggacagaacaagtagccaactttaagacaacattgatcatatgaaaataagttggtgataacgattatcaaagaaccaacttaacttgttgggaagaggctacaaaggttgtactttatttacctgtcatatgtgcttccctttgaaaatttcacttttggcgatgaccatgaaagtgcaaaagacacagtgcacttgccatgagcttctacccatgccgaagccgagactgctgcacaaatagtgtctccagctaatgaaggtgtgcttggcccgctattgaagttttcttgatcaaatttcccatccttgtaggttaaatatcgcaactttagtctcatttattaaaatgacaccatatatattaaaccaaaggtcttacaaattgacaattcagcacaaagagcaatgataaagtcaaaagcatcttttgacaaggtatgaaatctacatgcacatagtaagagaacgatgatctagagaaagtcacctgttccattgtatcccacatatctttcgctgtaaaagaactatcttcagacaatccaaagcatggtaaaacagttacattaacattctgagtctcagaagcagcaatcgcaaatgtaacaggaggatttcctttgcctgtcctgcaaaatcagcacacattcaaaacaaatatatccgcttagagtaaagaacacaaccttctcctgcaataagcatatattctagcagattcaacttcatcaagggcgcatggcgcatgtgaatagataagccagtaaagaatgtcatacactcaagaagcatatatagagaaagaatatgactagactattcaggcagacacaggtataacacaactacaagcttcaacaggaagcagactgcaccgggtaagttgatgttccgagataaattgtcaactaatcacacagcagtagaacaaatcacactaaaaagacttggaagataaggagacgcgcatacacttggacagataatgcaacaagataagagcggtacatttatagtctgaatgcagtacactaagccttcacacttaaagaaaagtctacctagggaacattttggtgctaataactgcatgggagactccggcctcaactatctattttctctgttttgtgcattaactattgaccgataaggtgtacttagttggcggactttctaattatgtgtaggtaccattttatcttttgctaagtttatcagatcaattattaacaataacacttaaggtactgccatttcgtaaccgtcctccatttaaccaataagaaataatggtacaatggaccacatttttcaaatcgttgaatctaccgcgagatatatgcaaaccaaccgtaatatatagttaatattaaggtaagatgacttgcttgtgatgtaagaggacgccagagaccccatcttcacctctgaaaagaaaaaggaaccaaaaataaataaacatcaacttgaagcaataatcatttatggaaaagacggcacatattttgtcttacatgaatggctcattcacatgaccccctgacatatgtgaagtcccacccattgaattctgcacaacataaaggtgataaacatatcttccctctgctcttctatataatgtacatcaagtaattcagatgtcaactcaccgcccatgtgaaaagaaggctgacttttgccctttcctttccagtgttcaccaactacaacaaaaaacatacgtcacaaggttttcctcagatttttatggaaagtgattgatgctcataccatttctgatatataatataaggatatggagaaattcattatctaatttgctttagccatcagagaactataacaggagtaagtgaatagcgtttctaagatggatggagtctcccaccaaataagccatcacacaaatttgtggtctgagcttcaacaagaagcccatggcaagttcatgtacattggcactttgattacctactaatctaaggcaaaagcatcactacagatccctacatgtggaatatgcatatatccattcttatttcactgctttcaaagaagcaggcaccaactcaatgtgaataggcactagatgaacggattacttacagtatatacaaaaacagctgctggaagactactatctcgataattgtttggtataaaaggtgatatttgccggcaggaaatctttaactctggatcaggctcacctagaaacagaagaatcgttacaagagatacaccgacagaaatatgctagctttaaatgacgaattcctgcagggtcgtaccatcatatatagtccaagcccgaggaaatagagcatgataagttgaatgctggccattcagattccagccccatgaagaaagacctttatcacgcgactttctgagacgatgaaaccaatctaaggtatgtgaattaagaaaaaaattgcatcattgaattagaggatatttataaaacagatttttaccctaaacttccatgctggcctggagacaaaactgatgcatactttttgtgtccaccatctcgtgaaataaaaatctgcaaagaatgggcccaaggaaatgtaataagaaacacaagtgtcagaaagtttagataacataaggaaaaacttggcacatactacaaacaagaaaacatttctggtagaagcaaaattaacaaaagcctaatagcttaatgatgatcagaacatgggtaaccacagaagaaacttacagagaactgattagacatcataggtgatggatcgcaagtcccaggagtgatttgccactgcttaaactcccctctgaagcccctagatatgcttccacttctgcaattacaagcacgattggtcaaacctaaattacgaaactatgccaaataaaaccaaaaatcagaggctatctgctatgtaccccattcctccgagtggaacaccttgggatgcagatggtttgcagttctctttggtgaagggatcgataggtgctttctgtagtaatcataagttaaatctccgcaaacaaagaccaaaactttgtaccataaatatgtaaatcaagaaactctattgatcaagggagttacccttccatgggaggcctcttctctgacataagaccataatcgtatccccaagcgtacctgtaattccgaaaataagaagtaaagagacgccccatacaacaacgaagcgaaggaaataaacacaagatgtctctttgtttaccattttaatggcttccctaaaagtaatagtgaattcttttaagatattggcatggcagtttaatctcctcctccatgcgtgtggtggcggagcagcactatcaaaatcgagctatggaaacaaagacaagtcaaaagtcaaattttccaatcgtcatgattcctaaactactaaaaatagactcaccaattgcaaagtacttctgctgatgaattcctcagtcggccatgaatgctttctacggtgaaacaaagttgctccaaccatatttactatacttctcgattctacactgatttgatcaaagaaaattgaaagcaataaggaattaaggatcaacacgaaattgcatatacttcttaactttaaaaaggttgaatttttttaccttttatttacataaaagaacaaaaggtatttctcagggaagcatttgcagcgaattgaaacggcaccgtctcagtcgcaacaatccccgattcaaaacctaaaggaagtgacaatgaaaacggttcacattcagacgaatcggtagaagcgaaattttgaatacaaaggcaaatcaaaacataccaaaaagttttgtattcgatctgtcacgttgaatagtcaataggacaaaaatatgaaatccgatgagattttctcagaagaagaaggaggaggaggagaagaattggattcgaatcttcgaaaatcggtttgatggtattggtgagatttagaggaatctatgtggatgctgacgtggcgtcgtcgtggcgagcggagaatcgaccgtcagagacaaggttctcatacggtggcaagtggtttttaaactcttttgatttgcgtgcgtctccacagtgacgaagacgaagaccaaagagaaatagaaagagagactaattttgcattgcgtttttttacgttttagtccttttagttttgtcaaaagtgttgttttgacactttttttttaatctaatcaggaacatgtttaaagaccacttaacattattaattggggaatctttcaccgaccacatctggataatagggttggatttggaaatctcttgtctggtttttaaatttaattatcgtatattgtagtaatttataaacatattaacaactaatataaggtaactaattaaaagagattatccagattagttgtacacttgtctttttcgagaacgtatttgtacggttttacaaattttcttctaaaaaatgtgtcactgtcttaagccaattatttgctgaattagattaaaaaaacaaaactttctatgataacgtattttaagaataatttatatataaagacattatattatactcaaatgccaatttgtagtaataaaaaaaggtattatcgtttttaaaataattttaaatgtcaaacatacaagctcatgtctaaactattaaattttacaattgttaggtaaattaatataggaaacctaattaaagagttggagatcagttgttttttttcttgaacaaatattttgattggacaaatgtctttttcctactatggctatggacctatggtttacaatgtttctttttaattgcgacatttgatgctgttggtaagattaagacaattagttattgaaatacataagaaaacatttttaaccaaaataaaaaatacataagaaaacactataacagcgacatcgacgtcattaaatattgttttataagaaaaatatatcatactcaaatggcaaattatgtaacagtataaaatagaagaaattttaaataactaaatgtcaaacattttaatatataattgtgtaaataggtttatatcttaatatagttaccttttgataatccgaatagtaactatgttttgcgatataaagaaaatgcgatgcaattcaaatagtaacgaaaatacataaatatatatatatatatagagagattttaatattgttataatattattgcgatgtggttttggatgtggtctacatcatcattcgtgttctatacatgagttgtgattttctccaatgttaataagtgaatatcgaaatcaacggaggaatagaaaatataataaaagccgaaaaaccaaggtggcgccgacgtagcacaaagaaaaagtacaaaaaagtcaaaactcgttgccgacgtaatgactatcggtgtaaatccgaggtcgcgacttcgaatcgttctaaaacccattttacatgctcccattttttttttcgaacaaatgatgtcacaatctcagagtcaataaataaaatggaaacaaataatcatcatatgaacttggtcttgccacgtggaccctccattgccgttaccttccggtgaaataccaaacactccgcttccacttagagccgtagaagagctactacttcatcaaccacaaccactatctcctcaaaatctctctctaccgatcgatggaagcagcagtgccacgtctcgtcaattgcggaccggagccaattcgattctccgtctcctcccgccgctccttcgtctccgggattcctcaccgtaataaacgctctcgccagattctagccgtcgctactgatcctaaacctacacagactagtccacccaagtccaccaccgtaaacggatcttcttctccatcgtctgcgtcaaaagtagtcaacaacaatgtttccactgtacgatttctactcctacctctgccgattatgttatggttcaattgagcaatttcatagaaaatttctattggattgtgtaaaattataacctcgaattttggtttatggcaatggtacagagaattaacgatgtatcaaaagagattaaaagagtacgagctcaaatggaagaagatgaacagttatctgtgttgatgagagggcttcgtggccagaatttgaaggattcggtttttgctgatgataatattcagctaaggcttgttgaggtaaacactctttggcaattcagctgagattttagtattgtatttagcattgtaatgttttaattttgtctttgttgggatttgtagactggtgaaagcagtgagttcttacctttggtatatgatccggagaccatttctgcctattgggggaaacggcctcgtgctgttgcttctcgagttatccagttgctttcggttgctggagggtttctatcgcgtattgcaggggatgtaataaacaagaaagttaaagaggtaatattttgtttactgctcttctagctaagagtagaaaagatagttgtgacttgaagattggtgatatatgtaaactcctttagctaggattgagtggataaacagtagacaattttcatttcctatctttcagtttcttccttgttccaagcatggagcccatgatgtgaatttttttgcagagcctatgatcaacataactttgtttaatccccagtgcatttgagcaatagatgttggtttaaatctttgaaaacgatgtagtacacagttgtagtattttattcaatttaggtgtgtatatctttgttcacgtttcaattctcttttgcttgcaattattttatatgcagtttgagtctcattttccgtctgtcatcattttcagaatgaggttgctagggcaattgaattgagggaaattgtaacttccttgggtccagcatacattaaacttgggcaagctttgagtattcgaccagatatattgtcacccgctgcaatgacagagctacaaaagttgtgtgataaggtatgatgctgcaattatatctttcccttcattcattcccaaataattttgattgctaaacttgtctgtttttttgtttatgtgaaggtcccttcatatcctgatgatgtagcaatggctctaattgaggaggagcttgggaagccatggtacgacgtttattccgagctctctccttccccaatcgctgctggtaaatctcagaccatcaatgaacatgcacaccttatcatttcaatagagttttatgtcaaatgattcattgttattctggtttttcagcatccctgggacaagtttataagggaagactaaaggaaaatggggatctagtggcagtaaaagtacagaggcctttcgttctcgagactgtgactgttgacttgtttgtgatacggaatttaggtctatttctgcggaagttccctcaggcaaggttttgtctgacggctcagcttatgcagttctgtaattgttctctttcacctcaatgactttcgatcttcttgttttcatggtaatttgtgcaggtgtcagtagatgttgttggactggttgatgaatgggctgctcgcttttttgaggagctggattatgttaacgagggagaaaatggaacatattttgcagaaatgatgaagaaagatcttccacaagtaggcttcataacttttctaatggaccctttagttcgttgtctatatatgaggcgtctgatcataaaattgtatttgacaagtacctatgtggatttatatccgtggaatggttcgtaatcatgcaattattgtttcaggttgttgtacctaaaacctaccaaaagtacacgtcaaggaaggttcttacaacctcatggattgatggtgagaaactgtcacaaagtattgagagtgatgtcggcgaacttgtgaatgttggtgttatttgttacctaaagcaggtaactcttcctacatgcttgttacggagcataattaatgtggtcctagcttacttgcgttcattaaatcgtccgctttgttcagctttttctgcaatcatgctaaatgacatagatctaggcatgctatgctaagtttttctgagatagttaattctttaccaattgaagtgatggtacatataattctttggttgttcctattatcctatatagcatggctagtcaatgttcctaaccaaatattctcagtcatatagtgagtataatgtgattttgaggcaggggacctgtaccattgtagtttgcctcaggtttactcacttccttgattgatttaatgtgttgaccagcagtagtctgtattgactttctctgtcctcttttctagttattctgctcgcacactttctcttgttttagaaacaagatgatgtgcagacattaacactgttactgttttgtgcttcagttgctcgatactgggtttttccatgctgaccctcatcctggaaatatgatccgtaccccagacgggaaactagccatcctcgattttggtaatgattgtagttccagttattagtgaaaaattagattcgggtagcacagttgcattcgatgtgatatgagaaaaaactttgttgacatcttatccatgtctgttcgatgacaggtcttgttaccaagttgactgatgatcagaagtacggaatgattgaagccattgcacacttaattcaccgagattatgatgccatagtaaaagattttgttaaactcggtttcatccctgatggggtcaatctggctcctatattacctgtcctggccaaggtttttgatcaggcgctcgaaggtggtggagcaaaaaacatcaattttcaagagttggcagcagatttggcacagataacttttgactatcctttcagaattcccccttatttcgccctaattattagggcaattggtgtgctagaaggtatagctctagtggggaatcctgaatttgctattgtggatgaggcttatccttatatcgctcaggtattctatatgaactctgttagtgttatccagtaattagagttgagatttttccttctgtttagtccactcattcattgttttatcttacaaaatactaacgtcttcatatgattacctcaaaatttagcggctccttacggatgaatcacctcgcttgagagaggctttacgctacacaatatatgggaagactggcgtttttgatgctgaaagattcatcgatgtgatgcaagcctttgagactttcattacagcagccaaaagtggaggaggggaagatatgaatggaggcatggcagagatggctcttatgcaaagtaagacaagcagtttggttcctatgtttccagctagtgcatcccaaccggaccagccagttcaaacaagagtcgctttgtcttttctgctttcggagaaagggaacttcttccgcgagtttctattggatgaggtactaatcaaaatctaaccactttttcaatcttgtcacataaatactctgaactattgcacaatgaattataaatctgtacaataaatattgctcataatcaccacataatgattcaaaaacatgcttattcatgacaccttttgagttctgaaattttcgtgattacaaaacacagatagtaaaaggtatcgatgcaatcacaagagaacagctggtgcaagcaatggcggtattcggattcagaaacgcgacaccaatcttcggtatgttaccaccaacactgggacccttcaagcctgcagcacttcttccatccgtgacggaagaagacaaggtcatcttgaacaatgttcagaaagtaatcgagttccttaccgcaagaagctccatgtcgaataatcctgatcaggttagattcaaaaacctctcataatttgaaaaaaaatcagtctgtgtgagtaccaagtttttaacctatgtgtggtcatcatcataaaacaggtagtagatgtatctcaagttgttcgggaactgcttccagtgttgcctggaatctctgccacagtactgcctgagattttgagtcggcttgggtcaagggtcatggcgagaatagtccgggatgcgtttttgtgaatattggattaaactttgtacaattgtgcatataagttgcattttaaagttactacaaagaaatatatagctgattaagttgcattattaacacatatacacttgatgttatatacacagttgcaatggaacaatgactttgccttccttatgtggcagtgttggacatcaaaatttaaatcacagtattcacattttacattgttttgatatcagattatgtaacattttagtattttattgactgaaacataaaaaactaaatacaacagacttatttaaaacatgggctctgggagctgttttcagtcaccattaaatttctatataaggcaaaagaagagatgatgcagagtattttgagaacaaagcgaacaatccctcgcattcttcaagaaaatagcggcaaagattgctctcctgaagcataagatatgatacgctttttaagcggcgaaatgtagtgagccccgtggaatgcagctgctcttagagcattcagcggtccgaaatccaacgagtacatcttctggattccgtctaaaaccgccatcattgctatatttgcaggttttctctctgcttcataacgtttgagcagattcgcctacaatttaaaatttcaagcaatcaatattcaatacagaggaaaggagaaaataaacatgaggtataagacttagaatccgagcacatacctcgcctatatcagtaccaagagcaatgccctctgctatagctttggagagagcacacgcatctgcaaatcctagatttactccttgaccagccaacgggtgaactgtatgagctgagtcaccaacaagagccacacgttttgacacatagtcttttgcgtgccttaaagacaaagggaacatcattctctctgaagaaagcttcacaaccttgggaggagtttcaaacctctctttggcagatatggtcgcatctcctgtaagccaagagagactatcccgtgaacttgtagtctctggattaggaccatatccagaatccagagcatcatttacagctttgatgaagtcatcctcgttcatcaattttcgatctgatgcctcttttgggtccatggtccatactatgttgctaaacttgtcaccaatgggaagaagtgcgattgggccattgggtaaaaaccgttgccatgctgtgtagttttcggctgtatgctcaacagtacaaattatagcgttctgtgagtagttccatccagtcgttttgatcccagccaactcccttactcgcgacttagacccatcagcgcctacctgcacaaagattgttagacatcctaaaattgatgagattcaggagtcgttccactcaaatctagcaaatggagaacgaaaacttaccaccagttttgcgtagacgcgatttccatcgcttagctccagcttagcaaggcgtcctcgcatgaacaagtctgttgtggatggtacttcaccaagacctgtcaacgaagagctaggtagcatatccatcgcatttaacctcgcgggataaacagtcttctggagatctgattcctgcaaatatcacgccctcccatttaaaaaacagaaaacatgccaaactgatgaagtcagattatctgattatactgtagaactaataagcgattagaacgaattcttcaaaatcatagcagtctttctaaatttgagcacagagtgttcagatgaagatcagtctaagcaatatggataagctttctggatggttgatttttaagctatgcttcatttgttggaaaatcaaattaaaaggtagctgaaggttttgagcgagcaaatactctagtggacatgcgaaaggacagtcaagaggtaagttacaagcattggcccaaataacatatctttccaagaaaaacccgatagattgcatcaggatgatgagtaaaacttggacggacccaagaaagtaaaatacctgtacacaagatagctgagaactctgaagaactttattctccactacacacctggatcatgtcaacaatgagtacacagctattaacatcatcaaggatgcagatgtatatagcaatatgcttaccccaaaacatcttgatgtacatcattagcattgtatcttgtatatccaaggcctgtatagtcccatacctaaaatacgaaacatgacaaatgactttgtttttctgtctagcatatcattgtcagtatatgtagatccttcatagagtagatcacacctagataaatctgactgtagttttccttttaaggtttagaatttaaacaaaggaagggataatttataccaagttaccaacatgtaaagaggcaacttaaaacatgttccaccacaattataaccacaaacatttgacagaaaaccaattccttaaaagaatttttctttgaagaaattaaaaaatttcagacgccatcatagaaatgctttggaaggaatgtatagtgttaacaataattacctgcatcttatcaaaatacgcatgtcgctgttgctcaatgtatttccaggcaccaatatctgcataattcaaaccaaatacatgattccaaagtaataactaaaaaggatatccatggactgaatgaggacaaagcctgagctcaaataagggttccaagtggcaaaaccagcatattaaattaagcttacgcaattgagagttcacaccattttgaaagaataatgagcagaaactgtgggaagaaacgagaaagtccactacgtacctttgaggaaggatattgttgcaggtgtgactgtactgactctgggatcaggttgatgccctttctctatgatatttcttctccccaaaagaggattattgtcaataatagcgacattcaagtgctttgtcaatggcttgctggctgaaagaataacaaccatgttcgtcaattgaacaaatatttatacagttagctgaacataaatcactagcaacgactgcttacccaatgaagcagctaaagcgattccaaccattccaccaccaacaatagcaatgtcatgttgtggaccatcgtcagtggaattatttaatgcattgctctcctaaatcgattaataaatgtaaaactatcacttctagaacatgacattgctttaatattaagcaaaggatatcacactaaatactattgatgtcccaaacatgaaaaactactctacatcatcacaatgaccaaagaagactttagaacagctgcacagaatttttttgatatattgctacaacaacaacatgcaaaagatcacaagtatctttcctgattcttccaagacaagatatgcgaactcacaaggagagggatcttacattggaacaagaagtagaaacatcatgtgtcacaacagtcgaacaagtcctctgcaaaatccttgttccacagacacttgtcctaagattccttgcgagcaccctgtccttagacatagcatcattatataataatcttctctaatatccaagtaagctggatagtaataaatagatacaaattcaacattccaagatggactctaatctaaattgcacaaaacaaacaagggatccaatttcctataaagttaagagattgcagaacttgacagacacaacaaacatgagatcaccgacaaaagattgaaactttaacaacagtagtttctcaaaactaggaacaacagaactaataagcaacccaccatcaattgattagctaaagataaagaaaacaactcaaatttaaaaaaaactgattacaaagacagtgattcaaattagaaaaacgcataaaaaccaaccgaagatagaattaagggaaaatggaggattaagaaaggtgagtattgaacctgttcatcgttgaggcagaaattgtgtttctctctgccgccgacgttagatacctttaatggaaccaaaagaaaaaaggacgacgaggacgaaactaaagcctctaactgacagagaaggtctttcttcaggcggagtatttgcaacgaaagtggtctcaaacaaacgacgccgtttcgtttcaaccgaggcaaggatcaaaccgtaattcgggtctgcttataaaataacccggttttaattggttcccgccccttcaaattcatgtttagcttacgttcgttacacgggagcgtcactcagagtctgaacccatctacatcttcatcaggaaatgacgatgaacccatctaataagaggagtcaaaacaaaagtaacaatcaaatcgagaaatcgagaaatcgagcaatggagaagatttaaaaacgaaattgaaaatcaacaagaaccttgatcctatttagcaataaggttgtaaaacataatacaaagattatggcaaagatatgataatacccagacaaagaggcatctatatgttttaaacgaaatactacattcaacaaaagtttcccaatctagaagtagagagtagacaatagatattggagactatctaattagagctgtcaattgggcgggacgcccatgggcttgtccagtccaaatgcatatgggcggactatattctagacaaaaaacaaatggtctaattgggcatatgaccagttttgtccacggacaatatgggcttgaccgtatggacaatgggctgcccatgggcataaattgagtcaatatacatgtcttcattttaatcatatttttataattttaattacaattacaactaaataattttcaaattatatattttacattataagtttctattttaatgaaatttttaaattttaataaattatttcttattaaattatttacggttttgaaggaaaaatactattccacaattttttggaatacgcaaaattttgattttacggttttgacgggaaaaatacaattctccgattttacggttttggcggaaaaacgcaattccataatttttccgccaaaatcgtgattatattatattggtaaaaaaaaaacacaattttaccgttttgtcggaaaaatgcaagtctccgatttttataatttttaccgaaaaatgcaatttctcaattgttctttaaaatcatgatttttgatttatcaataataacaataataaaatgggctgaccacgggttgcccatatggacatggtctttattgggcatggacattttcggaccattgttcattatgaaccgtccaacttggcccataaaaaaaaattgtttgtacggatacacccaatagtctctggacggaccatttgacagctctatatctaatcgattaaaccaaacaaccatcaaatcgacaagtagagagtagagattagagaaaagacttacggcgggtcgatttcgcgatgaggatgaagctctggtgaattccagatttttgttggaaattgatcctatacttaatcgtatttaagatgagatcaagtgaagagtggagaagatgagaagagactgcaacaacaaagagaaaaggatcgtaagagaaagaagaaagaagaaaaaggccaatgggccatggtgttgaattgaaggcccaagtgttaatgggttattttgtgttggtgaaattagattattatgaagtagttaggttaataaaatgccttcctcctcaagacaatccgtatatagtcctcaacatctaaaatagtcaaaattcaagaacaaacgttacctcatctacaaacttatttggaattacactagaatgtgatttaatcggctccagttttttccaagatatcgactcaggtgttgcatattccaagcatattgaataagaagaataaaaaaaagatacaaaagacgcagaacaaatgtttttacatcacaatggaaaggaaaacaattcattgcaaatgtctgagctatgttacaaaataatcaaataaagttgtatcagaatttttatgcctttctcaccctttcttcaatgtcttttcacaaatctcatgaagaaaacctgtgtaggttagtattatgttctcaagagttgaagtggttagctaacttgttctgtttttttaccacccttttttggtttccttttctttgattcaagactgacccaagtataacctgtgggtatagcaaatgggtcttgtaatgtttttgacttactactcccaccatctttgtttgatctagaccgacgaaaccacgaggaggacgatgatgagttggtgaagtcagttgttgcagcagctggactctcatagccagaagaagtcgggctcgagagaggcgtcttaaactcatctacaggctcaatttcttcaaactttgtgaatgtaacaagcacttttattgtaggtaccactggaatagcaacctacattcacaaacaatctctataagaaaaagaaaaaaaaactcatcttcaagaacattaagattagctcttaacatgaaacgacaacataccttgaccggaaatgttccagagggaagttttgtggtaagaagttctctaagacgacgaatcgccttaactttgtttgcaagtatgtcaagtaaaggaagcaactcctctgtttgtaatgggaagtttggagatagccaaagaacaggacgtagccctttcttatattcgctttcgtggcgagtcttgtcagagaccaatgcttttggtttcctataatgctcattatctactgagtgtcttcctggttttatctgattagactctcccaatagattacttactttctcattcacacaaagagagcttctcggtggcgcgtattgaatctgcttctcttgtttagtctctttctttctccaacctcctaaccaccctttcttctctgctttcttgttggcctcaacatgatcttcctgatgatgaacaatgaaaccattctcaccattgacatttgggaagtctggtaaatccagcttaagagcatcctctagttgcttttgctcttcatctgttaaaacatcgcagatatcatcatcgcctccttctacagccaatgaaccaggaacctttcttgacttaacactaacaacaacattgttcatctcatagaccttagctttccaaggaccaaccatctcactcttctcctgcctcctccaattagtctgcggagataaaaccgcttgtgtcacatcaatcccgggtctaaagatattgctcttacacattgcagccacttctttcctaacttcttcttctgatggaactccacaagcaccatccaacgcattcatcacttctttatccttatgattcaccatgtaaagcgatccacgagcaacttcaccatcctctgacccatcaccaagaaacaatatactttgatcagaccgttgaatcttaaacccatcaaaaccagccatagtcatatccgctctcaaattcgatcccactttccaaaccttataagtatcagacggtgcaaccttagatacaaaaggaacaacagagctctcaaaatgaaaactcatctccaagtaaaaatctttcatcttactcattgtagctatcaaacgaggtagtctcctacaccatttagcccaagctaaaggctgatagtgccgaactataatcatcgctatcgcctcttgtctactgcaaacagcttcctgcaacgcgttccaaccgtcttcgttttgcaaagtccagtcagctccagcaaccattagcatttctactgatgttgaatcacagagcttcaccgctagatgtagcggcgtgtcgcggcttgggacgtctcttctatcaatcacagctgaaatggtatcggattttgcttcctcggataatgaagctgcttctgtttgaatctcacatggatctttaggctttggaagagaagacagtattgctctgagaccaacatagtctttagaagcaacagctttgtgcacagagctgtgtatgtacttagacacatcaacgttctccatttgagatcccaaatcagaatcttcagatcaaaaatcctacgaaaccagtaaatggatcaaaatcttaacctaatttttaattcagtaacaagtcaaaccactggagaaacagagttaaaccaagaaaaaatcaatggaaatgaagagaatcagaattcgaaaagtgggtctaaatcaagaaatcgaaagatctaagaaagttctaacctttttgtcttttcaacttctaactttctctgcaagaaagataatgaatgacttcttacacaatcttctcaagtttttgctttgcagcattcactttgtgtttttttttttatcgcagtatcttctttagtcttcttcttcttcttctcttgtgtattatttcgtcataggagagaagttgaaagagagattcttgtgatctaattccagatcagacgcatgtgggagcgtgcaacaaaaaaacatacagagggatttaagggtagaagaagaaaaaaatcaatcccgagatttgtgagaccagaaaatgaataaagaaaggagcaataagaagaaataggaaaattgagaaattaggaaagaggaatcagtcgtgtaggtgcaatgtgtagtgggagggaagcaagcaaaaccaaaaagacacattgacattgaaaatttatgtcaatttatgacaatatctatgtactaacaaaaacagttttcaaataaaaaatgataaataggatgaaacaaaaaagtactatactaatcattataattttaaatgtagtttaatctgttttttcagttttttaaaagctagcttgtatatattgatagaattaatttaatggtattattatggaagaaaatattcattaatttgttatttttgtgaaattagttaaagtagatatttttttacacaaatttatcaatataaaaataggtaaaaataataggttaaagtagaagtatttatgaatccaataccagatcatatactcataactcaatagatttagagaattttttagaatatccctattataatatatattttcaaaaacatccaatatgttgcctattttcaattacatatctattttcaaaaatgttatttagtttgatgtctctagcggcttacgtggttgggctccaaaataatatttataaaaccttctgaacttttatacaaacttctaaaaccttaataacatctttataaaaaccctataaaaaagtagaactgaaaatagacaacaaaaggggaactataaaagaggttttttaaaaattctcctatattgtataggtttctaaatttcacttttacttcaaattattaaagtgaaatacattatgagagaatttaactggaaaaatatgcaaacagatcttctactaatactagccttaatagtttgatgtcaaggctatttaaaaactgatatgaatgatattttttcttgacgttaactcacctttatactaataataatccaaatatttgctactatttgttaatagattagttgtttcagcaattagctatggtacatacattacttacaaagaaaatgaaaattcaataaaaacctaaatttctattacgaatacaaaaatatcacatagtttactacacacaacatcaagaagaagaaaaaaacatcaagttgctagaaatgttttagtgcttttaattaattctaccggttcagaagcaaaatccggctatttctcttgcctcgatcacatattaatcaagtccattaaatccgtcacaaagtgaacacattatccattatgatgtattgatgtttatactacgaagttctgcatgagagtggatcataactctataattgtgccattggactaactatgacgcatactcttttacgtgttatctacttgaatgatttaagtagttcgtaaacgatttaaatgactaatcggtttataattgaattggtggatgtatttgaatcaatatttataaaattttaaaatattattaatatgctgttttagtaagggttaaaacttcagttttttaacaattgtctcatagattcgtggtatagcgttacttaataacaattaataacaattataaactgtaaaatataaatattttataaaaataaaatttacaaattttaatatatattacttttaaaaaataaattgtcctgtaatataccgtggattaaaatctagtctttaagtaactctgcctaacttataagcaaagaagagacatttctactggcttgaatccatcacaaaatgaccacaatatttattatgaagttcaaaacattgtattgggattatccacgtcgattacataaatttttgtcctttttctattggattagataatttgacaaagaaaactcgtgtatattctttataataccaaagtatacaaccaaagtatctttataagcatggatggagctaagaagaagctgttgacacaacaagtgtgaccgaccattaatctcacgaacgcattgtttccctaagagactacaaaattgacacgtgaaatcggtggtgtttaaatagttctgttttaaattttcagcaagtctcataagcacaagtgttggtcgttggttaagcggtcgaagagatagtaaactctattatcataccacacgtctcatagtaccacgtgaagtgcatgtcagtcaaagtcgcgtgatgtacaaggttataaaatccgaagatagatgatatcatcatatctaagtcgagtattaatttgtcgccatctttgtctccactctcaagatgttatgtaaactctatgatgcagttacttttctttggtttcattaactatgtggtcgtagaatgtgaatcttttgcaaacgggcttttaggttgcatcatatgaagtttgatgactcttctatattttgaacctggactccacaaagacaaagataaggcggtttagtagcaaacttggtgttggtattgataactcacttactttcgatttgagttctctttctccaatacccgaaaaaaaatgttatagtggatctacaactatagaatttatcttacttctttttcatctgaatttttttgtatatttataaaattacaaattaaaaaatatacatacagataacgaacaatccgaaaaataaaactaggaaaacgtgatttttccggaattttagctctaaaaaagaaaactaaacatacaaccaaaaccaataaatagactaaaaaccgtattggattgaaagccaaagtctgagacataaaactaagaaaaattctgataccaaacattagtgacgcctgcaaaattccaaacttctaaaaatctaaagaaaacaacaaatcgaaaaaatctaaagaaagccaacacaacataacaaatttctcctatgatgaatagagagtacctcacaaatcaagtgttagcattgtattttatagtgagtaagaattctagctaaacccaaataaaataaaattgaacatcattactaggtctttgggaatactcgctcattcttcattcattttcttcctttgaagcatccttgtcgtttcatagaatgttttatctttctccttcttagctctcataatccatattagactgtggattaattctctagtactctaatctaaattttatctactatgtttatgtttccgactttttttttcactatgtttccgacttagatgttagaaaatcaccctttcatgtcatatcaatattttcttgtgtctatcattgtacactttaaggctcactttcgagagatcgatccgacttttcaaatcagttcttcatcaatagacgtatgtctcttacatataatcaatcagatgacccaaaaaaaactatttgaaatagtgaataaaagttaaaaattatttcaaatacttcatacaaatataataaaaataaaaataaaatctaattaaatctataaaattgtagttttaagataccattgtattaaatggacatatctccttattccgagagccagattgaagacaaatttgtaaatgaaaatggtcgatcaaagataaaattttagaatggccactagcattaaagtaaattagtggtttgatatataaactttgtttagcacactaccaccatcgacttcgaatctccgcaatattgccaccaccaccttccaatctccgcattgttgcatttttcattatttaatgctgtaaaacaaaactaaactgtgaatcaaaataaagcataccaaaattttctgacttggcggcgtctaataaccaatccaatccgattcaagaaacttggactctaagcgaccctaacaaacggtccactaccatctccccagtgtattccactagcaacttcacattattcatgacacatttaatcacaataattgattagtaacttttggggactaaatttagatgtattatccttactagtactaaacgtgaaagttttatcacacaccgcatgaattttacattatagttaaaacacacacacctgccacaaggtcataccaattatattacgaatataaaaaagtctttccactgttccacataatcttccttctttatcttccacaatatctcattcaccagcggttaccaaaagaaaaaaaaaaaactattctcattcactatgcacattattgtggcaaaacaaaatctaattcaccaacggttacacaactctatgccaaactttgtttttcgaaattctgtattctgaaaacattcgactaattttgtacaaaaacacatgtgtacacgggcaaaaaaagcacatatctattattttaaaaaagattaacagattatcgttcttccattactttgtaatgaatgactaattttttttactaaacttttatattaaacctgtgtctaattttatgactaatgaatttcttttgactaatatttaattattgaacacatgtgttatactcattggcaataaaaacacacatagatgtctttagttaataaaataaattataaaaatgttattcaaaagaatattattggtcttccaatatacactttctttggatttactatgaaacagacaatcttcataaaatttaaagaaatctattaaaaacaaaacttcaaattacagcagaccctataataattgtaaggattcacttctatatatgtgcctgattaataaaaggtaaaaaatcttatagttttctaaatttataattactacttttgggagatttgatacctatttagaattcactctcaaacaaaaaattcccaccgttgaaacaaaaagtaaatgtgtgtgaaccaatcaaaatcgttgaattaaggaaaaatctccacattatagcataccttataatctggatattttctgctatatatgtctctaataaagtaaaattgtaaaaagaacaaaatattacagttgttattcctatacgtatacgtaataactatttttggaagataagattcgacacctatttaggttcacttttaaaccaaaaaaaatctctacccttgaaacaaagaataaatataagtaaaacaatcagaatcgttggattaaaataaatctacaaaatactccacattatagtagagaacatataatctagatttgctattaaatatggtatcttgacaaatgtcaagaccccgttacattttctatcatctttatataaaccgctagcttttaccctcttgttttgggcaaacaccaaaaacgtttttacttataaaacgttagaaaacttctctagtcatgttttatgcataggtcgctcacaagtcaccaccatgcaacactctcttcgttctgatcttcttccgacgaagacttctcctcgttctcatttacttccacaacccaaaaatgcaaatatttctcgacgaattctcattaaccctttcaagataccgacacttcctgatctcacttctccggttccgtcaccggttaagctcaaaccaacgtatccaaacttaaaccttcttcagaagctagcggctacgatgctcgacaagattgagtcctctatcgttattcctatggagcagaatcgcccgcttcctaaaccgaccgacccggcggttcaattatcaggtaacttcgctccggttaatgaatgtccggttcagaacggtttagaagtggttggtcagattccttcttgtctaaaaggagtttacatccgtaacggtgcaaaccctatgtttccgccgttagccggacatcatttatttgacggtgacggaatgattcacgccgttagtatcggttttgataaccaggttagttacagctgccggtacactaaaacaaaccggcttgttcaagaaaccgcgcttggacgatcggttttccctaaaccaatcggcgagcttcacggccattccggtctagctcgactcgctctcttcacggctcgagctgggatcggtctagtggacgggacacgtggcatgggcgtagctaacgccggtgtggttttctttaacggcaggttattagccatgtcagaagatgatcttccttaccaagtgaagatcgacggtcaaggagatcttgagacgatcggacggttcggattcgatgaccagattgactcttcagtgatagcgcatcctaaggtggacgcgaccacaggagatctccatacactgagctacaacgttttgaagaaacctcatctcaggtatcttaaattcaacacgtgcgggaaaaagacacgtgacgtggagatcacgctccctgaaccaacgatgattcatgatttcgcgataaccgagaattttgtcgttataccggatcagcaaatggtattcaaattatccgaaatgattcggggcgggtcacccgttatctacgttaaagaaaaaatggcgagatttggagttttgtcaaagcaggatctgaccgggtcggatataaattgggttgatgtaccggattgtttctgtttccatctatggaatgcgtgggaagagagaaccgaagagggagacccagttatcgtcgtaatcgggtcatgtatgagcccacccgacacgatctttagtgaatcaggagaaccaacccgggttgaattaagtgagatccggttaaacatgcgtacaaaagaatcgaaccgtaaggttatcgtaaccggagtgaatttagaagcgggtcacataaaccgtagttacgtgggccggaaaagccagttcgtttacatagcaatagccgatccttggcccaaatgcagtggcattgcgaaggtagatatacaaaacggcaccgtttcagagtttaattacggaccgagccggttcggtggagaaccgtgctttgtaccggagggagaaggagaagaagacaaaggttatgtaatggggtttgtgagagacgaagagaaagacgagtcggagtttgtggtggtcgacgcgacggatatgaagcaagtcgcggcggtgcgcttgccggagagggtaccttatggtttccatggaacgttcgtgagcgagaatcagttgaaggaacaagttttctgacttagtagtgtgtatattcataattatatgctatctcctctttttaggtttacgtttaaattggttaatgtgttgatatttttgggtataagaaaggagttattacatcttccatatcataattaatatttgtggtatgattctctagttatatataagatgtgtataaaagaaatctcttaccgtattaggtttatcttaacgtgaaaaagtatgcttgtagtataggtatactatcacactctcatatgcatttcaaaaagagctttttatatattacatccaaatggatttatactttgattttaattacatttgacacgccaaggactctgtaaaaagtttgagattattggttaattgtcaattagaagcgatccaataaatcaatgtcccaccacgtgatccaaaagcaacgcattgatgtttcatattccactagtttagttgtaaatttgtaactattagcattaaggtttaagtggtccattttcatctaaagtctaactattatgtagaatgagcatataaactatatataatgttcagccaataaaacttgtcacgagactgatgaatgataaccgtcgcgtagttagtgactataaaatccataaaccatgtgccattacttttgtttgtaatggaagtttagtacaggacagtaacagaagtaacaacagtgtttgttcagtcatccgcataattttcaataatcatatttttatatattttggatcattggaatctaactaagaaaatcattgtaaaacaaataatttttgtttggaggagctatgcaacatgtctataggtttcaatagaactgatcgatataattaactaaatcaatttcatctttctattattaagagaagacataaatgttttttgataaaggacaagacgaatgttaatagagaatattgtcaataataaatgatatttattagtaatattttcttatttagttaaatactatgtaccttgaaaaaaaaaaagttaaatactatgtgttgaccaaaattgaaattgtttgagacaaatgtgccacaagaaaccataacatgatatatagaggttgcagatcgtcaacgtttgtcactctcacaactcactcaaataagagagagattgaagatacattgtgttgacagaattataagactgacaacaagacgtaacatagcaactagagacatgtgagacaagtagaaaatgacacaatcctcataaaacaatgaagctgccaaagattatgttatatcatgaaagctagaagatcatcaaattcaaggttaaagtattcttgagctctataactcagtaataaagggagagattgaagttatattggtgttcttactcgttattagactcaagagagatgatcaagaagcattgaacaagtctgatataacctcatgtatagccatagatgcaatgaacaagtttgatacaaccgcatgtacaaacaaagatgaagtgatttatcaattagagaatcttgtcagccaagacaaacatacgtgaagtcaagtggaatgtagtggcgtgctgaaccttggagtcttattgatccaagaagtaagaactcaaccaaatcaagcttctaactcaaaagaacaagtctaaagaaagcaaagtatcagctgagtaaacctaatgtaacagagcagaaaaaacaaaaagacgatatgtaacggaatagaggtggtaaaggctaaggttgcatcaatcagtggagcggttgtgtcagtacagagatataggtgcgtcagagttaaagcatggttcaagttgacatgcatgcatcgtggtgcagtgtagatgtgcaatagaacagagtcttgggtcaagttgacaatatagcataagcaattacccaaaagataggtttgaaatccaagaagtataaaaggacgaggtggtcacaagaaaaatgttacaaaccttagatctaaaactgagagaagcatacatgatgtgtgtggtgttgtcatagatttgttagtgattttgtgtaggaaaccacactggtcgaaaatacaatgagtggtagtttctttgattaattaatctagataagagtggtatgcacatgtgtgtgctagataccattgacaaatgtgacttttgcatttttattctactgaatgattctgaatttggttccgtatatatatgttattcgaactacatgcattaacaaatcttgtgatatctcttctctatgctctcatcttcgttacatatatctatcttacaagctttgtagatctaacacgcgtcgcattacaacaatatatattcttaagaatatcaaattaaaaatatggtttctcacaaaacaattcttagtaaaaatatattatacattgcgtacacttcttaaaatattaaaatccatttgtcatttctatctttctaagtttttattctaattccgacatgtttagatttataagtatttggtagaagtcgtccaccaatttttaattcggataagttgcaaactgattttggatttagcttaatcgatgaacaattaggataatgagagatgttgttatattaaagatatttttccatttttgaacattgctattgattgtttacccaccaaaactttttttgtgttttgtaaatttcgaaatatctactaaacagcaaaaaaaaaaaaaaaaaagaacgtagagaaaaagcttattctctatataatatgatacacaagcataacagcatccccaagaaaagatccaataatttatcaacaaatgttctaacttgtaacaaaagatttgatagcccccgaccaacatggattcctcgactcgaaacttgaactgtaccaacaaaaaatatagataactataatgtcttgacccaagatcgatactcacgagacaacgttgcaaataaataatggaccgatcgatatgacttctaacgaaacaaaacatttattggttgggttttttgatcaactagtctactaatccactatctatcttcttccggaaaaaaacaagttagacttatatataccgtcgaagacgagtattttttgttttaacggtggggctaaattactacaacgtgaagttagacgtttactctactcggttaaacttcctgggattatcgatcttcggacccttgcaagatttttaggatttcttttaatgaagtatgtttacttgtaacttgtaagagttaattagttgacacttgacagataataacttgtgtgaatgaactcacctcttatatgtagtctaatgggccttttatccgcctacactcttgggccgtaacccctataagtttttgggtttgctcatgggttacccagttattttagttggctcacacaacacatatttttctaacctcaaatttgttttaccgcttcgattttcatcagattcaaacaacctcctcaaacaatcaagtgtgggattctaataagatatagcaaattaggtagtgtttcagggattggattacccattgtaatatcagaacttagtactaagaaaaacaacctaaaaccttctacaattgcacatgctacgaaatgtactaatcaatatattataacacatgcaaaatgcaacacaccatttattgtttgcccaaaatctaacagtagttaatggtttactcatgactaactgtatttgtcagctttagtagtatagccctaactagctagtgtacgtagaatttgcttcgttaaaattcagtcttgtcttttatcttctcgcttacatctgcctccatcaacactagtttgccaattcttcagatatccttctttgtttgttttaaacttcagaaattgtctgtcttcaaaattatgtatgattgtcgtttaacgaaacaaaattccaagcaaagatttgaaatgtcttatcaatataaagaaacgattgattaaatatattatttaaaattttcattggcttgtgttttaaatttttataacaactaaccttttagttgtaaagctagctagttactgtatatagagatttcataatccattatttctctaatgcttttaagttttaaccaatgttttcaaaaaattttgaaaatatatcattaattccaccaggaaatatttgacatttattgttactctcagagaagatatcatttaataatttcactacaaacgaattaggaacattgattgtatactattggaaaaacaacgaaagcgtgtacagagcgtaaaattagcattctacattggaatgtgatcttttcttagatcatggtgtgtctttgttcgtaatgtattagcctattgttttacagttttctcttcatcaaacaagttcctaattatgtgtgagagactgtgagtgtcgttccattttctatatagaactagtcatagagggctaatcccaaaatattgattggtattgacagtgatacttggtagtctactttctttttcctttttattgtatcgtataatcgtacaaattcaaaaatttaggttacatacttattttagatagttaaaggttagtatggaatcataaaatagtttgaagtttttttttcaatatttcttagcaaaaatatatatttcaacatgtgtctgcatttaaactctcatgtggtttgtttttataagttttattgtttaattataaaaataaacatgtgatatttatccactactaagtttcacaaataatatattggaaagtcaagaaactgagagaaagagagatggtgtgaagttgaaaatgaggaaaataatccttttgggggaaaaagaagttaatgcgtttgattgaaattgaaagtggctagtaggaggaagtaagtaagcatgggttacattacaatttcaccttttcacttacctttaaacttcacttccaaaataattacacttttcatgtgctttgtttcaaaggtttctctgatactctcttcttcatataatagaacccatatataatgtactatatatatatatatatatatatatgaaaactctaattaaggtgttaaagttaattgggaatgcggaagaaccagaatatattcacatttcatggtaaattataagtttttcgtttattgtgaaagttcttatgggatggacatattatgatcatgtagttatatagattagttgcaaaatacaaatatcaatttgcatgattcatgttttttcgaaatgtgcattaacattcgcctctatacaaagaatggtgatgatagaattgtcataaaaagaagatggaccgctaagaggtcacaaatctattgcaattcgtcgtccataatgaatcgtaaatgtatttttcttagacctcatcaatgggtagcagaatatttgggttttattcattaagaaaaactatttattgtatacaattataacatgtcggctttactgttatcataaatgtgtccacaggccacttaatgaggctaaggcttatgaatcttcaaatcaaagacataatgaagaacctttttttacctatcgaaacgagaaaaagtggaacatgcatgatttccacataattacctaattattcttaagctatttcatttagtcaaatgcttcatttatttattttatatgcaccgtatagcttgtatataaatatatccattctaattctttttgcccttttatcaaacgtcgctatttataacaatccagcttttgctttcctccatattatatccccatcaaacaaacaaaaacaatatttgaccaaaaatagacaaatgaagataaagggtttgatgatattggcttcttctctcctgattcttgccttcattcatcagtcggaatcagcttcaatgcggagtttgctgatgaataatggatcatatgaagaagaagaacaagttctaaagtatgactccatgggaacgatcgctaactcttctgctttagactcaaaacgggtaattcccactggtccaaatccactccacaacaggtaactgtggtaattgaagaacaattatatgtgtatctatgttcttgtgtgttgtaaggacatttcctagttaagtttcattaattactcgatattctttgcctttccacacatctttgtttattactactgtacttgtttcaaagtgatttaaggatatcatatgaaaacccttaccgggaccaaggttgactaagcttagaaatcctacgttggaaagaagaagtggcaattgatgtctcacttgttctgttctctggttcatatagatcgattggaaaatattgcatggttgatgtttgttctgatcatatgagatcatgtaaagccaatatatatttacatacaataactatatatgtgtttgagaaaacaaaactatatatgtgtatatatatatattatatacatggttgtgaaataaaacaaggattatttaaatacttagaaggagactgatatttcaattaatcttttgaatttgtattgtgtatagactattggactttttggggcagaagtttctgaaaatgcaattaaattcacttatatgtcagaaggaactcactttatagttaatacatagtgtctcccaactcccatcttgtctatggttctctctctcttacgactacgaatatggattaaggaaatcttgcaagttttttttgtctctaacaacattttcagttcatgtttcaacttaaattataaaatccttgttcaagatactctaacgttttttttttttaatgtaatgttaaattagattcaaaagaaaaatgttgtttgtacaacaaatgtatagtgtgtttgataagactaaatacatttcttagcaaaaattctaaatttaacttctagttgcatagaaaatatattctaaatttaataaatgcataacaaaacttgtgtaactgggggacagacctatcaagataaataaattaaatcaagtgacgactttagtcactttaaagattatttaaaacagaaagaactacagaaattaacaccaaaaaaaaaaaaaaattaacaccaaataaatcacttgatctcagactttcagataataggtcaaggttgtctttaacaagaaaaaaaaagacaattatttattcggagtaataattgttgggcctctagacaacttggtccacttacaattgttaggccaactaacatgagccggataacaatcagtattctttcctggtcacgtaacttaaacaaagagctacggaactttacatcatttctaagttcctacaaagttttatcgatactgttattcttttatggggaaacgttaaatagaaacacaaaaattgagtctactaaacaccaaataaatcgaaacacaaaaattgaggctgatatcagaaacagaaatcaaccacaaatcaccgttcaaatgtcattccagttgatgtctcaaaacttttgctcactaaaacattttctctcttaatagaattctctgtcaatggtcacaatgttattaatcatgtctctttgtaatcatcctttcatagacaaatgaacattagccataaagagacaccaatatcatctagagtatagacatgaatgactcagtgtctcttaatgaagtaacttcctaataataccggttaactaaaccggttcagtatgctgccaaatcatagaccgggtccaaactaaccataaaccaacatatactgtttaattatcatcgatcaaactcttctcgagaaagaacccgaatacctataacattcgtactatcaagtgtgagatagaataacaaaaagaaaatccaccaaaaactgattggtcagtacaaattgcaagagaattaaaaaaaaaaaaataatcgcaagagaatccaaagataaaagaagaaaatggtccttcttcttataaatgttccttattatatacaaagaatcatttaatttcgtaagcattgatatttttacaagattggtcaaagtctttgcgtgcatgttctttagctttgattttccgcctgaaaaactaccttttgttcttgactctattcttatagaacagaatcggtactactgatctaactgacgtaatctgacactttactctatttggttttgtgacaaaatatattgtgaacaaaaaatgtttgttgtggtccgtgatttataccattgttctataagttctttactatatagagtctactaaatccagtccctctttccaaaatgattacggatacaatcacctgttatccacaagtttgaaagtacaataacatttacctctcgcgtttaaccaaaattgaaaatttattggaaagttgaaaaataaaaatgcataaaatcaaagaaatgctgtaatttatgatttgtgggactaatgttacaaatgtaattgctagacgctatactgtgcatgtaccaactaccaagttataattttttaagaatgtggctatatgacttacgaggtacccttttccttatctataaactccgttttgatttatgattccatccgaagtatatgaataagcaagcaataggacacaacccactaaaaagaaaaagcaatacttgtttgaaacccgttaaatcacaaatactaaaatttgaaaacgaagatgcatctactctgcatagacgaacataaatattggttgcttttatgtataacaaaggttgtaaaaattattttgaaaaaagcttgtaaaaatggtagaaacgaattaatttctaagatatgaaaaatctcaaaaaaaattcagaagttaaattttttatatatcaaaatcgtgatatcaaacaattttaattttttcagtcagttttttttccttcaattttatatatatttcaagcggacacataatcccctataactataaaattttaacatatatccaactagttatgaaacatatacaaataataaatatgttaatgcaaactgaacacaacagatcatatatatcactaatctacatatacatttttgtagccattttgtgaaataaatcctggagttagaatttatttacaatggctgccactggatttaaattatttgattttttttaattaatggtttgaatctttatacgacaattaattgtgtaacaaaccaaaaagattctaaatatatggcaatcccatatgtcacgcaaaacacaataatttaacttctccttatctcacctacaatattcactaaatcttaaaacaaccaaaatttgaactatttaaattatttgtattaaatttcggcaataaattaaaacaaatgtgaaacaaaccaaaaaatacatttacgattccggaaaatgagcaaacccaattatatgtgcagctaaaaacattctttattttggtttggatattccatggaattaatagtccataacttttttggcataaaatcataatcacaattaattccacaactaatatttaaacttatagaaaaaactaaaatatcatgagacgaaaaatatagcgtgacggatttggattgatatgaaatatagcaggactggtttagattgatataacacagattaaatatttattttattattttatcatcaccaaattttttaattacaatatcaatataaaattatataattttaatactaaactaaaactttaaaatttaatattattatttataaaaataaaatatttgccctgtggtataccacgggttaaatcctagtatataagtaaaagactaaatgaatatcaatatttacacaatcacttcacaaatttcggtatctaatattgtattttgaggttcacactgatctcattagaggctattttttcaagtgactaaattttgtaatgatttgcatattctacataacttgctttatccaaaggtgattttttttttcccataacccgtacacgtttcctcaaatatatcttactaatactataatgtatttctgaattagttaaaatttatacaaagtggtttataaagtttttgtatggatttagattaattcattttgagcaaagtgaaacgaaattcaaattttgtatggctgaataggtttcaattcaacttgaattataatctatgaaatcctattgacgaaaaaggaaaaaaaaatataggtttaacattaaacagaaacaaattagcttacaatactttctacaagtactttataacccttgataccttttatcgtaacaataagtaacgtgaaagatttatgttgatataaaaatagctagctctattcacgtgaaagctttatgttgatataataattctcccacattaagtaattaattaaaataaaatattaaaactgtttaatacaaccaaagtagtaaggcgtaaacttattaaggaacgcgtcttaattacctggttttaggttccttaatgcttgcttgcttactccatcataaagtttgtagataatgtctaatattggaaaacgaaaatggcatttcttctagttggttgtagtcagcttaacatctttgttaatagaactttatctttacatcgacaactaaatttagaaatattcacctacctataggtatactatataaatgatacccaaagaaagtcaagtgacttctctagtcatggacggttaaggatatatatgccttaaagtttgtatgaatttagcatatcacaaaatgctttttctattgttgcatgaagcatccaatgtcagattttggaagggtctctaaaatttatttcaattaatagattttgtggatgaaagttttccgtaatctaatacatactagttatgcatgcatgatttggccgatcatcaatagaaagtgataggcaacataaatggaggattagaaaatgcttgtgaattaaaaaaaaaaaaaaaccataatgcagcttataagcagtttgaaaatgtcatgatttgaattacaaaaaaattggttttctcataatgagttatcttatattatccttttagaataattgtatccctactaaaaaaaaaagattcgattaaatttcaatatggattaaaggaagggatgattactaaaaagtctagaatagcccaaaaaaggaggttttacaactagagtggcacacaaaacttgtaggttaattcagtcatttctatctccaaaatagctttgaggaaaaatagaggactatgttgaatttgtaaccaagtaaatggtttttcctttacgttacgtttagaagattttagtaatgatgctattatgagacggttagaaacagttaagagagaattggttacattaacggcgttaaaaatcaggtgtattttcaatgacccgcaaaagtgtgaccagagtaaagttccgtttagtatcggcgttatttaacgacgacgttattgttcgtttgcaatataaataacgaaagacggttttcttggagcttgtgcactctctgtcactcattttccctttgtttgcacaatggcgacgtcatctctgaaactgaccagtgcttgtttcgtcttgctcttcatcttcgttggctgcgttctcacagcaacaaatctccgaaacaacgaaatctctcgatcgaggtgcacatttataattcttcgtaatgaatgtctctaatctatactcgtctctctacctaaatatatctcttttctgtttcctctagttcacattttaagctacattttcattatttcatatgttttctcagtttttcttagcattatcatgcttgatttgaaatgttgtacacttcacataaacgaattttctcgtcccttgaagttttcctatgtatatttaacgtatgtctcttttatgcgaatttttaaagtagtctcggagatttaagctatggattttgaacttaaaactaatcttttttcctcggtgattttttttctataggaagctgaaaacagaggattcaaagagctttaacagttcaccaatgacgactaggtaacagataatcacaccattaatagccgtcgattccaaacgtcagatatgcattttaaaccgttggattaacgaaatttaccctcatcatctgtttttcaaacattcctaagttattagtcccaaaaaaagtataatgataattcatccataagaaagtaaacaaaaaaggatccaacggttgagatttagatgcatcggatccatatttttatcaacgacaataagattacggaatttagtaaatgtggtttattactttgcgtgtgaaattgattttaaagaagtttaattagtttttttttcgggggtgtgtttggtaatgaatttgtggttggttgcgtcattcaggcttgatggtgtagtagagttgaatgaacacgcagttactgatccagacaaagttgcccatgaagtctctaaccttattcacatgtgagtttttttttatgctttatctctctctacaacgcaattgctatgtgtgcatttatttcaactcctttggaatgtttttttctttctcaaattagaaattcttctgcactagtcgtaacgtctttatgagaaagagaaatatacaatcttagtaaaattttgactaagaagttttcaaacttcgtttggttggagtcactaatgaatgagttagtgatgttattggtcgtgtacgattgagactttgtggagaaacctaacaaaatttgtctgctcatttattaactttttcatgagataagatacacttttagtagtactattatcttaagatttatcagcataagatagataaataaataaaacattataaatttcaggagtgaacagaacatcactgcaaggaggaagcttggcttcttttcatgtggaaatggcaatctaatagatgattgttggcgttgcgaccgcaactggaacaagaaccgtaaacacctagcggattgtgggatgggttttggaagtaaagcgtttggtggtcgtaatggaagttactatgtggtcactgaccatagtgatgatgacgttgtgaatccaaagccaggaactttacgtcatgccgtgatccaggttgaaccattatggatcatctttaaaagagacatggtgataaagttgaaacaagaactgatcatgaacagtttcaaaaccattgatgctcgtggtgccaatgtccacattgccaatggtgcttgcataacaatccaaaatataaccaatgttatcgttcatggcttgcacattcacgattgcaagagaaccgggaatgtaactgtcagaagctcgccaagtcaggccgggtttaggggaacggctgatggtgatgctattaatatatttgggtcaagtcatatttggatcgaccacaactcgctctctaactgtactgatggtcttgttgatgttgtaaacggttccactgccattaccatttccaataaccatttcactcaccacgatgaggtcaatcaaacacctaaaactttctcctttatttttttttgtaaaactctgttttttcttgatcataatgatattgtggagcaggtgatgttgctagggcacaatgattcgtacacacgagacaagatgatgcaagtgacagttgcgtataaccattttggagaagggctcatacagagaatgccaaggtaaatctacaatgtaacattgtgtttaactagacttatattacttgcaatacaagttaagaaatacattttgagtatttatatgcaggtgcaggcatggttatttccatgtggttaacaacgattacacacattggaaaatgtatgctattggaggaagtgcaaacccaacgataaacagtcaaggcaatagatttgctgctcccaaaaaccactccgccaaggaggttcgattcttccgtgtttttgcgtgcttataaacagagaaaatggatctttaattccaaaatatgaaactgtacaggtgacaaaaagattagacacaaaaggtaatgagtggatggagtggaattggagatcagaaaaagaccttctagtgaatggagcgttttttacaccatcaggtgaaggagcatcaggagactcacaaactttaagcttaccggctaaaccagcttcaatggtcgacgcaatcactgctagtgcaggtgcacttagttgccgtagaggcaaaccttgctactagtaaaacattactctctcaacccattagtagtttcagtatacaaaaacaccaacctaacccctttcacacgtattagcaagtgtgcaaagctttatacttattttgaatggtagagagtttggtcaacctcggcttgacaatgagaaagcaactgaagcgttgatccattctccaacatatgctttttctttttggtttggggtttatgacgtcttctattattaatctagcacttcttgtggtatttggttagtgatttgtagaaaaaaattacatttgctaatgaaattaagccagttgattgcttatgatgtctgcagctaaacatagtaaatgacttttctttgttcttccaagttatgtgtttgttgttaattcacattggtgcagctatgtttttgtgcagttgatttgagtgaggagtgagattacttggtaaaatagtgggcctatatctggttacgaaaggcccattagtagcccattatgttttgtccgtttcagactaattattggtcttaacttaagtatattacccacatacgaattctgaacttagaataagccaaatgcatttgaatccaaagtttgattgattccttgaaaagttaattagtacgtgtcgattttcaaaatactaaaaacacaattatataatcttaaacagaaagttaagtataatgtttaattaacataaatatttaaattgagggagtaagtaagtggtaatgttaaaaagaaaaaagaacattttgggaaaataaacaaaaacatggagagattcgcacaaggagagactctcgaggcaaagacccttgaaacaaggcaacacttcttatttctttatttctaaaaactgcgccgtttaagactcttatggtctttttctcctttatttcttttgtttacttgtaataatggcttgtggtgcgctaattattctatgaactttgcttaatttattaaatttttcaaaagtaacattaatacgtattagaataaatatttcaatgtatgtcatgtgccggtaaataaaacattttttctctctctacgataaaaatccatacttgacaactttgcatagattacttattaatttgtatttttattttttcaggtataactaaacttattacagtaaaacatgaccaaagtttttcgaaaaaagtaataaactaatcgtaattcaatatttgacatgaccaaaatgctgataagtaataagagaaaaagagttaaagaaaaaaaaacaatttgggattttaattcaatcaaattggagtttaaagtaaaataaaggtaagaatcatgagagtggagaattagggtaggtgagaatgagtgaggctcggtgtggtcacgtgaggtatcctcaaaatcagggattgttgttttgtccactacactccctaaacctaaacccactcatcctttgcttaacctatttcttaatactatgattttagtaagttttctatcaataactctctttctttttgcatacctttttggtcaatattttgtacttataagttttaaaaattggaaagagtgtttattttaaatatatgaatagaaatttgacaacaagtcaagctacatcttaaaatactttttgaaaaagtgatggaaactcggaaaggaaacataattaacacgagattatgttaatgattttatttctcagactgtatttgtattagataaaaaatcaataaaccattagaaatggaaaaaaaaaaaatgaaaattcattggatctagcaaaaggttcaagtctagtcatcttatttcaaaggattcttaatgtgtgaaataaacagcaatacaactatatctaatttatagagtaaccttgttttcttaagattacatttcggctcaaaggtttaaagtcaagaagataacaactatagaaagaaacagtaagctactagagtattaactaacatatacaataaaatatactcaagtagaaacaaagggaataaaaacgaatcactgattcaaccacttgcttggggtttgagcaaacgcactcgtttacttacaggggattaagctaaataatttctttaaaacaatcttaattaactgatccaacagtaacataaataaaaatacttatacccataaatttacgtaccaacgcatatatatcagacggctattgagtccagttagcacaaaactgttggaatctcgataatagcatgagcaactagttatttttgtataataaactacgatgttatatagtatataagtagataaaacattctaatctcgaagtaatatttatatacacttttcgattaagcataatttggcttgttttagttttacttcagcttagtcctaagagatgaaactgaacttttgtagtttttacttatatcttttacaaatttaaccacattatattagatcgacaaaaggggaattaaaataagatataagtatgtacattacatgattcacgtaaactataaattacactgcacataccactagtggttatatcaccaacaataagcatgtatccataggtaattttgtactaattctagctatttaacaatagaattttctttttaataatttttatccggaattctataccgagataatcatattttttcttgaaaactatattgattagatatttacatagtaaaaaaaatagaatatttccccatattgaagagcattttaattaaccaaaatttttttgttacctttaccatgtctttaaccaaatatgtttagctatttacttaatatcacttttaaacatcttaccttacgactatttcgtttagttagatatgtttctactctccacgcaatgtatatgtataataatactaaagaaaattagtactaaaatattactggtaaagaagagataggccataaataggtgaggtggcaaagaggtggggtggtgcagttttgttgatctcaaggcattgtgtttccctattttcctttgtactctttctcctctcttaaatcgccactccattattttaaatttcttatcttgataaaacacacacacacacaagtattagaagaacttaaaccctcttatgttctcttcctaagcttgagtttaattcaagcaagaaacagatttcgagagaagagtaagcacagagatagagagaaagaaggcaccaaaccctaaatgggtctaaacccaagattttaatcttcttttcgtattttgaggcaaatgtctcttcattccttaatcttcttctcctcctcttcttcttcacttctcttctctttcttctttatcttcatcttctgtttctctctctctgatgcagagcagaacccggaagcttctatcctttactcatggcttcactcttcttctcctacaccttcttctctttctctcttcaactggaactctatagacaacactccttgcaacaactggacatttatcacatgttcttctcaaggtttcatcaccgacatagacattgaatctgtccctcttcagctctccttaccgaagaatctcccagcgtttcgttctctccagaaactcactatctccggggccaatctcaccggaactttaccggaaagtcttggtgactgcctcggcctcaaggttcttgatcttagctccaacggcttagttggtgacattccttggagtttaagcaagctacgtaacctagaaacgctaatcctcaactcaaaccaactcaccggaaaaatcccaccggatatcagcaaatgttcgaaactcaagagcctgattctcttcgacaatcttctcaccggaagtatccccacggagctagggaagctctctggtctcgaagtaataagaataggaggaaacaaagaaatctccggccaaatcccatcagagatcggagattgttccaatctaacagttcttggtttagccgagacaagcgtctcaggaaacttgccttcttccttaggtaagctcaagaagctagaaacactctcgatatacacaacaatgataagtggtgagattccttctgatttagggaattgctctgagcttgttgatctcttcttgtacgagaatagcttgtctggttccatccctcgagaaatcggacagctaacgaaactggaacagctgtttctatggcagaacagtctcgttggtggtatccctgaagaaataggaaactgcagcaatctcaaaatgatagatttgtctttaaacctcctctctggttcgattccaagctccattggtcgtttgtcttttcttgaagagtttatgatcagtgacaacaagttctccggttcaataccaacaacaatctcaaactgctcgagtcttgtccagttacagctcgataagaatcagatttcaggtctaataccgtccgagcttggaacactcacaaagcttactctgttctttgcttggtctaatcagctagaaggaagtatccctcctggtttagcagattgtactgatcttcaagcattggatttgtcgcgcaattcgctaaccggaacaatcccttccggtttgtttatgctaaggaacctcacaaagcttctcttgatctcaaactctctgtctggttttatacctcaagagattggtaattgcagctctttggtgagattgaggttaggtttcaacaggatcacaggagagattccttcgggtattggttctcttaagaagataaactttctcgatttctcgagtaataggctacatggaaaggttcctgatgagattggaagctgttcagagttacagatgattgatctcagtaataactctcttgaaggttctttgcctaatccggtttcttcactctccggtttacaagtacttgatgtttcagctaaccagttttcaggcaagattccagcgagtttaggacggcttgtgtcactgaacaaactaatcttgagcaagaacctgttctcaggatc

SEQ ID NO: 66 - DNA, 40018 bp, Arabidopsis thaliana
tgttcttgaagaaacctgcactgttttgagatctaaagtttgaccatttttgttgcagattaaaacaatgcctgaagggaaattaagatcaggagtttatagatcattcataatgtgtgatgatccaagagatgttgttgaatgtggagctattaagaaacagagtaagagccgtagtagtagtactaaacagagatgtgaagaacatctttcgaaagtgaaagagcggtccgaaatggcggtggcgcctaggaagagtagtagtacagaggatgttcctccttcttcgttgcagcttttgagagtatccaaagggattcagaaattgaatgttgcaattgagtcattgtctaaaggttttagctttgaggcggtgtcaaggcctgaggatatagcgaaagatctgttgagaggagctcttgatttggaagagtctttagctatgttaagtagtattcaagaagatgatagtaagcggaaaccgatgattcggaacgatggaagaagcgatttgcggtttcaaagatcgatgtctgatagattcggagagcggattgagaaacggatgatggttcaagagaatgtagcgtctaaggattgttatgaagagttaaggaaagtgattagagagagttttcttaggcagaatcttgtttcacaaacaactactatagagactaagaaacgagttgttagaagtgattttgcttcctcttctggagctgtgtcgtcgtcaactagctcgagccaatcttcaatggtttctggctctactaagtcctctgcttcgtctgatgttccacagagagctccaagtttgattgctaggcttatgggtttggatgtatcaactcaagaaccgaggaaaagctcggtgaatcatatcgataagccggatattttaaagctgtcatcagaaagacaagagaaggtgaagaagaatagtaaggagagtcctgaaattgtgagatgcaactctacaagagaagctgctttacagtctttgcctgaagagactccgagcgagaatccttcgactatagtactcatcagacctatgcgtgttgtaaaaccggaaccgggaagcaaacaaccggttgtaccaaagaaaccgagaatgcaaggggaggttcatccaagaatgattaaccagagaaaagatcatcaagctaatggaagcaacaaaatgaaattaccattacgtatgaccaagaaggacaaagaaccgaaagaaatggtgcctaaagtagaagagaatgaaggtaaggtcatcaagctaatgtctccaagcaatgccaaagttctaacaagagatcgaaaaccgttggaaaccaacaaaaaacttgttgtcaagaaggatgatattgctgaaggcaaagacagacatagagctcttaaaccacccagcaatcctgtgagtcaaaagatatcgaacaattcttcagacgtatcaagaaacaagagtcgacgttccagtaggttgagctcaagctctagtagtggtagccgggaaaagaagtccggtgaggctagtagaccaaatgtgagcaatctttctcactgcctcaatgcataaacctttacatagtttctttaacattgtttctcctttaggccaagaagaaactccgtcaacaagacaacgacctcggttcagagaataattcatgctcttcacaagagacgcatggatcacttaaccaactgtctacagaggaaaccacttcttcagagtttcacaatcaaggttattactacagttctcaacgctcagtatattcttaaagtttgtttcttttgacaagtcttctcatatatactatgttgctttgttcttgtaggccattgtgacaatggagaagtttcatcatgtgctgccacaattcaccattctcatgagccagaaacatcccaaatctctcttaagtcattcctatccacctcctcggatttcatcagctacgcagaggatctcttcgacttcaacaccaacaccgaacgaagcagagaatcaaactttcgaagaagagatagcattgtgatctcagaccaaagactagcactagactttgccaaagaagtagtcagacgcaaaagccttcttctagcagaaccaacgtgtcacacacgaagctctttggacattgatgagttgttgacagaagtctgtgatgggtttgagtctctgacaagttacaaagacacgttttcaggacaaaacagcttcgttaaagagagcattcacttggtgttggagaaggatttaaagggtaagaagacagagatgacaagtggagtttgggatttgggttggagaagtgagtttcagattgatgaaacttatgaagctgtagctgacttagagaaacttatcttgtccggtttgatccaagagattatctcttgagtccaccaaaacaacgatcgtccactttattttgtatgtatctcttagtttaatttttgtaatttacattctttgtaagcagttaaatatcagtctaactaaaattttagtaacgtgtatatatattgcttcacacaaactactaagtgttgggtttaacagttttagcacttgacaattaaagtgttactcctccgaatcatgagaaaaaaattatttacttcatcaccaaatcaaagccaccctgatttgtttacattaatgttattttggaacaaaagtgtatattatatgtcacaatcaaatcttccctttattttaatttttatttttaaattagatatatataaattttgttgacaaaaaataatagatatctacgaatttaaagtttgtgaatcagaatatgagttaaaaatttcatgattaaaatatgtaagttttatttttttcaaaaaaaatcagaaaatagtattaaattataattaatttgaaggaaaactatcataaatactcaattgaaaattatttggatccgctttagagtcttaatagttagattcaaatccagttttggctcgtttaaaatccataatcacgcacggatcatgatttttactacacacaacaacaactcgagtttatcattcttcaaagcataacattcttcaaaaaaccacttcttcaaagcttaaaatttctcatggtttttactacacacaacaacaattactcgagtttattcactcttttaaagttttggcttattgttctagagaatttttttacctggatttgtccactataaggcaaatctcctatacaagtagcaaatacgtgaagcctcgaggatcaaaatcatttagatctagagatttgtttctcttgttttggcgagtgaaattgtagtaacatatttcttccaatgggaatggagatgttatggtgaaccaccttatttgtgttgacaaatgaaaagaacaaaacatgtatatatagaagaattcttgaatcatatttagacatgtatagtataagaaataaaattttggttggacaatttttttgaacttcaactactcttcacggatattttagaagaacgatacatatgatcatctattactgtcggttaatttgactttctcatggtccgtaaacgatgggatttttattaagaaacaaaaactagaaaaaaagaatcattacttgaaaaatgtagctttcatttgcatccacatagatatattattctacatgttggtaaacaaaattgtaaaaccaaaagaaatagtagagaggacatggaaataaaggaaaaaaggatttggtcacacagctgtaattagcaaagcataacagaaaacctcacaatgagacaaactcgccacgtctcccccaaaatcgtaacgtgtctccctcacactccttcacggtttccatttttttttgtattaatgtataaatttaccaaaactacaaatcctaattaacaaactaatctcaattcttaattactttatacagaagacaacaaaagagaatcccaaaatggcaagtttatctactgcagctttcctccgcaacaatgcactcaatgcaggtgcaactcctagagttcttctccccgtcacgacaaaacacttccacgtacgtaaagattctttctttttctgattatttttatcacatttttaattaattaacgttattcgtaagttcttgcaattattaatcaaagacgagtacgaggatggagaattccgtttgtgatgaatccaacaactaatgcacaagaaaaagtcgtcattatcaatctcccaagaatatattaggtaaaattagtaaacagaaatgtcacttgtgcaaccaaatattgaaaatacggttttgaactgaaaaaatttggaccggacgtgtagttggcgaagaaggcggatgaaggagcgaagacgatctttgacgctaccggaaatttgaaggataagacaagaatgcagcagaagaaacgttggataaagtgaagtaaaggacatgatggagaagatcaaagacatggtgatcggaaaatccgaggaaaccatagaccatcaaatccactgtcaagagtgtcgaacgaaacatgaatataaatcgtatttcaaaccggatggagtttgtggatattaagtagccggagttagagacctgaattaatatttattgttcataaaatgttcgataagtgatggttactttagaagaacaaaaaaactggctatatatgtttctcaattcacgtactcctgaatgaatgatgaaagtaatttacagaagtttttatatatataaaaaaaaaaaacatttacagaagttttggagtaaccacttaattcttgaaccacgatcgatgatggccacatgcaacagatagaatttctaattctcgaaacagaaataggaataccttcttcttcaaaaattttaaagctggtagcatcatctcaaaaactaaaactatcttatcaccagttacgtcacaaccacacaaaaagagctagtctaattgagggaaatactaaaacttttctgctgacacaagtatatatttatgatactttttataaatagcacatatttatttatacaccatagttaccgaagaagacttgacaaaaatccaaaagaagacaagcattattaaagatattacgatataatttttaatgcaactatatactatcaaaaataataacaaaaggaaagagtaaaaatacgaaacttgtcgtggctgcctgtaattggacaaaactaaaggctaagataagccgcagatttttttttctttacggaagggtttacgtgtagctatattagtcgttaacggaaaaaacaaattgtgtaataatatataatgagttttagcacacaagaaacataatctatatattatagagattatgtttataactttgcatatgcgtatgcgtacgcatatgtactgatcttctatttcttaacctaaaacttttgtatttgatgccttactataatttccctgatcatggacaaaaacatgttaagttttactagatacgttctcatctaactagatacgacctaaaatacgatatttgtggttttagttgttagatgttgtgtcacacgagagaaagaggtcgacgaagaaaaaaacaaaaagaagaagtaaaacgtagttattggcggacaagggataaagattgctttgaagtcagaaatgctgacacgtggcagcatatgaagacaacccgccgcttaaaaccacgaatggtgacgaaaggcttctttgtttgcatgtgcaaccaatctctctctttctctctgtctttactaattttggttgttcgtagaaaatgaaatatttgaacgaagaagataaaggttggtgatgtacgtatgactctaaattagagtttgataatttgtatgtaagattagatcggttttgttatttgcttgatccaatttattgaagtacatgtgaataatcgtgatatatgtcaatatatatgtgctataattaaatctattaacaaatttctttttatcgatttagttacaccatctttaatatatttctattttctattttaaactaaagcatagtttctccaatatattaatttatatatttactctaggatagaattagattcaaaaactagaatagagaatatagatgctctaaatagacaataattctattacttactctattttagagtaaaacatatagtgatgctgacaaaaatattattttataatagagtttagaaagaaaagaaaaaacaaaaaaaacttgaagatgctggaactattaaaaattaaagaaaaagtttaaaatgaataatgctttttattcttagttttttttttcttttttttcttttagttgatgttaaagttttagtcaaatctccaaaatttgcaaaaaagatacattagttacggacggatatatattaaataaattaagtcacaaatatcatatatatatatatatatattaattttttgcctagttttgttccaaataaaattttcaatttttagtgtacaatatttttcatcgtccaaatacacaaacacaacaaataataataccactaatttatttgttttctaatataattgaaccttttctaattttattaaataggctgaaaaccataaattatttggagccaagattaaattatgttacataaatccttttctcgtcatcaatactcaaatttaaatttttttattttcatagatatttttgggaatttaaaatccttccaaataaatttgggaaaataatagatgttttaaaatatttttgttattttcgagtagtttacactgattttacatcactttatggatcaagaccataaaatttaactacatttattataacttatttgaaaagacatgaaactttcattagagtttaggaaaatacggcaaactattagattatcaccctcttgtgactaatgttaatactatttggtaaagcaaataatcccataactaattttattttgatttgttcactatcaattgtatcatagacgatccgatgattaatgtacctaaattttgatttaaattgtattccttgtagtacgcatagtaaaacaaagttcacatgttcttttacaattggttttctaacattttagatttcattttaaactaaagaaaaagggtttttcgatcccaacaatttttaaagtatgtttttgaatttcaacaaacgactagtactgatatatacatcaatgcttacaaaaatcaaattatctatctcaacgtttacttttgtacgtaattacaagtcaatattaacaaatattagtcaactgtaacggttgttgactcaattgatacgtgtacgtttaggtggcatgttttttaataaaataattttgttttatgttttgggattaaaaatatttacttttaaaaaactaaaccgaaaaactggaacccccaacctcacatattcatcaccatcgtatccacaaacattatcgagacataaataataatttatagatatatagcaacaaattggaattaaattaatcaaacaatgtcatttagaattggggaaatcctaaccgacgttatatgattaattttaattccaatttatgtatgtgtatatatctataaattattatttatatattgatgatgttcgtgcatgatggtaatggtaacctttaaaacttttgaatctcaaaacgtaaaacaacgtcatttggtttgaagaacatgccatctcgacgtacaagtgttagctgattcaacaaccgttactgttaattaccataactaacgttgactcataattatgtacaaaagtaagagttgaggtagataatttgaattttttaaatgttaaagtatgaacattactaattgtttgttcagatttataaaacacagtacctattttgatgtgttaaaatgtaatcgggaaaataggaattttcccaagaaaaaaaaatacactaaaattttgatgtgttaaaatgtaataaatacaagtacctatttctttctacaacaggtatcacatgatctgctcaatctcattttgaaggcaaggtcgaaccctgtttgtaactaaatattttacaaatacactaaaagttttgttttgttttcctcatgcagaaaaaagaaaagaaagaagaagaaaaaaaactcacaaaaacatacattgttctacaatatgttaaagtaattgttctagggtaataaaatccgtgtctgcctcttccacttcaataggaaagtgtaagtttttcgaatctttttggccagataatttaaaaccgaccgaggaaacttacttttgtaaaagtgaccatttgcacataggaagtagaaagttgataattggaaaatttataatattttatacaaaagaagtgtttaagaaccaccgcttggtctcaccactcaaattcgaacgtatggctcgtgggcacaaactcctgtaccaacctttagatactagcggcacgaggagacttctattttctctttgtttttaagtttttttatcgacttaaatatggctttttgcaccatttaatttcaaaaccaatgtctttctctcgaggaactttgtttttatttcttagaagatgaggggagatttactatctaaataaaattttaaatgtttgtaagtattatgagctcaacaattttgtcaatagtgccacaaatttaaacgtttgctttttgtcttctttgaaaaatcaaatgctgaaaaactgttacatctctttttcttaaaaactcttgtctctctccttttccttctgctgaggtaattgaatgctgcaaagagaaagagaataacttaaacccaaaattacacttaccgccagaaaaaaaaaagagttcagtttaatctaacatattttatacaatacaattgaattatattagtaaaaaaaaaacttccatataaatcatggaacaaactggaacacatgggctctcttattttaatttattttcttttttgagggatttaaccatgtttattatatagttttataaatatatatataccatctctccataatttataaaatgaaagaaagagagagtcttcttgttggagtaaacccaaacggttttagattacttattagctgttcatcagttcttcctctctaaaagagtaaaacctaaacatctctctctgttctattagaaccaaagaccaatctttgtgaacaaaacacatctcgtatacttcagatctagactcgaaaattttagacctctttacaattggtctttgttcatctgaagttggagaaaatagttagcttaggtcggatcttttcatatgctttggatcctccttcgtctcttttgtataattttaaccttatcaagagttctttttgaatctcaaaagattatatagtagtatagaaggtttatatgtatatgtatagccagatagtttatgttgtttaaagattcgatgatagccaagttgggttaactttctttttccttgcctccttactcacatacaaaccctatctgtccgtacaaaatactaaaaaccctaacttttctctctccaccaatctagtttattgtttcatttccacttcaacgatgaaaagcttgcatgtggcggccaacgccggagatctggctgaggattgtggaatactcggtggagacgctgatgatactgttttgatggatggaattgatgaagttggtagagagatctggttagatgaccatggaggagataataatcatgttcatggtcatcaagatgatgatttgattgttcatcatgacccttcaatcttctatggagatctcccaacgcttcctgatttcccatgcatgtcgtcttcatcatcgtcttcaacatctccagctcctgtcaacgcaatcgtctcctcagcctcttcttcttcggcagcttcttcctccacttcctcagctgcttcttgggctatattgagatcagatggagaagatccgactccaaaccaaaaccaatacgcatcaggaaactgtgacgactcttctggtgcattgcaatccacagcttccatggagattccattagacagcagtcaaggttttggttgcggcgaaggcggtggtgattgcattgatatgatggagactttcgggtacatggatctacttgatagcaacgagttctttgacacctcagctatatttagccaagacgacgacacgcaaaaccctaacttgatggaccaaacccttgagagacaagaagaccaggtcgttgttccgatgatggagaataacagtggtggagacatgcaaatgatgaattcttccttggaacaggacgatgatctcgctgctgtgtttttggagtggctaaagaacaacaaggagactgtgtcggctgaggatttgaggaaagtaaagataaagaaagctacgattgaatcagcggcaagaagactaggcggtggtaaagaagcgatgaagcagcttttaaagctgattcttgaatgggtccaaactaatcacttacaaagaagacgcaccaccaccaccaccaccaacctctcttatcaacaatcattccaacaagatccatttcaaaaccctaaccctaataacaacaacctaatcccaccgtccgaccaaacctgtttctcaccttcaacatgggttcctccaccaccacaacaacaagcttttgtctcggacccgggttttggatacatgcctgctccaaactatccgccacagccagagttccttcctttacttgaatctccaccgtcatggccaccaccaccacagtctggtcccatgccacatcaacaattccccatgccgccaacctcgcagtataatcaatttggagatccaacaggtttcaatggatacaacatgaatccgtaccaatatccttatgttcctgcaggacaaatgagagatcagagattactccgtttgtgttcctcagcaactaaagaggcaagaaagaaacggatggcgagacagaggaggttcttgtctcatcaccacagacataacaacaacaacaacaacaacaacaataatcagcagaaccaaacccaaatcggagaaacctgtgccgcggtggctccacaacttaaccccgtggccacaaccgccacgggagggacctggatgtattggcctaatgtcccggcagtgccgcctcaattaccgccagtgatggagactcagttacctaccatggaccgagctggctcagcttctgctatgccacgtcagcaggtggtaccagatcgccggcaggtagacatgcacaatcatctttctcattgtttattctttaatttagcaatactcgaatagtttgtgtaattgcaccactcgtttggtttgatgaagaagctaaagattttacatgtgttttttttgataaaatgtgaatcggaagattatacatttgcaatggaaatgaaatgattttgatctttttggtttgattttagggatggaaaccagaaaagaatttgcggtttctcttgcagaaagtcttgaagcaaagcgacgtgggtaacctcggaaggatcgttttgccaaaagtaatttttcttctaatttcttgtagcctttgctttccattttctaaaaaaggttcaatgtttgtgtaaaaatattgtcaagtttttattttatttttactcttattggttaagttatattttactgaatttttattttttttagaaagaagctgagacacacttgccggagctagaggcaagagacggcatctctctggccatggaagacatcggaacctctcgtgtttggaacatgcgctacaggtaactgattatgatgctaacatgttaacattgattctttttataaaaacaattcgtgtattttgtcaaaaattggaactcgaccaaaatgttttttcggttatttaattgtcttcttaaattggttttgcaggttttggcctaacaacaaaagcaggatgtatctcctcgagaacaccggtacgtttttgaaaatgtacccgttaataattttcctttcttttggtttgtttgttctcttgtaattattgttgtggacgcatacatatctaattttccttgaaattacgtttacaggcgattttgtgaaaaccaatgggctccaagaaggtgatttcatagtcatatactccgacgtcaaatgtggcaaatatgtaagagaagcatcacaatatttttctatacttttcattagtatttaactctcatcattacttttgttggtatttatcttgtcataattaattgagaataatattatgacagttgatacgaggggttaaagtaagacaaccgagcggacaaaagccggaggccccaccgtcgtcagcagctacgaagagacaaaacaagtcgcaaaggaacataaacaataactctccgtcggcgaatgtggtggtcgcttcaccaacttctcaaactgttaaatgaaaaacagagacaaaaagaaacaatataaatattattatgtaccaaataagaaagagggcaaaaggaaaaaatggcagcgtacccgagtgtgccacttctcgtgcatgcatgggatcttgaagacaaatggagggtcatgattaaagctgtttggtcggggtccgggtttttactccattttttgctttttcttgtcgagtcggttcttttataactctttactctttttaccttcaggatattgtagagatgattaattctggaaatggtgtttgtgttatatttctggagagatgattatatagttcttttgttgttgtaattggttaatattacatatgtggctcatttcttgagtcgagcttacatatcgtttataatgtgaatgttttaagaagagttgaatgatacaatatttttacacaaacattgataatgataataaaaatgataattaatgtacaaaattatttgtaaatatggacatatggacaatttaagaaggaattgagataattaattttgtacattaattatcattatcaatgtacaaaattatttgtaaatatggacatatggacaatttaatgatagtaaaaatgataattaatgataattaatgtacaaaatgataattaatgtacatatggacatatgtacaaaattatccatatcattcacatattcacattgtaaatatttgtaaatagaatgtttacatatggacattttaagaagagttgttccttaccactttgattctatcattttcttgtttatctagttagcttgaaccctttgtattattgagtaacgaaaatctttggaggaaaaaaacaagtgaggtaggattataattttcctcatataagtgtgttgtttgtgatacatcattattctttcttatttttggttaaacccaaaaactggaccgcacctaaggaattgagatattcaaaaaaacaatgatctgacccgtgccaaatatccacaccacacctttctccattcaggccctactagaaagccgtgagacggttgacaacttgaaaacaaaagacttataatgagactatgagaaacaaaaaagaaagtggagttgatgaaataatctgatcttatgaaagtgaagttgattacaaaaggagcagcgtggtagttgaatagtttcagatgttgataaagacgtgacatacatagttgtctcagtaatctaatcaaggactcctcatgtttctaacttcttcttctataaagttgcatgagatttatatctggagaacatatattgctctaattatgtggtcttattatcatcaatatatgcctttttctacatatgaatatatgatcgacatgtatagatattttttgttgttcaaaaaaaaaaaatgtatagatatttttttcattttccaaaaggattgaatttcgaaatggtgtagccaccttagaggtatacaacaataaataattttcccgacttgtaacaaatgtttggaacaaaagtgtcaattagaatcaaagtaaccatcagatgccttttataaatttctttatctatgattattttttaaccaaattcagacacttctatattactaaaagccaaacttgatatctatttcaacaaaaaaatttttttttagtctgctgtgactcagtatatctaattgttttcacatcattcataaacttttactagtccattgtaaaatacagtatattagaaattgttttcctatctatatatgcttaggtttaagaaaacaacttttggccatgaatatttgagtttttaagtggttttggattatagattttgccaaaaggaaaaaatattgatttaaaattacaaaaagaaatctgcaaacaattatcaaaaactcattaaagtgggatttatttttcattttgtttacaaaaatgcgaactctaatcttgattggataattaaatgggtttttggaaaaccaataactatgctataaagtataaactactaccattcaagccttctatttttctatgccaaaaaatactacgcaaaaaaaattgagcgtgtttgatccaacaataaaacaaattactcaatcttgtttgatgtcaaaatccaaatccaaaatatgtttcggacacctgaccggtctactcgattgacacccctgaaatttcgaaatagacaatacacaaaaggacatagacaacataacttcatctcacttagatattcacatttcccatttttcaaaatattggctcttcattttctgtgtacttccaacaaattgtcttctagagaaaccaaaactatctaagatttctccaccttctccatcatccaccgttgattcactcatctcatgtctccaatgactcatctacggtcaagattcaaggagcatgaaacatcccatgaaccaaattacacaaaaacatttaccttgataaaaaaacatcattttattattttggcagaagaaaaagtcttaattcgaactttgagcgtgcttatagtttaatcaattaaagttataaagaaaagtaactttataaattcaggagtaatcagtagatttataccattcttgtccatcgctttaagccacacttgatcggacggtaagcaatcaatccggtttacactttctgattataaagattccaacttttggttatatcggacggttaataatcaatacggtttgagtttaaatcatagccgttgagatgtttgactaaagtgtttacaaagtagtcaacactctctttctgctacaaaggaccagtcttgaaactcaaagtccttacctttcccttctctaacctctctttctctttctctgtctctttgtgagaaatgggcatggaagctttgagatttcttcatgttatcttcttctttgtgctaattcttcactgtcattgtggaacatctctctctggttcttctgatgtgaagcttcttttaggaaaaatcaagtcttcactacaaggaaacagtgagagcttactgttgtcttcttggaactcctctgttcctgtttgtcaatggagaggtgtaaaatgggtattttcaaatgggtctcctcttcaatgtagtgacctctcttcaccacaatggactaatacctctctgttcaacgactcttctcttcaccttctctctcttcagcttccttctgctaatctcactggttcactccctagagagattggtgagttctctatgcttcaaagtgtgttcctcaacatcaattcattaagtgggtcaatccctcttgagcttggttacacttcttctctctctgatgttgatttgagtggtaatgccttagctggggttttgcctccatcgatttggaacctctgtgataagcttgtctctttcaagattcatggtaataacttgtctggggttttgcctgagcctgctttgccaaattcgacttgtggtaatctccaagttcttgatttgggtggtaataagttctcaggtgagtttcctgagtttataactaggtttaaaggtgtgaagtcacttgatctttcaagtaatgtctttgaaggtcttgttcctgagggtttaggtgtattagagctagaaagtctcaatctttctcataataacttcagtgggatgttgccagattttggtgagtcaaagtttggagcagaatctttcgaagggaacagtcctagcctttgtggtttgcctttgaagccttgtctaggctcctctaggttaagtccaggtgctgttgctggtctggtgattggtttaatgtctggagctgttgttgtggcctcgttgttaatagggtatttgcagaacaagaaaagaaagagtagtatagagagtgaagatgatttggaagaaggtgatgaagaagatgaaatcggtgagaaagaaggcggtgaaggaaagttagttgtgtttcaaggtggtgagaatctgacgttggatgatgttttgaatgctactgggcaagttatggagaagactagctatggtactgtctataaagctaagcttagtgatggagggaatattgcattgaggctattgagagaaggtacttgcaaggatagaagttcttgtctgcctgttataaggcagttaggacgcattcggcatgagaatttggttcccttgagagctttctatcaagggaagagaggagaaaagcttctcatctatgactatcttcccaacataagcttacatgatttgttgcatggtattttctttcatcatcaatcttttttgccatggatctttcttggttgatttttgttattcatgtgttgtttgaatgatgtgcagaaagtaaacctcgaaagccagctttgaattgggctaggagacacaagattgcacttggaatagcgaggggacttgcttatcttcatactggacaagaagttcctatcatccatggaaatattagatcaaagaacgtgcttgtggacgactttttctttgcaaggctaactgagtttgggcttgacaagataatggtacaggcagtagcagatgagattgtctcgcaggcgaaatccgacgggtacaaagcacctgaactccacaagatgaagaaatgcaatccaaggagtgatgtttacgcctttgggatccttctcttggagatattgatgggtaagaaaccaggaaagagtggaaggaacggtaatgagtttgtggacttgccttctttggttaaagctgcggtgttggaagagacgacaatggaggttttcgacttggaggcaatgaaagggattaggagcccaatggaagaaggtttggttcatgcattgaagctagcgatgggatgttgtgctcctgttacaacagttagacccagcatggaagaggttgtgaagcagttggaagagaacagaccgaggaatagatccgcattgtacagcccaaccgaaaccaggagcgacgccgaaactccattttgagtctaattgtgttcttctacaagctttttttttcttctgtaattcctcactttagttggctatatttgtttccttggcaagaaaccattctgatttgattttatctatatttgttgatgagaaatggtgtaagtgtaacagaagcagttcaaagtattaatattgatagaagaatatatgatacatgatgatacaccaaatgagtaatgaggcagaagaagaatgcactgtactacaattttggagttgagtcgaacaacactgcggctcatcaaagctggcctaggttgacgagtggaggcagagaagagtctaaaatggtaaaagagaaaagaaaggagacgatgaaaatgtaaatgacggggacgaagaaaacaagttagttttcttcctttgtctccctcagctagtcagtatcctcttcggtcttgggtttgaggattatacaattaactaacaccgcataccgatcctgcatttaagggcaccggagctgtaggtaagcatacttactacagaagctggtttagctcccaagctagaggctctggcatagcttgcaggagcagcagctccagatttagtgaagtaggcaccgttgagcattaggtctccttgagatctccagttccattgcttccattccccttgccatgaacctaccctctttgtcacctgccaaaaccattacaatattgagattcatcctttctcaatatctcctactccgaaagagagaaattaaggtatacctctttggcgaaagggttgcccggggcaaggaaacgattgccttgactattgatagtagggttagcacttccaccaattgcatacattacccaatgagtataatcattgtttacaacatggaaataaccatgtctacacctgaaataacaacaaaagaatcagccctcctgattcttgtagcaaacaatcatcgaaaagaaaacatgaaatgcatgacgaacctcggcattctctgtataagcccttccccaaaatggttatatgctattgtcacttgcatcaacttgtctctagtgtacgaatcactatgccccatcaacataacctgcattatccatcaagaaacttcttctcaactctttaacacaccctacacaattcagttcactatactaactaatttagctactaaatcaaccaaaatccactccaaaaacgtgattctgcagcaaattcatcatcagttccactgaatcagcaaagaaagctaacctcgttgtggtgagtcatgtagttattggagatagtaatagcagtagatcccataatagcatcaatcaaaccatcagcacaattagacaaagagttatgatcaatccaaatatgactcgatccaaatatcgatatagcatcaccatccgccatagtcctccacccataatgcgacggcgagcttcgaaccatagcattaccagttcttctacaatcatgtacattaatcccatggatgataatattcgtcacatactgaatcgtaatacaagcaccgcctgcgattgcaacgttcacgcctcttccatcgattgttttgaagctgttcatgattagctcttgagttagagtaatcaccatgtctcgcttgaagacgatccataacggacggtcttgtatcacagcgtgacggagtgttcctggtcgtggattaaccgcgtcgtggtcagatggatctgtgactacgtagtaacgaccatctcgtcctccgatagcgttacgaccgaatccgatcgcgcaattcgcgagacgctttcgtcggagatgccaattccgatcacatctccaacagtcgtctattgggtttccggtggcgcatgagaagaatcctaacctcctccgctctgtactgttctttattttcctgaaaataacaaaaagagaacagagttattaaattgttacaaattgacccgtgaagtttttattttcctgaaaataacaaaaagagaacagagttattaaactgttacaaattgacccgtgaagtttttgatttcacattaaagccctcttggagttcaaaaatcacgtggaggagaagaaggaaccatgtggtgtaataaatgtaaaccatttatacggaatcatatgatacggaccatacggaaacttttttatatcattctttttaattttattttaactttctatttttgtgatgttttaaataaatgttagaacgtaaagaatctgatatattttatggacaaaaatgtgtatacattaattacaaaattttgcgtcggtgggaaaaaaaaatagcgacgatagaggcgctttaaatggcgatcacggcgtgtctgtgtcacattcacatatagacacacaagttgtacaaaacttctggtctaaaaagaggtttaaatcaaaagagtgtagaattaaacatttatgggaacattatgggtgcaatttaattatatttttgggtgtttcctatgtaaattaaaatttaaggaatcacacaacgtttgactatctgaaacgttgttattattatgaaagtgagatgtacataacgtatattaattgctaattaaaatatgttacatttttgcataaaaaccatatacttgtataataacaaatgaggatagagagaggtcttacatatcgaccattgcagctacttcttctgggtttttaactgcgtgttcattccatgcaccgtcgtcgttaggtaacctgagaaaacatagctagtatattaaaacgacgtcgtttcgaccgtataagcatcgtttcttttatcaaatctggacgacggagattgactaggaagcttaaaactcacttattagccgttgatgaattactcgagctatgagagtttaggtcctctgtttcttgagccctataacacaaaaatgtagagacgaatgtcaaatgttacttctcttgtttctaaaagatttgaaagatttcgagaatctatgaacttacattgttgatgaatttatacataatgctagaatgattagagtcgttgagagagctaagaagcttctgctaaagatcaccattgttggatatatcaaagctctctctcctattgtgtataatgaagaaaaatgtaagaggagagagagagaaagagatgtaattaacttggagaagctgaagaagatttaagcttatatatatatagagagagagtataggcaagtaacgaaggtgtgaagaagcagcctaactccgttaattatatttggctcgagtcttacggtgtgatcagtttctttaacggcgtttgttaactgccgtcttccgtgattggatcattttatttttttggtaggcttccgtgattgaatcattgtttgacttcaaaacattatttccagctttaaaccaaattaatttgtttgggaggtatttagccactttgagggtaattagttctttcttatcaaattcctttacatttcaaaaatcttatagattcataaaatctataaataccactaaaaagtctttaattgtagtaaatggttatttgttaattgaaggtgtatagtgttatgcctccgttttacgatgactgatgtactgtattaatattaaactaaaatttctgtgtataaatggcaaaatctataaatatcactaattttttttagcaaattcataattgattcaatattcagatattcttttactctaaaatgtttacagtgacgaccaaccataatcgaaggggtaatggaagaattgaaacagtgatcccattatctattatgaatgtttaactattagacataagtttaattacatattagataagtttgattactaatagaatttgcacacaaaaaataagaagaaagattactttatagttaattacataatttagaagtttcttatcatcggtgtttcggcctttcgggtactacaaactgcatggttacatgataccacgtctagttttcatgctttatatatattattccctagtttcaatcaaaacgccgacttgatagaatttgaggttaggtagcgttttataataagttttaacgtcgtggttatggataatgccatgcatttattaatgtatttgcatgtcttttttttgttttgttaaaaggtataatgtagtatatttgagtacaatgcatatacccatatatagtattgatgatattatattttgatgtaagaaatgtgatgcagctcaaacttacaataatcttaagcatgtgattttggctaatacgtaaattcaatttctatgaattaaatctaaggtttatatgttaacagaattctaaaatgagtacacgtacgtttcgaaagattaattattttacatttatgccaaccataaccataactaccaatttatattatatttaactatctgcaatgtctagtttttagaggaactacgaatgaaaaatcaaagaacacatgtattttgtggtcgaaatcttaccgtagaaatgataaaatcagttaaaactttacgaaatatatacaaggcaattggtaacaattgtggtttatattaaatattatatatctctatctacttcaattttaattttgttaatagatacaagctgacttcttaaagtttaatatataaaccattgtacagccattgcatccatttgccgtacgagtacattatcagtagataataatcatattggtagcgtcaaatcaggaaaagacatctcattatggataaaactatataagcaatctaaatattacacggacttatatctattgtaagcatatcatttgtgcccccatgtgcatgtaaacttattgatgcttatcaaggttgtcttagagaaaatcgaattcatgaaataaagaacttttgaatgaaaaatgcgatggttacagttacataatttacaagcaccctgaaaagacaatgtaactgaaattttgatttgagagaaatcagtgtatccaaaaaaaaaaaaagagaaatcaatctatatatgtactttattagtagaaaaatatagaattacattaaaaagtatatcatagtatatggaaaaggtgggaagtttaaggagggcattactcgaagcacatttgttttggcattgactttggcatgtaagacaagccacatggccggccggttatcaccgttaatcaagacacatgaacattgcttcgatttattttatttgataatacaattcgatttactttataatccaccgtattatagctgctataaatatttttcgttggttcttgactctattagtttatatttttcagatgaatatttaataagccatacacattttttttttttctgtttttacaatgtcgacacgaaaaaattgcgtcactcgtcaatcaaaagcttgatgtggagttttatattttaaactattatataggttaaactaataataggtgtacattggtcttccaaacccatagtgaatatagttttttttttttcactgaataatgatatattgatgaatattgtttgggatacagaatctttacaaaaagaccaattaaggttacaggaatagtcgggcaaacaacaattccccaaaagaactgaagattgacaatggtcaaaaaccaaagcaaagaaacaaggccttggaagagattctctcaccctcaaatagttgatggagccaccgaagatgtccaaccgctacataagattgaaacctatctcctttaacaatactctgagcaataagagaagctcccctgttagaatcgaccttttcctccgagaccttccaatctccaatcttctccaaaaaatgagttagttctgaaacatgaaaagcaaaagagggccaagctttcggcctggcaaaagcggacagtaagtccccaggctcaaaagcaaacaaaaccttagactgtctgtggctagacatactctcaatagcccacttgacacagcaaaacaaggcatccttcttgacagagagattactgaaggctcttcgactatgtaataacaccttcccatgatcatctctaagaacccaagcaccaccacaaactctcttttttccagaccacacgccactaatgttgcattttacccaacccaaaggaggcggctcccacgaagaaggacaaggagcagagcaaacagtttctcccgcatcaacacttcgaacaagagcttgagcaagaaaccactcctgaacatcatccctaatcttttcaattgattttaaagggctgaaaatggtaccttcaaagaacaatttgtctctattcttccaaagtctccataaaacccatggccaagacttcttaatttgctccggaatcaagcctttccctttaagctctaaaaggtattggatattagcaaaaattgagctattctgaaagccaaactgcgaggtaggaactccagacaaagcccatacttgacgagccaaagagcaagtgaagaggacatgattgatggactctccttcttcaccacaaacttggcaccgagggtcaataggcattccccttctgataatttgataagctaccggtaaagcagagcttaaaattctccacaaaaacaactttatttttggagaagtaagagtagaccagattttttctttcaggccattagttgaaggttgtaccctagcctctctaatcagctccggtttattggtttgaaaagctaaccaatacccagactttactgagtattcaccggatttagaatgtaaccaaacccaaaaatcatccatactcaccactggattcctcttgactatgatctcaatgtcagccgggtaaaacaactcctctagcctatcacgtctcctgcatctatcctcaacattaatgagatcatggaccctaagatctaggttgaccgagaagtgcttttggagagggaggcgtgggtcattgtcatagatccacgggtccatccacacacttgtagagctgccattacccactttttttctaaaacctttgataagtaagtctctcccatgtaaaatacttctccaagcataagaaggtgtagctttcaactcagcatctagaaagtcttcttcatcatagtatctgctcttgaagaatctagcaaagagactatttggaaattgaagtaatctccaagcttgcttagccaacagagcttgattaaaactttcaatatcccgaaaccctagccctccattctctttagaaagacacattttctctcaactaacccaatgtgtcttccttttatgctcaagagcgttccaccaaaaatctgacattgcacttgtcatattcacgcaagtggtttttgtaagcttgaaacaagacattgcatagacaggcaaggccaaagcaaaagctttaaggagagtttctttaccacccatagacaaagtacgagcaaaccagcctgacaatctcgtctttagcctatctttgatatagtctaagagctgcactttagacccactgaaacactccggcagacctaggtaagtactagctcccccttcgtttgttatacccaattcagcttgaatccaaaccttacaatcttcatcaaccagagcccccaaagtgatgctagatttatcataattaatcctctgacccgtaacatctccgtataccttgaaaatgctctttatcactgttacttcttctttaacagctttacacataaacaagctgtcatcagcaaataacaagtggtgaatagccggtccattctcagagaagcgaataccacttaaaagaccctgcctttctgctctgttcattagatgggtgagaccttctgagcacaaaacaaacagaaaaggggagagcgggtctccctgtctcaaacctctagaaggaacaatgtttccaaaagccttgtcattgattagaaccgagtaagaaacagaagagatcatgaacataatccagcccacccatttctgatggaaacccaaagcatccagcaatgctctaacgtaattccactccactctatcaaaagcttttgacatatttgattttatcgcgatgaaccctttggaaacagacttatgagtacgcaaaccatgcaccacctcgtgagctatcagaatattgtcaaaaatcagcctctccgccacaaaagcagattgattaggggacaccaaatcaggaagaaagggttggagccgcctaaccatgatctttgaaatgatcttgtacaatactgaacaaagactgataggcctcaaatcagtcatcttgtctggtttcttcttcttaggcagcagacagagatgagtgaagttccaacttttcggaaaataaccaaggagaaaaaagttttgaatctctttagttacctggagacaaatgatactccagtatttctgaaagaagaaccccgtaaaaccgtccacacctggagcacttgaacttcttatagcaaacacagcttctctaatctcattcttagaaacagccgcaatgagcgtattattcatgctttcagttactcttggctgataatcctcaaacaggtcaacaaaactgcttggatcagtagatttgaacagatcagagaaataggcttcagcaatcgcccctttgttcatctcatccttgtggaaaagaccattgacatcgcataattgatcaatgtgttgtttccctctgttgtccttaactgaagcatgaaaaaatgatgtatttttgtccccactatgcatccattttgctctactcttttgactccaaaaaacttcttcatcgtggtttgctttacacaagtcatttttaagagagaaaaccaaatcagctctaggaaaaccagaagactgctccaactccaaagctgcacgagcctgcgtaattctggtggaggagttgatgttattttcttttttccatctacttagagctgaacgacaatgcttcagtttatctaaaaccagcagattctcgtttctttgacttccattccaagcttgaacaatagtctccttcacattaggttgattgaagagccttttatcaaacctaaagtttcccctgtactcttccttagtcttggttaatctgactaaaaccggcctatgatctgaacccctcttatccagaaattcctgattagaaattggaaaaaatctgaaccagttcttgttaccaaaacaccggtctaatctgctctgaatccacatctcatttgttttaccaccccaagtgaagggattaccaatgcttggcagttccaacatatcacagctatccaacatgtccgtgaaaggtagaaaggaagaatcaccccttcgtggaccgccacgcttctcaccattatgcagaatggcattaaagtcccctagcatacaccaaggttctttcctattaatcccaatccgagtgatcttctcccaaaccaaatgcttatcactaaaagccgggtttccataaacgcaggaaacataaaattcatgagaaccaaattggatttgaaaatcaataagattcttgtctgcatactttatcacaatgtcaactcctttcttccaaaacaaagccaatcctccactaaggccaatcgggttcacagtaaaaactctttcataccctaaccattcttgcaggtctactactacattactacaattcttggtttccattaagaacaaaacctcaggaaaatgagaaagtctcatctccatgagtctcggaatcgtcaagtcctgagaccatcctagtccttggcaattccagctaacaagactcattaggctttggacggtccctcatttgggaccaccaatttagggttgagcttgaagattttcgcagcgctcggacccatgtcaactgcctttctcttgtcttttgttccagaggtagaaccttcctttaggctatgatccacaaagatggaagatggatctttcagcttgagtttcctagcatgcttagggggtctgtttctttgctttacctttttccggatagtcccagtagagtctgactcaaagagaccagggctataaaccgttgaacttaccggaaagggctgagagagagcaaggaaacaccccacatctttagaagccaagctgttcactggttcagtaagccaatctcttgcatctttcgactgggtagactcctccagacgtaaggacgaattcaaattgagaccaccattgtggctggaagaatccccacgatcataatcaaaaacaacacctttctcccttaacatatcatgatgaacgattggcaatgcttccagctgaagaactgttttttgagtaaacggatccttttcagcatcccttacagacttaatcacctgatccactctaatagaccgttcttcatcattcgcaaccctcagatactgcctcattccctctaaaacttctggagctattcttggcctacccgtgtttgggtcaacaccaacttgactctccttcaaaaccccaaacagagggtctgattcttgaagcaccgacggtggaggagctttaggaatactgattccttgtcttctagcagaagctttatcttgtctttcttttatcagaatgggacacaagtctttttcgtgcgttagcctttgacattcatagcagcgcttctgaatcctttcgtaatgaaaacggacagtagctgtgtcgccattcttaaaattaatcactttggatctccttagaggacgagagacatcaaagagcacatttactctaacgaattcgtgaagctgcggctcaaccggattaaaaacgacctccttgacctccccgattagatctccaagctttgtaatcgctttctccgtatagtaattcactggaatattccatatctgaacccacacaagcatgaacctcaaataatcatcaggaggattttcgtaccatcgatccaccactatggaccaatcattgtaagtatggaccccttttgctaacacatcttctaaatcatgtttagaatcgaagataaactggaatctttcactggtgagagatatccctgttactcttccttctttttgccatttccgtggtatattgcgaatcaggtgtttcatcggttgacaactcgggttgagaaccctacctattagactgagcttattcctttcacacgataaaaattccggcaggtccggcatttcaaaaggctcgtctttctcttccagcgacatctccatcaaggccctatccattgcagacgacattgcgacgacagcaaaccaaaacaaggagaaccaacttcggagaccggaaaaccagaacgaaaccacaagaactcagtagaaacagcttgaaaatcgaacttgagagggttgaacagtgaaaaacggctgaggggaaagagaatttccagactgaagctctattctaaacctagtgaaagacactaagagagaaagagggttttaagcccaaaagagagatttcttgtccatagtgaatatagttacaaaataatataatgatacattataatatgacaaatcacaatttatatctttatgttgttcgatttgtgactacatatttgtgtttgaaaagtagtatgatatgttttattcactacaagaaagacaacatttaattcttttttgtttgaataacgtaactgaatcgaccactaaactatcatacacgttcttaaaaaatgatgttaagtttaatgtgatccccaagtgttgcaattgggttgagtaataaatagaagtggacaaatggttattcaattattttcctagctaaattcaagtatttttcaaaattattttgtttcaaattaaaacttaaaagtcataacaaattctattgagttttaaaaatgaccaacaaattgaaagtgtggttgttgcaaatgcaacttggtggagatacggtcagtgacagcctaacacgactccatcggttcgatcaaatacctcacgtaacccgccgattcactcgatcgtctttattattcttttccattttcaatcatattgagcctgattgataattacaagtctcattacaaacgtattagcaacggtatacagtcaatatccgtcactaaaaatgctaattgcaacgaaaagtattcttctttccctatgtaactataatgtgatatagaattagcccaaaaaaaattgtttatgattaattagatctaaaataaactatggtcgtcatgtgacgttgatcaaccgataaagagtagtctgaaatttactaataaaagtcttaatttgtactttttacgaattatagtttaaatggacacaaaagtaaatagattaaaaaaactagaaacacgtggaaatttacacaagcactatgcatgactgcctgcattccctccaagagttttcttaccctaatcagtaccggttcaagaaaatgaaggttctacaaattatcaattataagttcctaaagttcttttctttctgtgtgtcctagaagagcgatactaattgatttatacaatgtactaaccaacgtaaaaattgtgaatgatttagcctaaaaatgctatatgcaatttcttacgtctatttctcgtactgtcatctcatatacccagccttagtaacaatccaatctaagggccgaacaaagagttgcatcctacctactaaatttgggcctattcgaagctaagcttggcaggtcgattttagtaaaatatttttgaaaggttcccttaaaaaaagatatttgaggactacacaattagttaaatattaaaaaattaaatgtgagtccatagccatttttccaattaaaattgtactttttgttgtgtcaacgatatgaatttgttctttctcatagactcttaatcaagtaacataaatggaaaatacaaatatttacttttaatcaatgacatgaccggagatatcaaaatggatcaacgcaccactaaatgagttgatttataattgttcatgagttaaccactaacccatcaatttcttcattatcatcaacccaatataatcatcattatcgtcatacctgcatattcataacaacatcatcatatcaacatatcatagtcgtcattatattgccatcatcatcatcatttcataattttcagtgaaaaacttaaatccgtaactttttcacaaaaatcgtgaatataatttttttcaccaaaattgcaaatcctcaaacaacatgaacatatattttctcgcccaaaagtatatgttatgttgatagtgatgatgataatgttatgatcttaaaagtatgatgataatggtagtgttaatgatgatgaagatgcattgtcattatttttatgttaattattactttaatgcgtcaatctatttaatcatttaacccatcaaattaaatggggttttgggttaatccaacttagttgttaaatgaatcgcgttaactcatgaactctaaacccattaggtaatcaaccatgcctcttttgccgagaactagatgagtcatgggatcacttattcttcgtgcgccgatacacgttcacaatttggagcgacattgtcgggaatttgctagacgctcaacccgacccggattgggaacaaacattacaatagttcaataaaaacagagactagcttagccacatccttctccgtttagcattccaagcaacaatttactttttgtggagggagtgaaactaccggcggcatggagctactcaacgtatggtgactcaattgattagtataattgacaaaaacggtttgacgatgcgtagtttcacttcgctatcgagactctctgaatttgagactacttttccaaaaatggtttcaagctaggggaatcacataatcttgttttagttcttactctttttcttaaatagtttccatgcttttgttcataaactctctttctttttatcagataaatttaacatttcatgaaaacaaaaatgagtttagttgaattaagttatccattttcacacccctagatatataactatcatgaatattacaaagaaaaactaaaaattattaactattcatattaaaacatcttatatattaacaaaaaaaatctatcacaatatagaaattatagattattgttgtgataatcaattcattttctagatttaccctactaaagtttttctgaactgcgtatttatattaattaaaataatggtctcatatgtaatttcaacatttaagatattaaagatgctatagttttattatatatcattaaatgtatattattacaattctgatatataaaatataatacttcaatgaatattaatggtctaataaaatatttaccaaaaatataataaaaaacacgtgtcgcatggatctagtctaaacatagtaactattgtaaatcttttaaaaaacataaaaaaaaataaaaaataaagattttattattttaataaattttataactcataacaaaaataattaattcgcaaagatatggaagaagaagatgcaattattatatatgaaaataactgtacaaatatctataatgatctaaaattatgttaaaaaatacacgggtcgcatgggtataaaccttgaactactgtaaagctttgaacaaacacatacataaaagttgacaaaaaaaaaaaatttaaaaccacatacatttttttgtttttcttattttaagaaattttacagttaaaggtagaccataataagtttaacattaataaaaaatgtttaaattcacaaagatatggaaaagatgcaattatgatatatggaaataactatacaaagatctaggacgatccaaaatatattatagagatacactaaacatttgtcaataactaatatagagacctaaagtctccactatatatatgtatgtagttctaagttgtatcccatcccatattctaaggaaaacaaaacccttacttactttcttgttctctttctccgccgtggttatctatctcagacgttctcatcgctcatcttgacatcatggccgccgtagaaggacaaatctcggctctcatcagcaaacgtctccgtactctccgcaagaaatacaaccgtataactgacatggaagagtcgatttctcaggggaaaacactaaacaaggaacaagaagacaccctccgttcaaagccaatcgtctccgcccttatcgatgagctcgtaaagctccgcattcctcctccttctgcagccatttcagaagagaccagcccccctgctaagaacaagaaacagcaaaagttatcccacgtaattttctttagggttttagccgcatgcccgcatcgtattatagtaaaactaaacctaatattttccttcctaggcacgtaaggaggtagctgaggaggaaaacgtgacggccaagacagatatcgaggattgcaagatctctgatgatggtatcaattctgaggtttccaaggacgatacttctcctagtagcgaaagctcacaaggtgttacgccatcgccgcttagcagaaaggcacgacgtaaacggaacgcgaagaaacctcaaattccacagtgattgtgtctccaacttctgtgagtagcggaagttttggcaaagacaaagtaaaaggaattgcttttgtcacaattagctagggctttttgcgtttgagcttttccttgacaaaagctataaaactcttccaaatccattgtttaatttcttatatatcgaactatgtctctagttgtaaattcaaattgaatatcattaatattgttcttgagtcactattagctaatacaataatttgtttttaaaaatataattttctttcacgtcacaccaatttttggcatagaatgtcatgaagccagaaaaaactcttttttgaggacaatatcaacaatttgtagcactgttttttttaacccttttttaacgtcttaaaagaactaacgttttgtatctgaaaattttgcctaatctacgtgatcatatacaaatttcttctggtatgtgaatccctatgagatatcactaactctttatgtagttccttggtgaagcaatgatgcgatattttgttaattgaggttagttgcagagatgggtcatatttttaaagtcatatttttcaactaaaaaggtaaaaaaaaactcttttccttaagaaaaaaggtaaaaaatatctcttggaatcactttcagcagcttattataaaaaaagtagtattttttccaataacaatagatttgatttgagttttacaaattgttgattgaatattgtgaattattttaagtgattttacataaattccaagttcaataaaatagaattgagaatttgttttaaaaaatcaccagttgaataacatgtaattttaaaagacacctaaaatccccaaaaataaaaaatccaatacacccttacgctaattgactagtatacctctcttctctatttataccaattgttaaaccctagtttatatttgcagtcttgttgcttttttccgtacgttcatacaaaaaaatcacaaagataaacaaaacggtatgatgcttactgatcttccacttgatttagaatcggaaatcctctctagggttccggccacttctctacaaagactgaaaacgacttgcaaacgttggtacgctttattcagagatccaagattcgtcaagaaaaacttgggtaaagcagcaacgcatgtgatctttgataatcgtagtggttattcaatgacagatataaattctctgattcatagcatcaatctccgtggaatccaaaacagctttgatccatccattggggtcgacgttaaacttaacgttctaaaggatccaagacatgataagataagtcatattatctctcactgcgatggtttattattgtgcaagaccgaggactatggtagactcgtggtttggaacccttgcactggtcaaatcaagtggatccaagccaataatatgttaatggacgtttatgtgctaggatacgtaaacaacaacaaatcttgcaatagctacaaaatcttgaattttggcattcttccattaaacagttctcatgataataagtctaaaatctatgagttcaactctgattcatggagaattcttgaccacgtctctcccggttacttcgcaatatccaaagccatgactttgaagggaaatgcttattggtttgcttcagattggtatgcttcagataaagaaagaaaattcttacacaaatttgatttcagaagcgagagatttggacgtctatgtattcctattcagaaatattaggctgatcagactgtggctctatcggttgttagagaagagaaacttgccttgttacaacagtggtttgataaagattcgttaaagatgaatatatgggtgaccaaaactaagatcgatgaggacaaagacttgtcttggaccaacttcttggtagtggaatttggtaaagttatattaacaagagatgcgttgaattatatgagtttcttggttgacgaggaggataaaatggttgtgtgttctgatacaatgtgttctgatacaaggagtggcactaaaacgaggacccgaatttactttgctaaagaaggtatacaagttcatcaagagattgcacagaaaccaaaaaaatgtgggccatttctcgtcagttatgttccaagtttggttcaaattcagtcaggtaataaacagagtagctgaaaaatattcattgcctttttttttttaagtattatcctttacttttcaaatacgttgtttatgactgcttaatgaggtatctattctcttggcaacttttttttattaatacagtatgtgtaagcatatgaataccgaaagcaaaaagagtagaaagcaaatcagcgaaagtgcatatctcaactccctaaagttgtgacatattgtaattgtatctccaacacaaacacaaacatctgtgtatatgtaaccatatatgttcatgttgtttcatgaaattacatagactttcttttgttccagcatagtcgatattatcaggaaagtcatcgaggttatatgcattaggatcaagtacacaccaagtgttgggctgtcttgtcaaagacttgtccttgcctttacccgagaagtcaagcacatatttcggtctcccatcaaactctaagatcccccaatacctccggcgctatactcttggcatcctcatagacaaggctgaaaagttaaaaatccatgatcactcctttcctcgcaggcgttccatttccagacatagcatgctttaccatcccctgattgaatctctttgcactctttacattagcgttcttgtctccatccgtacgccatatatccgtaggctcgtttccaacagctatgtacttgatcttgatcttggattcatacataacacatgaaggaagttggctttaagaccaagcttcaacattgtacctctgtgccttctccaaagccttgagccgccgtgaagcaacctcctttgatcctcccgtctcttctgacacaatctcccctaaagccgacattacatcagatggcatttctgtcgacgagccagccacataaacgacagctccatcacataacaaatcccaaactttcttgctcatctcgcggagcttgtgttgcacgtaaaccttcttcggttggtctctagagaatgctgtgtaaaagccacctcccttttattcagagagcagtcctcctcctcttgcgtgagactcccagaaatcgcggtattgaaaatatgtgtctttgtttctgcaaccgaagaagacaatgaacaataagctacaatatgcgttttgcaggaataactatatacatgaagcgtacaacacaagcagcttcctcggcttctctccgattagagaaaacacagattctaatctccaattatctcttctatagttctatgcaaagaaacaagttaaaagactcttaagggaagaggagaagagagagagctcgaaagattctggagacttgatatgggcttgaagcccaaattataagttttatgagtttgggccggatcatgtgatattggaatataatagatacgacgtagttttgatatcatcgtctccaaaatctctctcttccttgaaatgtgaattttaaaaatcagcggaagttccggtaaagttcgatggcgcttaattctcgcaaatgttggatcttcattcttcgctccagccaactgctaaccaatcctccttctcctttcttccgttttcttctcttttcttcgattctctttttttcctcctctctcagattcgattctccgaccttcctcagttcaaaatgttcaacgtgaaggtaactttatcttcctccgatcgtttcggaattcaaattttatccatttcacacataataattctggaaatctggtgatcgtgtttcggaattgtattttatgtttcttcacattcctctgttcctcgttttagagaatgttaacaaaaaattgcgatcgatttttggatgatttgtttcgtttattccaaatttatgtctctatgatctttcgaagtgatggaatttgcaactttattttatgatcatagatgcgattttttatttggaattcggttgttgttgtttgatgattaattttttttttgccttaaggttttggttttaacgtgacaaaattaatgtgacgattctggtgatgatacttataaaaaaatatgaacacaattgatctttccaggtcctacacgtgaagttttgagctggctgttttagcttttgtgctgtttggccataattgatgcagccttttttagaaacatagtaagtgtcttcttcttttttatatgaaaaatgccacatgaaggtatggtttggtgtatatagaaattcaattttcttgtgtgctatgtctaatgtttgattctgatgaataatttattccttcaatgttttcaggtacaaatatattatttttgattcttgattgttttggcttactttggtggatgttgtgtgatcatcgttcaaggcttctttcttctattatgcgccttgattcatctcacaaaacgcggaaccagcagctgtttgagagaggttaattatgtcagatagatgggctcgacaaaacgcggaacgtcctgcaactactttggctgagagaagaaatgtgaataaaaacgtttcacttcagactggtgaagagttttcaatggagtttcttaaggatcatactcctgtccaatctcctatcgttgcaggaagaactcataatgatgtgcatagatttggagacctttactatcagaatcaaccacaggggtatgatagtgctgctcggtttcatgaactgaggaggatagaatctgaatgtccttctgatgcatatgattttggtcgagacccgaggagtactatacggcttgagaatggcggttatatgcctcattttaatgcttaccacaatgtaggttgtgataaagaagttattactaggaaagcttttggtgaaataaattctaaccgaggagatgtcacggggatgtctgcgccttgcgtgttcttgccagagcgtactcagtccaacaactttaccggaggaggaggagattttgatagattcggaaaagtaaagtttctttgtagctttggtggtagaattatgccaagatccactgatgaaaaactgaaatacgttggaggagagacgcatattatttcgatacgcaagaatctttcgtgggaagaactcaagaagaagacctcagctatatgccaacagttgcattcaattaagtatcagcttccaggagatgagcttgactccttgatatcagtatcttcggatgaggatcttcagaatatgattgaagagtacaatggacttgaaaggcttgaaggttcacaacggccacgactgttcttgattcctattggagagcctgaaagaaaggctcagcagaacattcctgattgccaatatgctgcagctttaaattgtaatgctgatcctaatcctaggaacatttctgatggtcagactttggctggtgattcacgttatcatataaacaatttggatcgtaatccaagtttctgtaaacgaacaccgggtcagatgcttcgactggatgctactgctatgcgtcctaatccacttttcaatggagttcagtataacatggcttcatatccatcacctcctgtttctccttcaccattccagcaaagggattcaaatggtgcatactcacagttccatggcaacaactccagctcggagagcaataattccttcactccagctcaacaagacacgtctatcttcgaggtgattgattccaaatatcatcaacagcgaccactaccttcagttaactatcagtctaacaagcaggaggcagagaacctatatgggattcagttccagaatggctttaatgacaaacctgtgactcccaatcttggtcatgttgataatctttgctttaaccctgagaggtctgcgaataacggaagggtcttctatgataaagtgagcatgcccgaggaatctaaggtttccttctctgggtctacaaactcaaatgattcttgcttgggaatcccacactcgtactcagactctacattggagattactggtggacactctagctacttttcacaagagagacaacaaagcccatcttcaacattgaactttacaaagaaacaaacacaagaaaagcaagtacaggtgcataggaataacgatctagctgaccgtcgtacacaaagcgatatactcgacatgaagtccactgagggaggagagactatgtttaaattttccccaagtccacgaggacctagactatccggtgaaaacaagacgttgcatatagacatttctgctgcaggcaatcattatgatgaaatttatctaaatcaggaaaccaagaatcaaggagggaatagtgataccatttttcatctaggagggaaagtactgggaacaagagcaatgcctactgacatggaaggcaagaagttgcctatatatggaaaccaaacctcagttgttgttgatccatggaagcaaataaagcaagataatgagcgtttgatggctggagctggaacttcatctgctaatctaatttccttagaggaaggtatagcagctaatacccctaatgaggaacctgaatctcgtgctgcccgagaaaggaacttggaagtttcagggatctttataagtaagagagtagtctctgatgagaatttcttgttcagcatcgcctctgaatcaccaaacagcaagattgttcatgagacacaaaagaatgtgagtattacaaaatgcactttaaacaggattgtcctctattaacttctaacagtaataattattcaactaacctgcagagaacagaaagagaaggtggtttaggccatgtgagaatcccaatcatggatttgaatcagccagcgccagcaacagcgagtgaaacttacagtttgaagacaccaagagaagactcaccacaaagcattccacatgcaaagattaccagcggtgatacaatattcctttctgaggtagtgatttacttgtttgc

SEQ ID NO: 67 - DNA, 78535 bp, Arabidopsis thaliana
aagcttataatctatgttaatataggatctttcttctcattattgtcacttgtcgacaggaagctgaagccaataccggccagaaagagaacagtttcaaagacacactctttgttgaaatggaagccagtgtttatggcttgcaggtacttggcaaatttgagtaatgctatttgaccaacgcttctgttgcttcttctttaaacaggacttcatgcagaaaccgatacccttgtttgacatgcttcagaattttgaaatttactcatcctaaaccttcagataataaagaacgctgatcttgaagacctgacagaactgggatccgggacatatggaactgtctatcatggaacatggcggggaacggatgttgctataaagagaatacggaacagttgctttgcagggagatcatctgaacaagaacgcttggttagtcctcaaatcttttgtttcttagatctatcttcttgatactgttttggtatgaagtacacaatatgaggtattctccttcgcagcacattctttgttttaactgtattgctttatcagacgaaagatttctggagggaagcacaaatactctcaaatcttcatcacccaaacgttgttgcattctacggtatagtgcctgatggaactggaggaaccttggcaactgttacagagttcatggtgaatgggtcactcaggcatgctcttctcaaaaaggacaggttacttaacctatcactgcatttttgtatttcccttagcgttcaggatctgaaagagatttaacacaccagaatgccaacgcagattgcttgacactcggaaaaagataataattgcaatggatgctgcttttggcatggagtatttgcactcgaagaacatcgtccactttgatctcaaatgcgaaaacttacttgtcaatttaagggatccacaacggcctatatgcaaggtaacatatatattgatgaagatcgttttcccctatagactgagaatcctgagaaactgctacttaagtatgaaactctgatttctacaggtgggagatcttggcttatctagaatcaaacgtaacactttagtatctgggggagtgagaggaactcttccatggatggccccagaactcttgaacggaagcagcacccgagtttctgagaaagtaaactaatccaaccactatcctattagtttcactaacaacacaactcacatttgttttcgatctgaacaggttgatgttttttcatatggaatctcgctgtgggagattctaaccggagaggaaccctatgcagatatgcattgtggagcaatcattggtaagtcaaaaaccatcactcacaatttcacttacctcaaaacaaaagccactctatgctcatttatttcctctttttaaggcgggatcgtgaagaacacacttcgacctcctataccaaaaagctgttctccggaatggaaaaagctgatggaacaatgctggtctgtcgacccggattctcgtcctccattcaccgaaataacatgccgacttcggtccatgtcaatggaagtcgtcactaaaagcaaaagaagagaaaataaaccctgacttcaaaacttcagaaatcaagaaaacgacgggtcagttcatcgacattttcacatctatcgaaaaatctgcatatttattctcattcttcaactttgtacaaaaacataactgtaaatctcaaaatgtcaaatgtaaatattattgccaacacagaagatgagaaacagattttgcattgtaagcacaacaaactttagtgtctacacatccttgtacacgagctggtactttggtatcctctctggcggtattggacattgaacaatcatcttccctttcattgctcctcgatatatagcctatacataacacaataacaaaaacagagtatttaaattagtaacaactctttaaaagcttttaggaattaatgaaattgaattgttcttgttacctcaacaacatcaataaagtcttgttttatatgaaatgcaccaacccatttagtatgatccgcagttctacaatataaccaaaccggaattaacataaaccaacctaaaccggctttaatcagctactagaacaagagattaattaattacccagaatccaatttcatatgatgcgcattgaagaagaagatcgtcgaaggaaacaacgtgatatcaaaatacttcacatacacttgaacatcctctgaatcaacatcaaccaaagctaccttagcaaatttcgaaacatctctcaccgatttcgcaagctgaaaagaaaaattcgaaaactttaggggttttgattaatcgaaattagagaaatcgaattcaaagagagacgaattgaatacgatttcatcatgctgaagacaaacggcgtcggaggaacgaccaaatcgtaaaacaagaacttcatcaatggtgtctctgataacccgatcaatctcttccttcgtcgttaacgtcttcagaagataactcatctcggcgtaagaattatacgacatcgtttagataatataactaaagagacataaaataaaatatacgacgtcgtttgataataatataatacagtaactaaaacagacggaaaatatacgacgtcgttttttggtaataatataataactaaaagagacacagattaagcgacgtcgtttgtggtaataatataataactaaagagacgcaagtgcaaatgtttttgtgataaaaaccataaaaataaaaataagtggagaaatcaaaatcatcgattctcctttgtttcgcctaacccaattcctaaatctcagcatctttcatcaatccaatctctcaaataagcgagagagaaacaaagattatcgaatccttggagacgaaaacatactccaatttgtaattttctcgtctttttttttacctgattttgttatacgtttgatcgaaatcatttgctctgatggatctctgttttgttaacccttttgagatttggtagatatggttttgaggattgatatatttgccgctgattgtcgttgaaaaattgtgaaatttgatttggtggtttagggttaaaatgaaattatatgatgaggaatataagaatctgatttttttttattagattctccagatgttcttgttacttgtgattgaaactttgattttgggttgttgttgtttttgaactttggggattttaaagttgaatttttttctaatttatgccaaaacggtcttcttctatggttttgtattgaactgatgatttagatttgtttaaatctcggcttttgtatattgtagtggaagattgaattttttatttcttgtcattggttataggttttagtttattatgatgatgccactagttgcatgattactaacttgacagtggtttatatgaacatatgtgataattttcttaagtttgattcctacttctcttttgggattgttgtgcaggttttaggacatttgggttaccctgaggcttaaggagaatagtggtttagttatttatactgaattttgtgtcattcagactttccgaggattttctgtttggtaccgtttgcctcgtctgtgttttcatttgagctgcatcttaaagtgaaagttcagtgcttaaacagtaataaagtagtatttcaacaggctgctaataagattgctccctttcggtaagtttgttttcagccaactatctctctttgtgaagttaacaatccgttgcttcttgtgatggttaagattcctctggtatgcttagtttctgtgctagtttctagactatgatgagtcagtataagatatctatttcttctgtttttggtgtatcttcatttgttcttgctttggttctgctgctacatgattgttttgaagttttgatattaagcgatggttttggtcttgcaatgttccctttttggcaaaaaagtagtatttataaacctcattcagtgtttctaactttctcgatgcgtgagtagcttacacagtgcttaacaagatggctggtgtaaagcgaaaattaagtaccgagtcagatgttcatgctcttcacaaagaactggatgaggtttcatgtcctgtttgcatggatcacccacataatgctgttctactgctgtgcagctctcatgacaaaggttgcaggtcctacatctgtgataccagttaccgacattccaattgccttgaccggtttaagaaattgcattctgaatccgcaaatgaccctactcccgaggcgaacttggcttcaagggaacataataacgaatctctatacgagcatggtacagccagtcgaagcagttttcaccgtgagtctggaaaccgaggctcttcttgggattccgaatcactgaggaggaggaggagagttgaggaagaagttgagtcagaagatatcacaaatttgaaatgtcctctatgccggggtactgttttaggatggaaggttgtagaagaagtaagaacgtatcttgatcataagaaccgaagttgctcccgagaatcctgctcatttactggcaactaccaggatctgcgccgccatgccaggaggactcacccaacaactcgtccttcagacactgatccatcaagagagagagcttggaggcggcttgagaaccagagggagtatggagatatagtcagtgcaatccgttctgccatgcccggtgctgttgtagtaggagattatgttatagaaaacggagataggtttgcaggtgagagggaaacgggaaatggtgggagcgacctttggaccactttactattgtttcagatgattggctctcttgacaatggaggttctagcgctagtgggagtggtggtggatcaagatcccacaggtcaagggcatggaggaatcatcggcgttcatcttcagataggccgtacctttggggggagaatctattgggtctacaagatgagcgcaataacaacgatgatgaagagtttcgtttgcagaatgatgcaggcggtgcttctactcctgttccaagaagaagaaggagatttggacgtcctagatcaagcggaaatcatccgcgataagctgaagcgtcccggtaaaaattcgatataaatcattgggtttttggttgtagaaaaacctttgcgattactgaaactggttttgtctttaggtgatatcgatatctctcgggtcagaaccaggccgatgcaaagggaaaggttttactaaaaacccgagaggcttaggattgtttggttttatgtaaatgtcattttgagccttggctcattgtatactactaagtatggcttcttatgcaatgtcttttgttacttaactcgtggattattttcttttgcgttgtgatgaagtttgttatttaggaaatcgaccacgtataaatattttatctaaaaatggacaatgtaattattttgttgaagctctttttggtccaacgtttgacaaagatttagtgcttgtttttactgttttccaatgttttcaagtgctcgctctaaggagtgtatgataacacgtgtcaaataaaacagccacgatattactcagatgtcataattgtaacttgggaccatcaaaaccatagcctataattgtacttgaaccatgtagaggattgagatgaggccacgtttgataaatgacatgcgggcatgaagaataacacgttcgatctcgcagagctcgacgatggcattggaataaatgacaaggtagattatcttctattcataaactatagtctatagtagtatggatccagaaaagtagaaaaatgaactgtggtttataaatggtgtataaaaagcagtccaatccttaaacggatttgtccactccaaccgccgcaattattcaaactcttagagtgttaaagcataattcggaaacaattaacaaaaaaatcatatcacatcgagtctatcttaaaatatattcgatcttaaataggggttaatttcaaaaggtgtttgctttagatacaagttgtatatattggtctatttagttatcattaacttttcatgatcgttaattctgtaattattattttttgttttgtggattctttagtaattagtactaatatccatgtgactcttccatgttctcctatacccttcacaatatatatatatattccaataactcttgattaagtagaccacatccggtcattttgtgagtaaaccatttttgttttgattacacattcgtaagacgaaatgtcatttgttcctcaattctttctcatgaccaaaacgtcaattacaagagaagtaataagaaaattttctccctagtctctttattattcatatcttattgttataaaataaaacacatatatattacacatatcttattgttatgttaacttttcttatttcggttttgattctttttgatatgttaactttttcgttatgttaacattgattgccagatcgtggagacaaggaaatgaggtcttgtatatacaaattaacaggtttccctaagaaccttgttaagaagacacaagaaaaaaagatagagaaaacaagttttggtgtggtgaataaacaatatggagtaccttcttccgatgatactcgtagtttccgtactgttaggcgttgtgtttgtctcacttattgttattgtttggatttactttgcccgcaagcaagcacgagataactccaatttttttgatgtcccaccgatatagttatttcgccatttaacaattatgttatttttttggttttgttctttagatttgatggtattgtaaccctcttcaatgttttatcaacttttatcatcctgttctgaaatctatagatttgtttgttacttctcaatcactgtatcacatcacgcaacaaaaccgttcaacaaacttgaagaaacagcctttgccaaaagaaaatcttcatatatgtatgtattagatgcgtcataactagtctttctactacacgccattgagactcatgtttggttaaaaaaatgtagtgatgccttaaaatatcttctccttagaatgtatgtttctcatgtcccatcacagactatcatttgcacatggtacattatctccttatgtgcttaataaactctgaatttcgctcgatacactaatgcgggagatggctcctcgcggctcgccactcgccagagccggcctagagtataaatgtgccgcaagccaaaaaagtgggctctgctcctcgtatgatctctcacgtatccaaatcattatgccaagctagctagtacacgttaactgaaatttatccccaaagtaacttgagtaacaactagacctagtagcgcagaatgaccttacacatgtactcatgctttaaatggtccggcgatttttaattttaaaaaaaaaaaatatagcttgaaggaccatatgaaattaaatgacataacttacaagtgtgtggcagcgagtaatggcaacaaagccttgaaacaaagtgacatctactgagctaaaaaccacaacccaaagaaacatatgtatgtataaaaaccaactttgatacaatcccacgttgtgtttccatataaactcaaaaatagattgagtcaaacaaattatttaaacacttatatatcttctttagtttcccaagtcatctcttgtcttcatcttctgttccaaagtctctaatcatttgtgtaagggagaattttgtttgactaagcgaataatcacacaagctctattactatattataccaaaaaagcatcttcggccagaacatggaggttagtcatcgtcacatgtgctccatatcatttacatgtgtccataacataaggactatatttataagagtttaatctttgtgagttttgaccagatctttcaatggctcttcaagttagggagatcagagcctagttccatcaattgtactgatcatgaacccaccacaactctaacaagtaagtaacaaaaacatttcttgatccttagatcacaatgtacaacactacatactttacttatcataatatatattctggtgagtttatgtagatttcatatgttggtaattttaataaacaagtcgttggctaatcaataagaaatatatagtaaacattttgttttctgatagaattatttaataaatgtgatccagattgtaaagatcacagaacaagaagatcatctacaagaggttctaaacataaagaccaaaggagctatagaggaatctggttatggtgtagaaaagacgtagccaaggcttgtttctctagcacttttactttaagaagacttaatagctttaggagagggcatttgcttcgctccatggcaaagataaaagcgcaaggaggagaagaacaagtgacatcgacaaggtttgatctgaaaaaggctataagagtcttgcaaccggagaaacaagacgataccaataaagagaagtcgaaaagcgagcagagcaaaggtaaggccacactttcaagaatgaaggagcttatcaaatgggctgcagcagccaaatccgacaaagctgtcaaattctttacccctaaggtgttttttttttctttctcaatagctcaaactcattagaaaactcaattttgttataccattgttattgatgaaacatatataatattgtagataatgatggagttgaaaaaccgaagaaagttgaagatgatgagagaagtcaatgaagaagaatcaacaaaaaggatgagtagtgtatctgcaaatataagtttgagatgggagagtagtgagagttgcacaacaaactcttcctctgatcacatctctatagtttcttcaccaggaatccttgtttccttgagtcctacgccactctaccgatgtagatccaggaaatgcaactggatcactactgattctgaatgtaagtaagaccaatattattttgaattttcctacaaatttccttttacacaaaccaatatttttataattttttactcacggtaattaatttcaaaatctgatcggcaataatgaatatattgcgtatctttacttatggcagtactaataaaattattgttcgttgttagtgtttattttctatgtatctgtctgatttatttttatgtatcttggattctgtagttgtggtgttagagttagagttatgaagagaagataggagtggtggtctggtggatgaagacaacgacaaggaccaagtgattctcatcgctagaatttttttgaaagagttaatttgagtaaaaattcattggcatttgtaattaatttataaccattgttttcggtgatttcaattttcttttgtacttttatgtaatattatgatgaaacttacagaattacatttttttagctcttaacttactagtaaaatgaggtaacgttacgtaagctaaacaacatggcaaatatcgaaaactaaaccatctaggattttaattattgttattgatggtcttttatttttcagattggttggggatgtttagaattatttttcattctttcagtccaaaatagaatagtaaattttgtttgactttaatcataaaacggttaaagtcgtgttattgggtcgtatggtttgggacatatatatcagaccaccacacctatcttctcttcatggtatgtgtaggattggtttcggcagaaccagaatagttcggattttgaaaatgaggattaaccgagtatcgagactaggtttaaaatttgatgcttagaacttcctgcgtagaattaaaaatttgcttaaatttctaaaagattgggagttagaattctttacgaaaataaatcgtttaacggtaaacgaaggaaattatccggttcgatgattctaaagagaactctaaatttagttgaatggaacggacgaacggttagtctttaccacacaacgtgaatggttttggtagatcacgttatgttagtatctaaacaatgtttaaccggttttggaaattaaccggttttgccattcctaaaaattctaaactcttctagagtattttcccactggtttatgtgagagtgaccagaaaaaactcacaattttcaaaacccgacgggaaaaaaaattatggagcgtaatcgtattgcatgatagacttgaaatggaatgcagatctagattttgtagtggacttcatcatgagctatgtataagtccattcaaaaagcccaaaacacctcaccttgtgtgtttagaagacaaagagaaaaattgtaacatctcatgcatttaaatgatttcgcatacacgttactggtacttaccattcaaagatagagagacattcattacattgtgaatctctaactaaattagtcagatatttcaacacaaatctgtcagctcgatttattatgtaaaccctcacccccttctccatcgttcccgcccacaattaaattgacattgcggtggttcatctaatctgttagtccatagcatgtacattacgtttaatatcactagagaagatttctaaaacaaattacacattcttcattaattcagtactcaaaaatacaactgaatagcacgaaaagatactttaaaatctactgttataaaatgatcattgagtagctatgtttagtcgtgtagttagtttgtgctagagtattcatatgtatggattattatgtaaggttatgagatgctacaatgaaaccctccagacattaatatcttggcttctccttcaaccacctcgtggagagatcttcaaccaacgccagtggacccattggaacttttgattcaaccctctctattttttttcctaaaaatagagatacatataactttaaaaaaattgaaagtatttcctaaatatagaaaatacaatgattcaagtaagcgatattaaaaaaatgtttttgggactactacattgtcaaaatttattagattttaatcatcatgaaaataactattcaattcttcaataaaactcaaactcaaataaacaattcaaaataaatattaacaaaaaaaattcacaaaaaaaataaagattaacaaaaaaatgaatacagatttacttattttttgcaaaattttcaaaatatcaaaacaatcatagaaaaaacttaaaatgttatatatctgaataaatttctccccaaaagttttgtatagttttttctgcaaacaaaaaaatattttagtcattaatttctttcaactttaccttacatcacatcttcagaaaatgcatatcaattttaggaagtcaaaaagaatagtaatacgtaatataaccatttttaactctatcacttaaaaatttaacggtaacatatattagatttttaaaattctaaaaatagcctgattaaaagtatacattgcaaagagttcgatttgataaattttacaaacttgaccgtaagagattatattgcgcattacttttattttaagaaattaagaaatgaaggataaaattataaaaatataatgatttttctatttttatttttgcagaaaacatttttgtaacaactttgtaattatagatcataatactaataaagttaaaaaaaaaacatttccaaaaatatcgcaaattcccggtcacacattctccatcattgcacttttcacgctctctctgtcttccttcttcttcttcttcaacaatcttcaaagcaaaagatcaacaacaaaaaaatgtcagacaacaatccagaaatcgaatcatcaaccttcaacaatctaaacatcgacgtcacagaatcaatcctctatcatctcccaatcccttccttagtccgtttcactctcgtctccaaacaatggcgttcactcatcacctctcttcctccttctccttctccttctccatcatcaccaccatggctcttcctcttcggtatccacaacacttcctctttccacaaccaatccttcgctttcgatcctctctccaacacctggctccgtctccctccttcctcctcttcctccgatcatctcgtcggatctaatcgcttcctcttcaccaccgctcctcgcttctccttctcaccaatccttaaacctaattggcgattcacttcccctgttcgatttcctcgaatcaatcctctcttaaccgttttcacaactctatctaactcatccaaactaatcctcgtcggtggatcttcgcgtatcggcggattagtcgatatcgaagaacgattagctgttcaaatctacgatcctgttctcgattcatgggagctttgttcaccactccctgctgatttcagatctggtcaggatcatcaaactttgacctcagctttgtttaagagaagattctatgttttcgataactattcgtgttttatctcgtcgttttgcttggattcatatacatggagtgatgttcaaactcttaaaccaccaggactctcgtttgcttacttgaattcttgtaatggtatgcttgttcttggtggaatgtgtgggttctcgtttaatctttggagtattgaagaaggctcgatggaatttagcgaaatcgcggttatgcctgaggatttgttgtttggattagttgatagtgatgatgaggatgacaagtttaggagtttgaaatgtgctggctctgggaatcttgtttatgtgtttaatgatgattgtcataagaaatttccagcttgtgtttgtgagattggtggtggtgagaatgggatatgtagttggagaagagttccttgtttgccttctccggttaataagtttcataaagttgttagtttctgctcaacggtgtctattaccgatgttttccaccccgaggaagctcggattggcggttcgatccgtggttgagtttgcttaggtatgttcctggtatgatcatccacacccttatctttcattataattgcgctttcactagtattagatgagattgtcttcttgcattggctttgttgttttggttatggtaaaacgacaatcaacattctgcgttagtttcatgagaatccattacttatccatgggtacacaatctcttgtgccaaaataggcaaagattgaatattgataggttttacattcaaacaagaacgtagctatagcttagtgttcttgatacggtttctgtgtacttatgtctttgcattttgtgacttggcagtgctaatgtaaagtggagatgaagggagaagatttaataatgaagtgtataaaaatggttatcaatttattatggtaatcatgtaattagacgtaaactggtttataattcttcgttgtatgaatcatttacatacatacacatatctacagaatcattaagtattgttgtttgtttataaatgagtgtgttttcacaatctcttataccaaagcaagctaacatttatacgttctaatgaattctattaagtattgttgttattttttggtgaacatataatgaaaatgttgatcagcaatcgtgcttcttaacaagactcccatctttgaccaaagcctttggatgttgatcgcaatcgtgccagagttaacttccagaggatatacattgtttggtttcttcattgtttttaaagccgatttaggctttcatagagattagggttaatgcaagaggtagaagagatgagtttagggacctaataaaacttactctcattcatgttttttctcacaccaaaaggtgtgtcgtttatagagattttataatcagaattcatcattgttaccaaaaatcagaagaatttttatgatcaagaatatatattcttgttaaacaaaaaccagccaacattattccactgggttcataggaaaaagaaccgaaaaagaaccgatatttagaacattggtttggtgcattcctgaagcctactccaactaaagaactagataccttgttggattttaatgaaacttggaacataactgaggagaaataggttatgagattcgtatggagcaacatcatgattcacttctatatatttatcctctcccacgatgtgtatggtgttggaaaagaaagagttacaatacactactctgttctcctggtcgatcaagaaactgatcatcccaaaacaacgacgatagtagataccgcttctcgttactgttaggaactttgcccatgacaaggctccggtactctgaatcttagttgctatccatacatgtatatctagttaacatacaaagttgttgctcttctctagtcactgataaaaccaaataatgataatgagtattagcatcctccgaaagagacaaacattggaatgtctcacttgtgtaatcaaaacatagtaaaaaagaacgcccatgttcttcatcaaaccagtaagtatttcccttcatagacatgccacttctggtctgaatcagtggtatgaaccagccggtttcacaccaacaaccctccacgaattagaggtaaaatcatagacttcgtacttatatccagattggaattcatcgtttaatggatacattctcaagattgtataacaggaagatttgttattgtaaccaagagcaaaaaatttgattgccgtgtaacactttccgggttggatcctcatccacctggtttcacgtgaaagcggattccaaacaacaagtctattgtcattggtaccacatagcaatagcatatgttttcaatcgttaagctatcactagaacaattcagtagtaacacttttaccatttcttcttcttttaaaaaaaaaatatatatatttttgcatttttggtcaaaacattacttgaaaagttgcctacaagactaaccaatcatgcaaagcttttcacaaagataaagcatcaaagggtgaaaaaaaggttgtccatctttttaatttcccattcatccatttgcgcatgataccaaaatttgtgtttctaaccttatcccaaacatgaaatattcaaccatggacgttttgtttcttacttacagtcttcttttctaaatgatttacttcataaaaaaaaatggtatatagatcttatgttacgtcaaagccaacattattatctatccagcttaattttttttttaacagcatttaattgtattttttgctgatgaagcatcattgtcaagaataaaggcaggactccataatctagaaaaaaacatcgttgcaaactattctcaatttttatttttttttttaaatttcataaaaaaactactttctgtttcatatcacatgccatcattgtaaaataattgtgatgaaatggttttggtttggtttggttggagtgtagtggaagactacgggaccccatattttccctaacatttttgaaattgactggtgaaagctacactacaaagtatataaaatatgtccttttattgacgacaaaagtaatgtccttcagtgtagagaaaaactttatctttgcttctgtaatttcattttacgactatatatctctcctccttaatagttcaattaattaattaaaatttccttaaatttaatttttttaagtaacatctttgtggtttctgtgatattatatagttgaaatgtcttcttgggagtcatccgatatggccctgaagatttttgagtgtggacgattttttcaaagtgccaaatcaaacaactttaaagtgacttgattgaatgattgtaatgaaaattggtgaacagaagaaaatatctttcaaaattaaatggaagatacatggtggaaataaataggcgtaaagctttggaggtcaaagtaaaaataaaagcatagataaaaaaagaaaagtaaagataaaaagtttgtctaaaaatgagagatcacgatatgggaccaatctttaagctcttcatgcctttcgctaaatgttgaagcaaatatgacttatcgatatcacccatttggtggcctgactatacaacaatctttacatacgtgcacgcttgcaaacacataatcctaattaactatataagtatataactataagtgaaaagatatatatcgatcgtcatccattcttacaaattacaatgacatattacactaacgatagtttgaaaccacaaatttatatcataacctagaaaacgttgtattctagctacgacgtaaccaccaaatttctcttaaatcttattctcttacagaaataaatatatatcttcttatattattatgtcaaaaataatctaataatgcttataaaaaaaatatctttattatgattatttcttgttttaaaccattttgtacataccatcaacgttactttgattaaaaaatgaaactcgtgctctcatatgttccataatcaaatatgaagctcgaaataattaactgtacttttttgtatgtggaaataacgaaaagatggtatacatgagattagtctaattgagcgagcctatacaaagatggggcacaactgcacaagacatatggatgatccttgagcagatgaggggcacgaatttgattgtctctagtacaaaagactttccctcatcaactgagaagataccaatatacaccgtatactcaaatggccggtatatatatatatatatatataaggttttatttttgttaaacaaaaaattaactaacgatgttaatacttaataggagcatagttcaagaccgaagctttatttgctaaaatggttatatattggtatctgagtatacagtgtatactggtatctcagttgtcaatgtgaatgactgaatggcataacaacaacaattatcaagtaataaaatgtggaaaaaaaaacaaaaacaacaagtaagaaaatataataaataaatatatatataacaaacaaaaggaggcatcaaatgacgaaaatgaccacgacgtacaatcgttctcgttgatatcattccaagaaagtgagggaccccatgcaatccacgtaacggagacatgcacagtctcttctcttcggtaatcgaatattattgttttgtctaccaaatcgaatattatattgttcattttagtgatagaacgaaagaaatcaccggattgcttcttccatacactaatgtgcatcaccgctctttttcagactcatatatacgtgaatattatatgttttcatgtgatgtatgagaatacacttttaccaaaatgtacagtgtacacaatacaaatctatgtatatatgattctttactttttaaaacagcatacatgtgtatatatgtaatatgttatgtaagtcgtaacagtgtaacaccatgcaaaaaagtcattagactaattaattaaggatccattttgtttctatccatcagaaaaactgtgatatagaccaaataatatatcgggttttattacttcaatattacttttttctattttgaaaaccaaagattgttttattctcctatattactgtcgtcatttttttcttattgtgtcaattcattacatcctaatttcggcggtttttcccagacatacccgaagtctatatatgtagcactctccataatttgatgtggcattcattgaagtaataaattcaggtatatcatagtataatcaaaccggccggtatatcatttgacttccatacacaatgagcaaataagcatttttcctctttgactagtatttgatacacgttaatatgcaattggtgtttgtcaccttagtcaaacaaatattttcttgtaaaaaagagaatatgaaaagaaatggaaaattaaagagaaaagtaagcaagaaccctgctttcttccacctcccctcctttgatttattttatcacctttgctttttgtctaagcttttaagattcgttgataatcgtataatgacccaattaccattacatgctttgttctttccattgagattgttcgttccacagtggcatgcctaccgacaattccaagtcttttcaggggctaagtagtaactctattccaaagaaaattaggaaattgttttgtcacgcgttattcaaaccctagtctgaatgcactatatatgtccattctctccaggcgatgcttgcataaaagggtacttttggtaattttataacttgtgacttttttttgtatacacatctttaacatacgttgttttgtttactttattaatcaaattaacgagtgtgaaaaattgaaaacctctctctttctcattttccctttttttctctttatctcaagctcattcttcttcttaataactagatctctctttctttcttcttatttttctcttctcttctttagtttcgcttatctcgcggctctgaccagctctcaagttgttcgtttctggttaatggatattgaaccctcttgggatcttgggggggtggttatttccttttcgaaattgcatggcaacatcaaatgaccaaaccaatactaaatcatcacattctcgtactcttctccttctcttcatcttcttatccctccttctcttcagtagccttacaatccccatgactcgtcatcagtccacatctatggttgctcccttcaagagggttctcctcgaatcttcagttccagcttcatcaacaatggatctacgtccaaaggctagcacacgacgcagccgcacttctagaaggagagagtttggaaatgatgctcatgaggttcctagtggtccaaaccctatttccaactaggtgagttggcacatctggttttttaccggtgagtttgaaagataagttattatagatcaatattatatgtatatttgagaagcttctgatcgatggagatcagagagaagcttcattattatggactttttttggatatgaattatcaagaatttggtatatatttctttggatcgatcaatttggtaccattccatctccttaaaatcttttgttcgttctaatattgttttctccatctattaagttttgaagttagaagtgtaaagaagagatatatactctttatttattcacatgtgactgtgtgtatatgtagccacctctgcatttccttcacaaagtatttgggatatagaatcttttataattgttagatttgtctaatgattgtttaattattggtataaaatgtagaccattaattaattaaccaaaatactctatttgtaactaagtgaataacattgaagatctcgaggcatttcacaaataattgttcgatctagttttgtccggtcaaaattgtctcctttctgaatataattttgaaaagaaaatgcaaaccagctatatccgatatcaattatctaaagtagttttcttttctaccggaaaaagtagtaattatctttaaataatataattcatgttacaatgtaccctctaatatattcatacccaaccataggttatacgattcgacacacatttgagaagactgcaatttaatttctatctatgaattgttttttcactattaatcaaactatatcagaaaaatatggataagctttttctttcgttgggttgaacgatcgacaagagactgtaggggagaagaaagaaaattattagacaagaatcgcttcctcacatagctttttgtcttatcaaagcatagtgtcgtagaaaaacccaaaagctaaataagaaaaagtgatgatttgataataataatcgtatcatttccttgttgttgaattatatgccatcaatcatttgctttatgatgttccacttttcttctctttctttctttattcgtgtatattgtatttttgttataacggccttggttttcttatgtatatttggtttctgtatatctctacaagctacaattttgattgaatatcaaacactaccgtctgtactatcgtcgatctgtttttgaaatttacaaaataaaataaaatatattagcttgataaagaaatgaactgatcgtacatatatcgaagtaatacgatcacaacttgttacatttagagaatatatgattttcaacgcttcgggagcgtatatgcacaacaatgccacaaaagagaagaggtggtgcttggaatcgttacgagcgataagcgagtgaacttagccaagttgattttttatttttaaaatgtcaataaaataaatacagtaaggtttgaggctatccgcgcaagctctggtcaagatactataaaaaaaaaagaacatcatgaattactacaaaatttcttacttggttgcttgttacttgttagtgccggtcttgtaggttgtatgcttgctctaattaattaaccttcagacaatctttttcacggcgtaattcggaattgggtttgaacttttttaaccatgtaagaacattattattggtagtatcaatgacacgtggcaagcttaaaagaaacttgatttaagctgatgtagtcaactttaaaagctccaaattgttccttttattagttacagattataaaatatttttctccttactttttaatttgaatttaatttatgttaataattatttaaaatattattagtgaaccaaaaaaaaaaattaaaattttgatttcattaatttgtaaacattataatgatataattgatttcattttttagtctactatatatatacatatatatatatataaactatttacaatgaattttatttatttttaaggattattttaagataaaatatacagtataagatatcaaataaacattattcaccattttaaaaagattttaaataactatttattgattatactatatatgagactttaatgatcgtctttctaaacttgaaccccaagctactgactcaagttttttgcacaaagatctaaacaacctcgtatctttgttaaatagaaaccaccttatattttgtaacaactttaggaaactctagctaggttagtcggtgcatatgtatttgtataaatattaggtgtattgctccttgattcaatatcgctccttgtttctcaattccaattttcaacactttaattttctctcgatagatttgtgttctccattttcgaccgtctcttgtgctttttatattttaaaataaccatggcttctcagttccctggtccatccgagatccaagactccaacgctcccctcacatcttctggtcccaccaatccagtcaatacttcacctccgatgggacagaccgaggaaagaccccacacgtacctcgccgctctcctcaagaacatcaacacttgtcgtcccagcgtcccaaaggtctcaaacatcaagaaatcaactaaagtcaacgtcaatcctgttagacctgttagaccggttcgacctattagaccggttagacctgttagaccggttagacctgttagacggcgaagagtagatttaaacaaatcttcacctgcgatgggctacactgagaatagatccgccacctacctctcctcaggtaacccctgcctcgacttcttctttcacattgttccttccacgcccaagaaatctctggagcagcggctagaggaggcttgggaccatgattctttaaccactctcaagcttatctgtaaccttcgtggagtccgtggcactggaaaatctgacaaggaagggttttacacggcggcgttgtggctccatggtcgccatcccaaaaccctagcttgtaacctcgagtctctctccaaatttggctattttaaagattttccggagattctttaccggattctacaaggacctgaaatccgcagtatacagaaaacgcaaaggtacgatacaatagccgcagcatctctacgtagaagatcccgtttctctagaggtggtcgtggttttggtggtggtcgtagtaggggtcgtcattttttaaaaaggtcggcagccacgagggagctaagggtagcgaacgcggagaggaagaaccaagaggagaaagccagagcaagcttgaagcgcaagcaaaagaaggtttcaatggcgaaggctgcatctacaaagtattctaacgatccaaactataggtttctccacgaacgtgtctctgaactattcgcaaatcaactaaagagagaccttgagtttttgacatccggccaaccaaacaaaatctctctagcggctaaatggtgtccatcccttgattcttcgttcgacaaagcaactcttatctgcgagagcatagctaggaagatctttccccaagaatcattcccggaatacgaaggcgtggaagatgctcactatgcgtacagagttcgtgaccggctaaggaaacaagtccttgttcctctccggaagactctgcaactccctgaagtatacatgggagctagagcttggcaatctctcccttataaccgtgttgcatcagtggcgatgaagtcatacaaggaggttttcttgtatcgtgacgaaaagaggtttcagcaatatcttaacgatgccaagacggggaaaacgaagatagccgccggtgctgtgttacctcacgagataatcagagagttaaacggcggagacggtggcaaagtcgctgagctgcaatggaaacgaatggttgacgaccttaaagagaaaggttctttgaccaactgcatggctatatgtgacgtttcgggatctatgaatggtgagccaatggaggtttcagtcgcccttggattgctagtctctgagctatcagaagagccatggaaaggaaagcttataacattcagacaaagtcctgaactgcatttggtgaaaggagacgatttgagatcaaaaacagagtttgtggagagcatgcaatgggatatgaacactgattttcagaaagtgtttgatttgattcttaaagtggccgtggaaagcaagcttaagccgcaagacatgatcaagagggtgtttgtgttcagtgacatggagtttgatgaagcgtcgacttcgacttcttcgtttaataaatggagaagttcacctccgactccgagtaatagatgggatacgctatcatattcagaggatgatgaagatgaagagaatgatgcttggcaaacggattacaaggtgattgtgagaaagtatagagagaaagggtacggagaggctgtgccggagattgtgttttggaatctgagggattcgaggtcaacgcctgtgcttggaaacaagaaaggagtggctttggtaagtgggttttccaaaaaatgttcttggattacgatggagagattgatcccgtaatgatcatggaggctgctatagctagagatgagtataagtcgcttgttgtaattgattgaaaactatagagattttgtgagctttgtaacatttggttgaatctttgaataaaatgaaactttgaattacatttatttatttcagtatatgtatttggccccatatatatatatatatattattttttttctatcttacaagcttcgaatgataattcttgtaaaagttttgtaaccaaagtgggcaagtaaaccaactaaaccgagcagaatctcatggtttaactgatggaggaaaaactttttttgtcacaaagtaaatgttttttttttttggtttagcaagtttatttatttgaacttataaatccatagccctttttctttgtccctctgttaaaaataaagtaaataaaaaaacttgtaatattggtaaaaataaaagattgttaataataatacatggactcagactgagtcactcagtgaaattaaattttgtaaacccaatattcaattttcataatctcaaattttaatcattaatttttctctaattaaacttattcaactaataagaaaacatatcgcacattacaaagatcaaaaacaaacaaaactaataataataattttgaatttaaacttaaaacattaaataaaacgaaggtagaaggtacatttttaaataagatgaaggtatcttatatcttcctaaattcaattaatgtatccaaaaccgttatcttagctgtcttgggtaaaacagtactgaattttttttatgaataataggactaaatccaaaattaaattttagttacatgcacttatccactgtcaaatttgaccaggtatgaattatttatgatttagctatctatcagatttatgtctttatataagccacctcataaacacaaaagaagaaccagataggaaacaaatgtacaaagaaacatgatttttctgtggacaggtcatcaacataaatggtaactaaaattatatgtttttctttaattttttcttaaattggccaaataatattttgtttataaatggaaaaggagatagccaacaatcctgtcaaatttgtttctgtttgagtttgtctttctcaatattgtttctttcttaatacctctctctctcttattttctttctgttataacctattaaactctacataaaacagcaaacttaatctgtttctggtttttataggactgttgggtattttctatgttcttcgtataaaactcatcaaaagttttgagagatattttcctatattatttgctagtaagagaggttttcagacgaagaaaaagaaaatcttcataaaatgagttgtttctcgtgcttctcttcaaaagttctggacaatgaaggttcttcgatgcctgctccttataagcaaccaaactcacctagtaagctctcgtcaatattcttggaaatgtgcacgtttgttattttgtctacatcttttgatttattatagaatttcttttaagaaaatttatgtttatgtatttctcttacagagagaacaacaggagaagtggtggctaagaacgcaaacggaccatcaaacaatatgggggcacgtattttcacgttccgtgagctagccaccgcgacaaagaattttagacaagagtgcctcattggtgaaggtgggttcgggagggtttacaaaggaaagcttgaaaatccagctcaggtaaaatctagacacttgtggaccaatatttttcgattaatctaaatttcgatatagtatttaacggttatatattaaaaaaaaaatgtttttgtcttacaatagaaaatagattcaaactcatttgtttattttgtttggggtatgatgatcaggtcgtggcagtgaaacaacttgataggaatggattacaaggacaaagagagttcttggtcgaggtcttaatgcttagtcttctacatcataggaatcttgtgaatcttatcggttattgcgctgatggagaccaaagacttcttgtttacgagtatatgcctcttggatctctagaagatcatctcctcggtaaatcattatttctcaatcaacatttcaatgtttttttaagaaaaaaagataacaagacccggtttggtgatcatttaaattaaaacagatcttgaaccgggacaaaaaccactagactggaacactcgtattaagattgctttaggagcagcaaaaggaattgagtatctccatgatgaggctgatcctccagtgatttaccgagatcttaaatcgtcaaatatattacttgacccagaatacgttgcgaaattatcggatttcggtttagcaaagctaggtcctgttggagacacactacatgtgtcttcccgagttatgggaacttatggttattgtgctcctgaatatcaaagaactggctatctaacaaataaatcagatgtctacagctttggagttgtgttgttggaacttatatccggaagacgagtcatcgacacaatgagacctagtcatgaacaaaatctcgttacttgggtgagtatactttattaacttatatgattttactaacggcttatcaatgtagacactatttaacaatttacaactttggtttaggcactaccgatttttagagatccgactagatattggcagctagctgatccattgcttcgaggcgactatccggaaaagagtttgaaccaagctatagctgtagcggcaatgtgcctgcatgaagaaccaacggttagaccactaatgagtgacgttattacagccttgagctttcttggtgcatcctcaaattcctccaataccggctctaaccatttgcaacaaaatcgatccaacaaatatcaggatgcagttcagtgggactcaagtcctagatatgctaattcgcaaatgtagacatttttatattttatatgacccaacaataattcacaacttatgtatcttccctttatttttacttttgggttatagtttcatctatttataatgaatttattcataattacatttatggttttctcaacgtcaatttcatttattaacgtattctaaattaatcaaacatatctcttctaaattgcataagataggccagtttagcctaggagtacactcacattccatttagaatagagaggcaaacaaactcattagtgttaatggtaatgggccgtctatacatttctgcccactcttttgagccgggcctcgtcgttcgatagggaaattgacacattgtagtcggagttcatagcttgtgatgtaaaactctccaaatgcttgggttatttcatttactgtatataaactaaacagtataataagatgatagtttttttttttttttgtgattagcaattttcaattaaacaccaactaaccattagcatttcaacggaaaaataaaaagttccaacaaaatttaaatacgtaagaatcaataaataatattgaaaatttgaaatcccatagaactgggcaaaaaatcggactgaatactcgaaccgtaattattccgaaaattggacttgaattcgaatcggaaaattcaaattcaccttataggatcttaaacatttctactcaaaaaaccgaatccgattctgataaccgatgatttagatttgttttactaatttctaaatttttatacctgatataattttatctgaactcgattacccaaatatctacccttatatggcatggcatgaaacatcatctctcaagaatatagtaatgccatgaaggaaaattggcaaataaaaatataaaatatacatgaaattctttttttttaaaagttttgtttttgcttatagtaataaactataaattaatttataattagaaaaaagaaagaagaaggtacggcggtggatattggcccttgccgcaaaagcaaaagctatcgccaccaccgtgtcataaatctcagatctctctctctctctctctctctctctctctctctctctctctctctctctctctctctctctcttgcgataacaatggccgaaactatgaaagatattacgatgaagaacgatgaatcacaggaagaagaaatccccgatcaatttctctgctgcgtttgcctgtaagcgttttctctatatcacccgttcttctctatcaatttcgcgagtgatttaggttaattttcgggggaattacagtttagctaatttcgaaaaatctcatgatgcaattgtttccattgttctgattatctataatcgatttcgttatctctacaattttgaagattaaggagttcttaatctctgtgtgtaatcgtaatcgtaattcgtatggctcgattgaagaatctgttcgtttatcgtcttttatggcatcgattgtgttgttcaatggatgacaaatatgtttatacgacactaaccatgcacaaattgattatgtggttgcttcttgtgcagggaacttctttacaagccaattgtgttatgtaagtgttgactaagtcataagagaatctcaatttttttttttatctggttaatgacttttcttttgtatggaattggcaatgaagcttgtggtcatctatcatgtttttggtgcgtacataagtccatgaatggctttcgtgagtctcattgtccgatatgtagagacccgtatgttcactttccctctgtgtgccagaagctttattttctgttaaagaagatgtacccacttgctcataagaagagagaagaacaagttttaagtgagttcttgcttgcagtttctttgtagttgttctatgcaagtgtcatttttgttggttattgatttgttaatgtcatgtttcagaggaagagcaagaacgagaatgtttttctcctcagattgatcttgttttggatttgtctgtgtgtagtggagattctctcaatgtctctggtgagagttccacacattagatcctttttctgtctagtaaaatgctttctgcttacaatttgatgtgtgtagataaacagaaggtggaagagtgttcgaatgcagcgaacttattatctagttcatcaagtagaggtgacattccatgtatccccaaaaatcaagaacccacagatgcaaaagctcttaatgttcatgaaaatgaattacttaaggataacaaagtcagtaagcagatttcgaaagatgatttgctctgttcagcatgtaaggagctgcttgtacgacccgtagttctcaattgcggacatggtatataatcttacatgtttgatttcgataaatgtcatgagtattcgctttatgtgctaatttcctgttttatcttttccagtgtattgtgaaggatgtgtagtagatatggctgaagaaagcgaaaagatcaaatgtcaagagtgtaatgtttgtgacccaagaggatttccaaaagtttgtttgattcttgaacagcttttggaggaaaactttcctgaagaatacaattcaagaagcagtaaggttcagaaaacgctcgcccataatagcaaaggaagtaagtccgacattcatgccttgaaccattttgtagttatcgacatgtatcatgtccttgtgctctcaaagcttagttcttgttgttacacaaaatatgtgagacctatacacagagactcacagtttgtaatcgttttatcttgatgtttagatattcaaagctatctcaaagaaggcccgtccttatcaaacgacaataacaatgatgatccctggttggcaaaccctggatcaaatgttcactttggagctggttgtgattcttgtggggtaagtgcattattaccttaacccgattgttagttgtgaaaccaaaatatgtgaatcgtaatttgacactggtgcggtttgctacaggtgtatccaatcataggggatcgatacagatgcaaagactgcaaggaggaaattgggtatgacctttgcaaagactgttacgagactccttcgaaagttccagggagattcaaccagcaacacactcctgaccacaggcttgagcttgcacggtctcctcaggttctgatcaatttcaattctatcggtatccttctcggacccgttatctcaaatgaaggcatggatacagatgaaggcgaggaagggcctcctggttcttctaatgagtcatcaagcacagaatgaaatagcagtcaagtattaatgcatatgctttcgctttgtgtttgcgtttgttattgtatttatacttcataatatattttctcctgagaagtctatggttttaacattttaaacaaagtttatttcttaacaaagtttgtttgcatttgtggttgttaagtcacctcttttgtttatattacctttaaagtgtgatttattttaattcctctcattagtacacaactattattgttagtgtaaagaatccatttaacaaaaaaaaagatagaagaaattatccatttgagacaagataattgaatacaatagttactaaaaggttaactagccaaattatttgtttgaatgattaaaacttttttttgcacaaaaaaaagatgattaaaatcttttttaagaatatataaaattatgtataaattaaattcttagatcatttaaatacccatattattcaatattcatactgaatccgttatccgtatcattcattttttttttaaaaagtacagttataataataattgtaatatcttaaattacacttattcgattctttcagttattatccggtatttatctgaaaaagaataagtttagtcatgtaaatgtaaaaaagagtgaacttttgaaacaattgaggcatgtgaaagcttttcaatatacatattggcttgaacttgaaggattgctaatagatagtaactggattcaagggaccccatcaaggtgaaagattcgctcctctgagtgcgtgtgaggcagctacgatgtgattggtcggagtgtggaacccatgactgctcttacgtcggaaatcgtttctcgggttctgtcttttttaaaacactttattattgtattaaaaagaaaataaaggaaaaagttttttcagtacgagcgtgttgtgataacagttttttttttttttttggcgccctgaaaaaaagggcgggaggacgtgaagagtgttattgcagatcctttatttgttttttgttttttttgcctttatctctgatttttggggattcggtagcgttcgagatctgagctgttgcatgattgctgagagtcatcgcacgtgtgccttccttctttgtacggtgaaaatagtttttaccatatttaaaccggttataaagttttgttcaggtttaaagtattatgggctagtagtgtgatctttcgtgtttggatgaactgatgaacaaagaaatatctaaagattgtacacagtgttggtcatgcatacgatttgaagcatataaaatcatgattcatgagaatgtccctttgacatcttcgataaaatcatgagaattatgaattatcgcaagctttaaatttagagatttttaatgtaattcatcttcttcaataataataaacctctcgattaagaataataagcaccggggcattgacattgggagcctctactcagtactcaccttgttgttgtttcacgggttacatatatattaatataagaaggccttttaacaaaaataaataaatataagtctgatttaatgtataaatgtatatcacgtaacagtagattaattagtcgccgcatcacgattcttgtttcaaagaaacaaaaaagaataagactgtgtttgctacacaaaagaaatgtagaaaaccaaattgagtcatatatttacatttcagatactataaagtataaactaaattttatgtaaaggaaaattaatttttctatttagacgtgagtataagcatgtagtcagaccaactttatttgttcgacaaatttaccaacaagtcaacttttgaagcctaatttatgaaagataatctcaactattacatcacaaagagaacggttgttgagatgattacataactataaaactagaagcaaccaatataaatgtccaatgctaataaatccaaagaaaataaatacttaggtaagtgatcaaccctatgatgttaattttaagacacttgtttacttaaaaaaaaaaaatttacagtcaaatgtatctgtatacaattaatgtgtacgtttttgtcaaatgtgaagaatttaatagatggttgactctttttttcttttgaaccaataacctgcatgacatttgaaaatctgaatgctagcttttgttttggattgtttgtacaaagttaacgttgacttgtctaccaaattttatgaaacaatgaaaatggatgcaaaaaatgaactgccttattatcttaaaccaaaacaaatttgacacatacaacgatctttgcattatttaacaaaaataactaaaaatttccacacgatatcaattgctttataatcatggatggtctaccaaagcaattaatataagcttgatgatctttattctcaaagaccttgttactttcggcagccttttattatttgttgcaccaaccactcataaactttaaatactatatatatagtgtatagaataattggaatatatatttccaaaaatgttcttcatttgagaactattattttatgttattttggagtaactaagaattaattatataatataagtgaaatatagagtcggaaatatgtcgtttactacatgaattatcaaaaagttgttatttaatacgtaaattttatatataaacatttaatatatgtaaaaattattgaccggttattttacacaaacttaattgtttatcagccaaaatttataccaacgtaaaaaaattagataacattaacttagtgtaaaataacttttttctatatattaaatgattatattcaaagtttacgtattaaatgaatattttttaaaaatttgcgtattaaactatatttttctcaagcaaactcaaattaatactttaaatatctcatatattgttcataatttacttttgtaaagtagacttttaagttttaatcagatagaatacaaaaattaaattaaattccaattaattaaattttgatttatcttttttcgaagaaaatgatgacaatcaggtgagagggcctttgacaccttaaaaatttgtctaatttgttttttgattcgattttaaaataaatatttccattgtccttttagttttcactttttcagattaaaaatcacttttttcctcctccttcgttgcttccctcctttcgctctcgaccggagattcagtaaaccaccttcccggagatgggaaaatacattaagaagtcaaaagtcgccggtgccgtttccgttaaggataaatctcacccacccgctctaggtttccgtaccagagccgccgccgctaaaaacctcgccctccaccgtctccgttctcattccgacgaagcagactcctttaactacctccagctccggagccgccgtctcgtgaagcttccattactcactaataccagaaaacagcagaagcaacagctcattcctagtgtcaatcaatgtcaaacgaaaaaccctagggctagttccggtccggcgaagaaattagagccggatacgacgacggaagaagcttgtggtgataatgagagaatatctaggtctgattgtaattttggagataaaggttttgatttggaatcagaaaacaggtaactttaactctgttttttttttcattttaaagctccaaactttttttttttactacaatacagagattgagttttgatatgttggttctctcataggagcatgataagtgattcaaaatcaatacaaagtgagattgaagacttctttgctagcgcagaacagcaacaacagagattcttcattcaaaagtacaaatcccattttctttagtgtcttgattctcttgagtttttagagtttggtctgactttgggggagttatggttttgcaggtacaactttgacattgtctcggacaatccattgcctggacgttacgaatgggtcaaagtgatgccatgaaatgagttgtgttcgatgtaaagttgtgtgctttaggaaacatctgtgttggaacagaggagatgaaaattgcacacagactaactttgtggggttttagggttggtgtataacttgttagtcaagaataatgtaatgttaatctctctcatttgctacaaataaatgtctaatttaactgtcaagttacttaaattagtattgtaaatctcttcattgttctttggttacttcagtgaaggtctgagttttgtggttctgcattagagttactttacaagtcatatactttggattcaagtagcaaaagtagtgaacttgtctgaacaaaaaccttagtcacaggttttatctctatcttctttattgatagtttgatactctaatctcattgggcttttcacacatgtgggtacttgtaccaattcctctgtcatacaggttgcagtaaaatgcttcgattagatttcatctctctcttctttattggcactgcactcactgtcttgctttctggaattatttcttcaaaagtctaagttagtagcacctttcatgctaaagattaggtttcttggtttctgtaaaatatttcacctctttagatcatttgctcatcggatgaatcaaaacattaaataatgatgtctattcttattagtacaaagcgtttaagaccactgtgttatgtctgatactagtactaaattcacatgatcatttacatctctgaagaatcaaaaccttcttggttttgtcaccttttaacacatgaacaatatttactgatcaagccctgcttctccgatggttcagcgtttttgtttggttaatttgtgagcaaaactgcaaaagcaagtcataggatgcttagagtgatttcattctcgttgataatagttgtattaagtaaatacgtagtctgtaatattacagtacctgtcatgttccatcccaactctaccaccgaagcttcacggagttgcaggtcctgtactcaacctttgctttgtttctgacatttcaacttcatatacacccttgctttcagaagttttactgtcttccatggccatcctcctgatttgagcctgttggattgctagcacctcatatctgcaaataatttccatgaactaccaatggttaaactcatatttctcgtgatctttattcatcactttgttacaagctaaaaacccatctcactatctctatatgaaagtggaatcatacacagaacaacagagtaaggtgcatttaacacctactaagggcattacacctggagttatggaaccatctcaaacgaaattttttggcataagaaagtacttactttgccacaatcttcctcacaagctggaaatatatcctccaaaactgatgttcctttaaaactcgcgggcataacttgaatctcaactgtgagagttcctgtaacacgaaatcaatcttgtttagagcagctttgaaaatagattcgtttaaacccaatggtcctatcaaccaaattcaattttaccaactgtgtaacaaaatcatcttgaactgcaaacacgagcatgtttaccattttcactaacatgagcctaaccagattacaagcaattcaggaagatagtagcatcaaatgaactataagattcggcacataaactctgatccgattctgattcaagtgataccagtggaccaagagctctaccactaccagttccatccatttagaaatcttgcttagtcctaaagagtaactttcaaatttccctataagattcgatccattgctcctaattgaccaaacccaaagctacaagcaaatcaagaagacagcaactttctataggcgctataagaatcatcaactcttatttgaatctaatttaaatagcaccgttagctccaaaatccaatcattgatcatttgaaatctctacagacaacagctacaaattccattcatttcaacacaagttcaatcatcaaaagaagcaaaatttaggaaatcaagaagacaacagctatgtaataggctatataagaatcatcagcccacacactcagatatgaatctaactttaaaatagcaccattggctccaaaagctaaactttgatcatttgtaatctctacagctaccaattccattcatttcaaaacaaaagtcaatcacaaaaagattcaaaattcaagaccaaaaaccttcgatttcgataacacgagaaccgcgtgtttctcctgccaatcagacaaatccttcttcacatttgcagatgaactcattccattatcttcatctcccaaaggattcacagatacttcttcttcttcatctgttttagaaattacaacccaaactactaaaatcaacttcataaatcacaaaactaaaaaaatcctaactaaattgggatccaattttcgtaattaccttccagagagaagttcttaaacgtatcaatggtgaaggatctgacatgatcgattaactcatcagtaactcccaaaatctcatctttaccttcttccttaacactcgatccattcttcaagctattcccatctgaagattccttcttctctcttaaaaaacttcgtcgaatcctcgaagctatattcattgctgatcctgtgaagaagaagaagaatctgaaaatctccaatgccttagaaagtagaaaaaatgggcctgggcatggcctgttactgggctactgggccttattataataacaaaaggcccaataaattagggtttagagaactcttaaccctaatgtcgcatcatatataaagtcgccattgaagtgaagctgagatcttttcgaagagcggaagctaaggagaggcgaattcgaatcgagaagatggtgtctgggtcagggatatgttcaaagcgtgtcgttgttgacgcacgtcaccatatgtgtggtcgtcttgcttcgatcatagctaaagagttgctcaatggacagagtgttgttgttgtccgatgtgaggagatttgtttgtctggtggtttggttcgtcagaagatgaagtacatgaggtttcttaggaaacgcatgaacactaaaccttctcatggtcctattcatttccgtgctccgtctaagatcttctggcgtaccgttcgtgggttcgtattctaatctcacagtcttaaagttcttagcttagtatgtgattcttgaaaatgaagattagaatttgagtattgggtttttggaaagttgttatattttgtgtagcttgttagggtttgcatcaatggatggatttgtgtttaggttggttagttactattaagtatgaagaaatggtcagcttttgatctttgtgcaatgatgtctgtgttaggaattgtatgtttgatagtgtgatggaggatttgaaatgtgatcatttgtcatttacaggatgattccacacaagaccaagcgtggtgctgctgctcttgcacgtttgaaggtgtttgagggagtaccacctccttatgacaaggtcaagagaatggtcattcctgatgctctcaagtaatgtttctgcaactttgttctatcttgtaattttggttatgttcaatgtgttttagctgtcaactggttttcgtttgttttgttttgtttagggtgttgaggcttcaggctggtcacaagtactgcttgttgggacgtttgtcttctgaagttggctggaaccattacgataccatcaaggtatgtcccttttgtccttttcgtctgccttattattggaacaaaaggtgcttcatttactaaaattgtatttgtaagtttcctatgagttgatttgaatagcatctactgacacatctttgtcattgttctgggtcttttgctgattgttttaatttataactgaagatcatatcattgtacttagtttagtcaggagaaaattatctcacttaatctgtggaagaaactgggaatttactgttggtttaatgattttacaggagcttgaggtgaagagaaaggagaggtcacaagctttgtatgagcgtaagaagcaactcaccaagctcagggcaaaggccgagaaggttgcagaggagaaacttggatcccagctcgatgttcttgcatcgatcaagtactgaagaaaatcagcatctatcttttggtttaactcttgttttggtttttatctattcagattttgttttcttccttgtatcactgttgaagtttatcacctcatttcagttttatttatcagttgatacttcaatccttagggatgagttctataacttctaagcgtcccaattatgttaatcttctacaaatattcttcaatccaaattcactatatggcatgacagttgactaaggaactaacaaaattctcttcttcttcaggctagtttgtgtaattcttaagattttactggagatattatatcaaataagaggtgcgtaaaagtaattttatattcaaataaaaacattttgccatgaacaaaaaaaaaaggttttattatttcatatgtaagcaaggccatgaattgatcaactcacgtggtctacctgtccctctccttttggacctaaagttagctacgtggcacttccttatttccgtataaaatctgcgtcggcacttaccacgtgtcatacaactagtggagacaacatggaaaaaactattctgtcggtggacccacatcagatttttaattccaaaaataaaagttacacataaccaaactaatactgttaaaattgacagttatggttagcttagcgcttacgcgtaccgtaaccaccgctacaacaaccaagcggtcgttaaatctcgccgttaataagaagttaactaacaacacctttatctttgactagccgtaacgttaattactctccaaatctcaaagcattgattaataaaacaaatgttgactaataaaatctccggttaaacctggtttacttaccggtttagtttcggttttcatttctactccatgttaaagcaagctataaaaatggcgaatataaccatcgtgaaagctttctctctcttcttcttcttccttcttctctgcatttaattttgggtttgaatacgacgcttcgtcttcttctttctccaagctacgttccgaggaaaactttatacgtatatgtatataaaagatttgactttgtaatctgaaaacgacgtttttgttgaaagagagagcttttttttccttctttacctaaatctggaaaatttaaagaaagatttctgattttgatactccgcgatttcgtgagatcgcttgttaggtaagaaaagaattcgaagacgaaaaatgtcgaattttgagaaaatcatttctggtttttgtttttctggatctttgaatttggagcaataaaggatcagtttttatttgatgattcttgtctcttgatcttgggtttgatttaaaattacgatttgatttgatgattcgatttcatataaatctgagttaaatctacatttttgcagatacataggttttacattattatcatctgtttctttgataaaaacaaatgccaggtaaattttcagatattggttttgaaaaatctgattgcttttatgtgatttttgaagtatttgattatgtttgcttttattgttgtagcattaggtgagatacttttggttccagaaactgataaaggaaagagtaaagattacattgaggtttcagaggatgagaagattacaagaactcgttctagatctttaaagaagaaagctattaaagcttcgaataaattgacacatagtttaaggaaaagagggaagcgtgtcgctgatcaatatgcaccaattgtgattgaggatgtgagagatgaagaagaggagaaagcagtgaatgtatttagaaaagctttggtttctttagatttgcttccaccacggcacgatgattatcataccatgttgaggtaatgtgatactactgcaggatcatgtcagtgagtattttggattgtgtcatgatcagttttaggtttgttgttgcagattcttgaaggcgaggaggtttgatcttgagaaaacagttcagatgtgggaagaaatgttaaagtggaggaaagagaatggagttgatactataatacaggtgaaggataagaaccttccttgagttagtaaagatattgttgttttatgagtgtgctacaaagacctttaaagtttagaattttgctaagaatctttccacatgggttttgttttgctgttttcctaactggcaatgatgacatattccttcaggattttgtttatgatgaatatgaagaagtacaacaatactatccacatggttatcatggtgtagatagagagggacggcctgtttacattgaacggcttggtaaaattgaccccggcaagctaatgaaggttaccacattggagcggttcttgagatatcatgtacagggttttgaaaagactttttctgagaagtttccagcttgttcgatcgcagcaaagaggcacataaattcttcgacaaccataatagatgtgcatggagtggttggtacctctacattcctttctcaacattctgtttcagtgcaaccgggacttctgtcacatccctgaggtcttaaatgcttcttttgatgcagagctggatgagctttagaaaattagctcaggaccttgtaatgcgaatgcagaaaattgacggtgacaactatcctgaggtgggtgtatgaaagttatttgaatggcaacctatacacttttcaccattgaagaacactaacattggttttggttcactgaagacagacattgaatcagatgtacattattaatgctggaaacggattcaagcttgtttggaacaccgtgaaaggctttctcgacccgaaaactacttctaagatacatgtatttcatcttccacatagataagacttatacaggacatttgagatgcttcaacttgaccaacaatttacattggttattgcacaggttttgggaaacaaatatcgcagtcaccttcttgaaattatagatccaaggtcagaatttatactgtattggtggcaacccaatataatccacttttgcttagttgtttggaggctgagacaaaaacctctgttattttctttacacagtgagcttcctgagtttctgggtggaaattgcaagtgtgcacatgaaggtgggtgtatgcgattcaacaaggggccttggaacgacccggagataatgaaagtatgattcttttctgctcaaatttttgtgtagacactggtatctcttgaaaagcattatatgataaagtctctgttttgcatcatacttgtagctagtgcgctcgagagatgcaatgtacaaaccaaaagaaatggggcttctggagaatggggaagtagctaaattattttccttacgggttagtattaattctagtcaacttgtaacagctactggcttctgttactttctgtattaatatcaccttcccatttcttttagcagcatgtgaacacagatatgtcatcacctgatggaggccatgttagggagagagaatcgcatcctgaacatgttagtttacgtatataaatagtctgtttatgtttgttcatgttctaatattgtcagtgaatgattatcgcacattcttatgtatgcaggacaaacgtgctcagctgagcaatcaagctgaagcagttggtgttgggagaatggaacagtctgattcaacaagtaggttaaacccactctgtgtgctcatgtcatgatccattttagacaagattttaataatctctaaacacttttctgcaggtccattaccgaataatctggcagtagaaaggagtttaacgacctctcttcagaaagttgcaagttttttggcccgttttatcctccaacttcttggcagtctatgtctcatgttccggatcttgggaagacttgtaaataagcaaccagagaaccaattgagaccggagttaagtgtttcagtctcccagcaacaagttcctcctcctcaggtccatccatgttggctgaggttgcaaaatctggagaccatggtcacagttttgtgtgataaaccctcaagtattcctcaggaaaaagaagatatacttcgtgattcattagaccgtatcaaatccattgagcaagatttgcagaagacaaagaaggtaaactatagacattcactgatttgtttcaatatctatatatctctccaggtattcgacgtaagttaggatttaatggtgacaggcgctctttttgaccgcgtcaaaacaaatagaactcgctgagtgtttcgaaaacttgaaggagagcagttcaacggtaagggattagccttcttaaatgtgaaactcttgagattgatctctgagtgcaccaatatgaaacagtcttcttctttgcttaacacagggaatgcgatcatgctggccaagacactgcagaaactttcaagctgaaacctgatttgcagaataaatttatcttcggatctcatatccgaagtctgcatagctactacttcacccacttaaccatattacaggtgagagagacttcacacttatctcttgtcatatcccaactaaaatctgtgttcgttatgctcacttagactacttatccttcaatggtttttgttttttcagatggtatatatatataaaggcaaaatggtaacaggaagtgaaattgaagaggaaaaagcttacaaattgtttagtagcaagcaagcagtgtttatgtaccagtttctttaggttagaaaacagaggaattagtgaactatttcggaatatacttttttttttccataacgattctattgcaaatcattgttgtatactatataatccaatagtggtgattgtcaaaaaaaaaaaaaaaaacagatgagttttacaatttacagtgttgtgtattagtttatacttacaatcacaatttacaaatataattacatttgatggtcatgtaaagagagaaagaaacagaaatgaaaattagttagtttaggaaacaccgacacagagactacatcgtaataataaggttagctaatccatattaacgaaaaggaaatcaaacaacgtaacggctataattagttactaatcagagtaattaaactactaaactcaaagaaaaaaggaaaccctagatctaatgtaagcactaagcagagagcgtaactatttatttaaggcaatagaggctctctctcattcgcatatttctctctgcttctcttatttccttgtgcctcacgttgctctgagaaaaacttgagttttcggttccatcacaaattcacgatgagtagtatgtatcacgattacgatcatctcacggcttcagggaagggcctgtggtcgaagttctatggactggtggatgcggcggttttgttatatgatgagatacaacgtcgtggcaagatcgtatctgaagaagaaagccagaagagaatattttgtctcttcccgagaagaaaaagatcgtctttggtgaagagacaacaaaagcttaatggtggttttatctcttttacttcttcatcgcttatcgatcttaaccagttgccgactgattctgagatcgaagacccacaaacctctgattcccagatgaaaaccctacaaaactctagttctgaaccttgcacttcactcgtactctttgattacaaaacggctgagtccgagaagatggaggcgaaaaccctacaaaaccctagttctgaactttgttcatcactcgtactctctgattacaagatggctgagtcggaaaagatggagacgaaagacccaccaaaccctctgtctttgtgcctaacggggaacacaagccgcaagagacgtgctgtggaagagaggaaacgtaccggtggattcaagaaggcaaaggttgctccttttccagggacagcgagagatacgcctaagtggcttgtcaaggtgatgagagacatgaaagaagccaaagatgctaaactgatctttgagaagactctgtttgtgactgatataaacccaacacagaaccgtctctcaatgccgttcaacaacttactccaaaacgatttcttgacgtctgtggagtccagaatcataaaggaagacatcaacaacaataagaagattggagtgggagcgattctcgtggatcaacggtctgtaaagtggggtgtgatgttgaaaagatgggagctgaagaaggaatcaggaaaaggaagctggaactacaatctgatttgtgggtggaacgatgtcgttgaggctaacggattgaaagaaggcgacaacattagtgtttggtcgttcaggtgtcgtggagtcctttgctttgccatggaacagagtagctcttctcttgctctctgtctctgctaagtatcttatgtctgttgtgagtcttgtgactataacttggttgattaacacgcacagtgattttcaggagattctgaagattcttttgtctagtaatttcttgaaagagttaaactaaagaaacttgggttcctctttcttcttagtaacttgttccttctattgtttcagatcattataatcgtatgtacttagcacttttgacatgaatctggtttgttgtttggtctactttagttacctttcgatttcttgtaatatatctcaaagtctaattttgtgtgatgacattgatccaattgtgaaaaggttacatgttatggtacattcatgagaaatgctcaatacaatcaaaaccagggttgttttctactaagtgacaggtttctactaaatgatcaaatcaggaacaaaatttgttgccaatgacaggttttgctacaattgcttccttctgccacttgaataagtacgacgtcctttaacacagggaatgcattcgtgctggccaagacactgcagaaacttccaagctgaaacctgattatatttgaatctcatatccgaagtctgcattgctactattacttcaccctcaaaccatatatattacatgtgagagacatcacgctcatctcttgtcatattccaactaaattttttgttcgttttgctcacttagcagccgttgatggaagaaggaggaaattgcagtgaagaggatgagaaacgattagagagaaaatgagaggaggatctcatcaacgcaggtttgcctaggcacaacttggaaggctggttgaaaaacagagataactgcagtagtggctgaccacataagctgttttgctgtttgcagcaaaagcaagaccatctttatcgaagcctccagggaatttttcgtcgcgggaagaacacaatcctttctagatgatctgatacagaataacaaaaaaacatatggtgaagtgattagatcgactttagctaagactatctgaatataaacccagtaaacatatttgggctttctctcgggtataaacttgctcaccaaatatgctgaagtgattgattgtttcgaagaatgctaaggcatcacctcaaactcttggtttgtttcatggagaaaagttgcttctccttgttctacttgtcagttgttaggaagaattagtcaatttctcttcaatgaatccctacaagttagactattgtgttgaataagtaaaggagttctgcatgagtttatctcttttgttcctccgatactttttacttcctctgagtaaaaaaagagaagtaaatttttacttcctctaagtgggttggtctagtaaatttttgttgggcccaaaatttaaaaaatcaacaagaagacaaaaaaagcccaaagatccgagttggagttaaactgacaaaatccgaagcaccaattaacattgttacactaaaccatggcgacgccttcgccgacctcctctcctccctctgattcaaaccctaattctgccgctactccgccgcatcagaaacaaccaccctctcctcctcaacccacgaatccatcctctccaccaccgcacaccaccgtcgtagctttagccgcatcaacctccgccgtcgccagaaaaacccaacctgttctctggactcaagacgagaccctcctcttaatcgaatcatacaaagagaaatggttcgcaattggtcgtggtcctctaaaatcaactcactgggaagagatcgccgttgctgcctcatctcgttccggcgttgaacggacatctacacagtgtaggcataagatcgagaagatgcgtaaaagattccgatctgagagacagagtatgggacctatctcaatttggcctttctataatcaaatggaggaattggattcttcaaatcctgctccgatctcagctcgtcctctcactcgtcttcctcctaattcgaataatcgctacgtagacgacgaagaagaagatgaagaagaggataacaataactacgaagaagaggaagaagaagatgagagacagagcaaatcgaggagtattaattacatattgagaagacctggaactgttaacagatttgctggagttggtggaggattgttgtcatggggacaaaaagagagatcatcgaagaggaagaggaacgatggagacggtggtgagaggcggaggaaaggaatgcgagccgttgcagcggagattagggcgtttgctgagagagtaatggtaatggagaagaagaagattgagtttgctaaagagactgtgagacttcgtaaggaaatggagattcgtagaatcaatttgattcagagttctcaaactcagcttcttcaatttatcaacaatgcttttgattctttctaacgtagagatttagtcattgttgcttttagatttgtaacataggtaacggatttgaagaaatgcactatgtaagctaatgtttatgggagtgaagtgaactttttttttaaccataaaagaacaatgatacattcatcaaattaacctaaacctacaagagaataagttagaggaaaaggttaaaaaagggccctaagtatatgccacaaggatggaggagtagagacttctatacaaaacattataaactgtttctactctctcccaaaccaaaagatgggaagaagaagagactacttctctatgatgcaagtgggtaatttacattatgatataccttcttctctttgtgttcatcaaaagaggcaaaaagacctgcatgaattttatcctatccaccaacttcttccctattgatctccctctggccttaccaaatctgcaaactccacaatctgtagagtttgttatgttatactctcagccaaatccaaagaccaccagcagcttcaagatgttaatgccaaaaagagacccgactctgaaggtggaggacacaaaccagtttgggttcctgtacagggttgttgtcggtaagggccagcgttaagctttgcaggatctacagctactcaaggttctaggttcatctgtcatgcctctcattccacttttgtatcaggaggcttggaagatgataattcttgtgcttcttctaaatgaggctgctcctcagaagcaaggtgtttctgattttgtacagtcggcttctctggcaatttcggtctcttttcttctgaaggtagagactgttgttgtctctgtgtaacgcccttgatcccgtgcttttgagctagtccttggttcggtgttgatactggatcatttcctgctgaatctgtattggaattgtttactactttcgaagcagtgctttgcacagaagcaacacaagatggaggttccaaagcaggcaccgcagtagaaccaactgcttttatgtttttcaaatcattactcgcttgaggcatacccttggtcgtacccatactagcagtttgggtggtattggttacagactgtggaacacgtggcatacattcagcttgggacttctttgataactcagagttccctagatgattatgttgaacaactctctgagctgttgattgcacttgattgcgctgcttttggtgtatcaacaaatgctgatggttagaaggtgcaaccgctggtgcaattgacaggctagaggtggataaaatattacatggggtcgcaggtgagctctggccttggatgctattgtctgaatgtaattgcatctgttgttgaggggatggagacaaagcaccagggaatgattttggcagttgctgtgaatgatttgaagacaagggagaaacaaatggtttagactgcagatccgtgctcgtggtagtccccacactagactgctgatcaggcctaactgaaaccgctatctctcctttttcggtagcttgatttccttggggcatggtaaggccattcaggtgtgactgatcgacagtgatgttctgatggatcatgttgcctctacccatccccttcagttgtttattcagctgttgaccttgtgttggctgccgctggtgtggatgctgtcttgcagactgctgaagttgtcgctgcctttgttttccagcttgattgttcactccagaagtaccagactgaggactcctacccaaaccatgaagcgccaactgagatttttgaggtttctgttgtgccatagcattaatattaggagagggcgacaccgggggcatggataatggctggggcgaaacaggtggttgagtctgaggactgttttgtgaagaagaagaaacagaagagccctgaggttgttgtacatgtggcatcatagaaccagatgctggaaactgctgttgctgttgctgcaaatacctctggtgaatttgtctttgacggatagcaaatgcttcctgctgtgccccagtggcttgacttgggctctggagatgaggatgatgcgagttgccaagcacatgtgactgcggtgacatctgatgctgctgggaaagatggcctgggtacgcctgaacaggagttgtctggttggtaaatccagaactcaaattactgaaagctgggatccccggactgttcccttgagcagcctgcatctgaaactcatgaatatcagtttttatcaccattgtagagttcgtaatgttgtcaacgagtttcaaaatgacaatcgaccagcggttgacaaaaattagaagcgctgaacgtctacaaactaaacaaagagcgagataaataagtccaggtagtgaagtaagaaatagatagttaagttcccacatgtgagaaatcgtaaaacgaagtgtaataattagcgtagcagtaaaaaaatccaagtagcttacccgcatcatatgctgcacagcttcacgaggcctgatcatggagtttccttgagaagctcctcctccggaatgaatatttccagtgtttggaattcctaccatgccagaggtatgcatattaccagtatttggcattgctgctgaggccatcccttgaaaaccaggccttgacatgggtgtgttcctgttcattccacttacacccatagcatttccaccaggaaccatgcgatgtccacgatcagatcctgagacagctgcaggagttgataaggagggctgctgcaggtttctaccagataacgtttgattaaattgttgtagtcggtgttgttcatcaagtggcaaagaccctctaggaacattgaatctaccatccctacaaagaaaaaaatatatcaacaatcaaaagaagtaataaccctcaagtaaattgagcggagattcacagacgtgtgcattcaccaaaacaaatcattcagtaaaagctctacctgacagaagcactctgtaggccagatgtggttggcaaattgttgctcagaacaacaccagatgatccaggagtggatggatgtgctccagaagtagggagcactggcgttccctgattcaacattggaagacctggattttcaagtgaaaatacatcttgacctgaagttgatgcgtcacagacatcaaggggccttcatccggagagtagcaaaatattagaatttgcaagagtagaagtcaagatgtatgtgaatacaaggaaacaacagaacttacgtaagaacacctccattcagattattcgggaatacttgagagagagccatgacttgtgaattgtgaactggtactatttgcttgggatcccgaccatcgttcttgaagatagatgaaacagtcgcaaaaatacaaaagcagcaacaaaaaaacagatttaggtccttagtagattcatacttcaaactacaatgtgacttcagcaaatctttgctaagatttgcagctatacttagaaacatgcagacctggtatgtcgagtgattgagatatgcctttcataccataaactttattaagcaaattaaaaactgaattaagcaaacctatcttctcaaattccatatctataagcaaaaacatttaccagctccagtgcaacttgaaaactgaattccgtgaacaaaagaaaccacagaaaccccgataacactctctggcactataagaaccctttagcattctgcccacaagggactcaaaaactaaaatttggactaccatcacccaacatatcatctccttgatgctagtatactacacagtacatacacaacgaactatccctatttccaggcaacagttgaattatgactagccaaaaaatgcagaaagaaatccactagttttaggttacaagcttggaaacagtaacaaagtagtaggtgaactaacctgtgtctttctataatgtaatttcttcccaatcaaacaaatcttctcaaaatgagacttcagggtatcttcctccattggcccttgcagtcgttgaaacaactgtctcgcacttccctgaatatcacagacatatccagggcatttaattagtctaagcatagaagacactttgttcaccatctcagagctatagaaaaacctttggtatgccaggcaaagtggatggataagactgagaattccctgaatcttctgcactatcagccccatcaccagcagttttatccatcagaatcttatgccggtccttgcactcagtcggattgcgatatatatactggagaaacagtggaaaaatcaatcagccagtaacaaataccagttgttcactgatacgagaaagcaataacctggacaacaatatccaacacaaccattcactagaatagaaaaaaaaaaaaaactattgaagtatagctctgccactctgttcgaaaggtaccaaagaaagaatcccaagatgtttcaaaacaacaggcacttaccttaattttaagagtgctgttcattgcatcactaatgagctcccagttaggccccatatcatgcaccaggacaacaagcgcctatatggtaggaaaaaataaattagatactcataaagcaaccaacagtacatcgatgttaatgaaagatgacgaataaaaaacctgatcctcaaatagtgaccatggatttccagaaccatgctgaccaggagaaatctgagaaaaacaaaattctagtttaaaacagatactttaaacaaagtgaatggagttagtaaaccttcaagagcataccttcaggccttttatttttctgcccctatcacgacctccaataaatttgatagatttgttggggttggacatattgctcatctgggaagcagccggagaaggaatcgatccagtgtgaggaatagccatatcaaaattattctctaccaattgcttggtggtcttttgcttctttgcactatgaggaccatacagaccttacaaaaaataattaaaatatgtcacagaattataaacgataaccattgctttagttgtataattggtggttaatgataagatgtacgtataaatgctgcttaaaacatgatatcctctaggagtattgtttaatttatacaggcagaggctgaggatcccccagccgctgaagaactacaatgcaccacaaagtaaaaaatgaatttgcaaatagtaccattcatatcgaaattattctctggtcgcttcttccagtggtccttctgccaaaataaggatgtattagaatcctctctaagaagtcaattactactaaatggtaaacatttgcaaacaatataacttaaagttctcatttcaaataatgggaaactgtcaatagtcacctcaagattaaaatggaaacaaaaaataactttgtttttaatccaaagagtaggactcaagtatcaaaccagttacgcaagaggcaaaaattattttatcacgctagtcaagcaataatattgattaattcacaccacctaaactcgcctttccctaaacatttgttcaaattgattcttaggattttatcatgaattcacctgttcaacatggactgacggattgagatgccaagtttggtcatatgcggagccctgcaacaaatgaaattgaaaattgcaatccaatgtcaactaaaactaatagcaactattttctgcaatagtaagagatatgctgatatttctaactacctgatgagtcttctttttctttttaggttttcctgaggtttcagccatgtcataaggtaacagcttttcaaaattaacacttgactcaacctctgtgcctttttggactgccgatccaccatgcaaactactatactcatcctggaaagaactagtatccccactagacgcatctgtcttcgagggcactggtaaattcccagtagtagcacacccaaaaggactcacaaccctatgcctggaagcagtgcgcactcgccttgtcggaactgagccggcattaatattactgtcaggcctttttactatcaaacttgatgagttagagccacctgtgttgttgacgtatggtaaatcgtccccaagatcatatgaccgggcagaatgagacttcatcagattcttcctttttttgtggcttatattaaatgatctgctagactcgaaagctcccggaagataataggtacttgtttctccttcatcctcatcgaacgcagtaacattatatcctatatctacaattagagataaaaaattagcaaaaatttaaccaacccgcgaagctcaaacaacccagaattgtgcatacctccagcagtatcataggctgatgtatcaacctcctcctgcatgctacttccagacttctgggaacagagaaatactgttaaatatctttggagaacagatatatattctcaggaaaatatacgccatcaaggttacaatatgcgagctcctagcatagaacaatctcacatacctcacaacgtgtaagatgcgactcaatggacttaaggtacacctccattgcaccagatggaactgaataaaagaggcttgcctgtacagtaataaagctcaattagcaataatgtagaactatccacaacaatagtgttcaactgaggctgcggaaaatcttttcagaaattcatacttctgtaagctgatcaaccatagatatatccaatatttctgggtcgcacatattgtcaggtgttgacagtgcagctgaatgataggagatggaagagttgttgtacttcaaaaatctacttgcatattccttgacacccgcagctaaacatcttatgccattcaaacaattagattcttggcaggtctcctgcatacaaccacggtaatatttagtttgataccattaagttttacaaaaatcataacataaagagcgacagaaccagagactcctgaaggtaattatcaaagacaatgcaagcaaataagaaagatcaggcttctcaatcataagaaggaaatatcagtagaattgtgttgttttgcagtctagtcacaaacataataatatggttctcagaattcaacgagtgtatgtataaattctaatttaaaagaaacggaaagaaccatatgatcatcattgtcatcaaaaaccataaaagaggtcagacagtcaaataccttaacaattcccaagctcgtctcctccagctccccaggaacctcggcctccacagaactccagaattgtaaaatagcataagataggactgaagctatttttttcagctttctgtgctgatttcgttcctcaaatctcaactgacaagtcaaagcaactcgatggcaaatttgtgtggcagcagtcattttccaaaggcgctcctagaagatgaaaagaaaaaaggtaacagaatgcaattagaacagtcacggaaaaatgttccagtaacataaaagtggacaagctcatttaagaagacgaatgaccagacgccgtagtaaataaacagaacaaaaatccacaaaatgcagcattttccatgcagatatatagaatttatgttagaaagataatttaactagaccagacctgcgcaaaatcatttgccagccatgccatttcttcgaggacaaaatcccattgagatttctcacggacctccactggtgcagtaccacaagataattcggcaattctttttttctttgcctgttaatgtattatgtcatacataaaaagatgagtaggtacataacatcataacttctacgaaaactagatagctaaaaatcatcaagtcaagattaaaaagaaaacctgtataatccgggcctcctcaagaatagcgtcctccttgacagtatctaacataactgcatctgagctcggctgatgttttaatgcttcaatgtcagttcctgacaataaactattgccaactgtgcaagaacttgtgtctacagatgcctgaggaattccagagcacaacgtgctgctaggattttcagataaaatactaccaactttactgtcattttcgagtacaaccaacccatcttgaagccttttctcagtctcggaacttttctccttagtttgcatctcagctgtacttctgtgactttgattttcaattttaaccgatttcatctgcatttcacattcaggaatgcactcactgataatggtggtagattgacctgtctcatcttcaatcttagttttggtcatttcaccaactgtttgatctagtaacccctctactctcaaagtcttctgcatagagatttcatcagagtcaagtttgtccactttataaagatctctttcattatctacatttacttctacgttgttcgcatgagaagactctgactctaacccattagtccctgtagctcctctatttgttaagctttcttcctctaccgtggaatctcttaggccattcagttgggtagaactatttttctggccagctattgttgcagctttgggagaaccaccagtcgaaactagttgtgccttctccccagcaaggccagactctccaactggcaaatatgcagagcttttactatacgaaatgtcggcttcatctttcaatagactagtcttggatccagcagtactctctcgtacaacaggttcaccatccaccttagtattcagcgaattgctggaaactctatttttcggaacgatattaccatttgaatttgcaaatactggacaagatacagaagttgtatgcatatccttttgattggctgcttcgggaatgcaaccctttccttccactgatcctctgcgaatagatatagacgttgcaagaccaccacgattctgaactaaatccgtagagcttgaccgtgctggatcccgacttatcttcgatctgttcctccgagcatacgggcgaaagatggcagaatcttctgtttctttggtattctggttggtgtgtgctttggaagatcgttctgactcagaagttctgttttgcctattaggatgtctcaaatttctttccccttcaactgacttgttttcagaatcaaacagtaaaagattatctgctgtattgggttcagaaattgtaggaactccaggtctaccgctactctccaccgagtcaccatgtggtgaggcagtcagggcaaaactatctttgacttcactgtgggggttatgggcaaataatgatgagttattccatgaaattaatgtgggaactacaccaaacacgaatgtacctgtttacaaaatgctctgcttgctgatctgtgagtgatgtagattggacgctatgtgaagttgcaataccaaacttgaaatccaagggattaccgccctgaagcagatagaagagtaaaggcttgtcatcataagttcttacacacacacacacaaaacaattatagaacagggaaataggtattcatactttctctagaaactccaattctctcctcctttcctcacgaacatcatactcttgcctgttgaaataagcatctttgttacacattggaaataatagaaagctgtagaaattatagagcatttaaacacactgcagaagatcaagatgtctcaatctgaaataccttagctccgcttgagccttctcaatagctgttcggcgcggagatgttttaacaccaataccacctccactatcgataactcctcccatggaatcaacctcagcatttactagaagatatcctgaaacgcttccatgcatcaccacgtcgaataccccatcaattcgaattctagcttaactgaaaaattatatcaagagctttcagtatttacagcattccgaatgatcatactgcagaagttagaatcagttacacctaaatgttggacctacaaataacactggtaaaatgtatgttctcatgatgcaaaaagcagtaccatatgatatcatataatagagtagcttatcagattcaagatgtaactgctcagaagatgtcaaaagtaaaacaacattcactcatatactctagccactatccaaaggaacatcaaagtgaagataactccccagaatctagtatttgactgagaattctatatatctaacgccaataccattctgatccccgagaagctcacaactacgtattccagcataacagagatagaatagaactctaagataccaaagaaatgaaatgttgcctcaaggcagagaggttctagaagcttaatccaacactaacaacgattactaggaaccaaagttagaaaatgatcagcttaagctacttaatggcgtgcctacgaactcttgaatcaagtattgagcatttccaagctaaacgagtagaaacaaagaactacagagacacaatttcagcaaacaattcacattcctgataaaagaagcactgggttcaaaatcacagaagctccagcaaagctggactctagggtttgaatagaagagtgaaggagaagagagttaaacctggaaattgaacgtagaacagaacagaacgaaggcaaaaagctagggcacaaaactcgggcaaaatcaccaaattctaaaattagtttctctctcctagggcttccaaattcttataagcttttctttcaaatcgaaagacgagaatcaatttctcagagagtagaagagaagaagctcctcccaaaacaaggaatccatggaaattgcttgcttgttgcgagattgattcctaattcagctatttttcgttttcaattttggtttccctctcgggagataaaaaaaaaaattgagttctcgttgatgtttttttttcgttctttctctctctctctctctcctcgacgcagtatgcgactctctctctctctctccgaattctgggcctgagattttgaccaaacaaggcctttctttttgtttgcttggtcttgtttcgggcctttttgtagtaataaagttataacagtttcatgttgtgtgacatggatctctacaaatctcaggcatgtcgctggttttgtaaaactatatttgtcccacgttgtccataggcaattcggatcgagtccgggtcggagttttcggtttcgggtttagaaatctaggacgcattcgggtatattaaaatttgggtttagatcggatgtggatcagatattttgggttcggattcgggtttatccgaagtatccaaaaaatctaaaatttgattcagagttctcaaactcagcttcttcaatttatcaacaatgcttttgattctttctaacgtagagatttagtcattgttgcttttagatttgtaacataggtaacggatttgaagaaatgcactatgtaagctaatgtttatgggagtgaagtgaactttttttttaaccataaaagaacaatgatacattcatcaaattaacctaaacctacaagagaataagttagaggaaaaggttaaaaaagggccctaagtatatgccacaaggatggaggagtagagacttctatacaaaacattataaactgtttctactctctcccaaaccaaaagatgggaagaagaagagactacttctctatgatgcaagtgggtaatttacattatgatataccttcttctctttgtgttcatcaaaagaggcaaaaagacctgcatgaattttatcctatccaccaacttcttccctattgatctccctctggccttaccaaatctgcaaactccacaatctgtagagtttgttatgttatactctcagccaaatccaaagaccaccagcagcttcaagatgttaatgccaaaaagagacccgactctgaaggtggaggacacaaaccagtttgggttcctgtacagggttgttgtcggtaagggccagcgttaagctttgcaggatctacagctactcaaggttctaggttcatctgtcatgcctctcattccacttttgtatcaggaggcttggaagatgataattcttgtgcttcttctaaatgaggctgctcctcagaagcaaggtgtttctgattttgtacagtcggcttctctggcaatttcggtctcttttcttctgaaggtagagactgttgttgtctctgtgtaacgcccttgatcccgtgcttttgagctagtccttggttcggtgttgatactggatcatttcctgctgaatctgtattggaactgtttactactttcgaagcagtgatttgcacagaagcaacacaagatggaggttccaaagcaggcaccgcagtagaaccaactgcttttatgtttttcaaatcattactcgcttgaggcatacccttggtcgtacccatactaacagtttgggtagtattggttacagactgtggaacacgtggcatgcgttcagcttgggacttctttgataactcagagttccctagatgattatgttgaacaactcgctgagctgttgattgcacttgattgcgctgcttttggtgtatcaacaaatgctgatggttagaaggtgcaaccgctggtgcaattgacgggctagaggtggataaaatattacatggggtcgcaggtgagctctggccttggatgctattgtctgaatgtaattgcatctgttgttgaggggatggaggcaaagcaccagggaatgattttggcagttgctgtgaatgatttgaagacaagggagaaacaaatggtttagactgcagattcgtgctcgtggtagtccccacactagactgctgatcaggcctaactggaaccgctatctctcctttttcagtagcctggtttccttggggcatggtaaggccattcaggtgtgactgatcaacagtgatgttctgatggatcatgttgcctctacccatccccttcagttgtttattcagctgttgaccttgtgttggctgccgctggtgtggatgctgtcttgcagactgctgaagttgtcgctgcctttgttttccagcttgattgttcactccagaagtaccagactgaggactcctacccaaaccatgaagcgccaactgagatttttgaggtttctgttgtgccatagcattaatattaggagagggcgacaccgggggcatggataatggctggggcgaaacaggtggttgagtctgaggactgttttgtggagaagaagaaacagaagagccctgaggttgttgtacatgtggcatcatagaaccagatgctggaaactgctgttgctgttgctgttgctgcaaatacctctggtgaatttgtctttgacggatagcaaatgcttcttgctgtgccccagtggcttgacttgggctctggagatgaggatgatgcgagttgccaagcacatgtgactgcggtgacatctgatgctgctgggaaagatggcctgggtacgcctgaacaggagttgtctggttggtaaatccagaactcaaattactgaaagctgggatccccggactgttcccttgagcagcctgcatctgaaactcatgaatatcagtttttatcaccactgtagaggtcgtaatgttgtcaacgagtttcaaaatgacaatcgaccagcggttgacaaaaattagaagcgctgaacgtctacaaactaaaacaaagagcgagataaataagtccaggttgtgaagtaagaaatagatagttaagttcccacatgtgagaaatcgtaaaacgaagtgtaataattagcgtagcagtaaacaaaatccaagtagcttacccgcatcatatgctgcacagcttcacgaggcctgatcatggagtttccttgagaagctcctcctccggaatgaatatttccagtgtttggaatttctaccatgccagaggaaagcatactaccagtatttggcattgctgatgaggccatcccttgaaaaccaggccttgacatgggtgtgttcctgttcattccacttacacccatagcatttccaccaggaaccatgcgatgtccacgatcagatcctgagacagctgcaggagttgataaggagggctgctgcaggtttctaccagataacgtttgattaaattgttgtagtcggtgttgttcatcaagtggcaaagaccctctaggaacattgaatctaccatccctacaaagaaaaaaatatatcaacaatcaaaagaagtaataaccctcaagtaaattgagcggagattcacagacgtgtgcattcaccaaaacaaatcattcagtaaaagctctacctgacagaagcactctgtaggccagatgtggttggcaaattgttgctcagaacaacaccagatgatccaggagtggatggatgtgctccagaagtagggagcactggcgttccctgattcaacattggaagacctggattttcaagtgaaaatacatcttgacctgaagttgatgcgtcacagacatcaaggggccttcatccggagagtagcaaaatattagaatttgcaagagtagaagtcaagatgtatgtgaatacaaggaaacaacagaacttacgtaagaacacctccattcagattattcgggaatacttgagagagagccatgacttgtgaattgtgaactggtactatttgcttggaatcccgaccatcattcttgaagatagatgaaacagtcacaagaatacacaagcagcaacaagaaaacagatttagggccttagtagattcatacttcaaactacaatgtgacttcaggaaatcctagccaagatttgcagctatacttagaaacatgcagacctggtatgtcgagtgattgagatatgcctttcataccataaactttatgcaaattaaaaactgaattaagcaaacctatcttctcaaattccatatctataagcaaaaacatttaccagctccagtgcaacttgaaaactgaattccgtgaacaaaagaaaccacagaaaccccgataacactctctggcactataagaaccatttagcattctgcccacaagggactcaaaaactaaaatttggactaccatcacccaacatatcatctccttgatgctagtatactacacagtacatacacaacgaactatccctatttccaggcaacagttgaattatgactagccaaaaaatgcagaaagaaatccactagttttaggttacaagcttggaaacagtaacaaagtagtaggtgaactaacctgtgtctttctataatgtaatttcttcccaatcaaacaaatcttctcaaaatgagacttcagggtatcttcctccattggcccttgcagtcgttgaaacaactgtctcgcacttccctgaatatcacagacatatccggggcatttaaattagtttaagcatagaagacactttgttcaccatctcagagctatagaaaaacctttgggatgccaggcaaagtggatggataagactgagaattccctgaatcttctgcactatcagccccatcaccagcagttttatccatcagaatcttatgccggtccttgcactcagtcggattgcgatatatacactggagaaacagtggaaaaatcaatcagccagtaacaaataccagttgttcactgatacgagaaagcaataacctggacaacaatatccaacacaaccattcactagaatagaaaaaaaaaaactattgaattatagctctgccactcagttcgaaaggtaccaaagaaagaatcccaagatttttcaaaacaacaggcacttaccttaattttaagagtgctgttcattgcatcactaatgagctcccagttagggcccatatcatgcaccaggacaacaagcgcctatatggtagaaaaagataaattagatactcataaagcaaccaacagtacatcgatgttaatgaaagatgacgaataaaaaacctgatcctcaaatagtgaccatggatttccagaaccatgctgaccaggagaaatctgagaaaaacaaaattctagtttaaaacagatattttaaacaaagtgaatggagttagtaaaccttcaagagcataccttcaggccttttatttttctgcccctatcacgacctccaataaatttgatagatttgttggggttggacatattgctcatctgggaagcagccggagaaggaatcgatccagtgtgaggaatagccatatcaaaattattctctaccaattgcttggtggtcttttgcttctttgcactatgaggaccatacagaccttacaaaaaataattaaaatatgtcacagaattataaacgattatcattgcttaagttgtataattggtggttaatgataagatgtacgtaaaaatgctgcttaaaacatgatatcctctaggagtattgtttaatttatacaggcagaggctgaggatcccccagccgctgaagaactacaatgcaccacaaagtaaaaaatgaatttgcaaataataccattcatatcgaaattattctctggtcgcttcttccagtggtccttctgcccaaataaggatgaattagaatcctttctaagaagtcaattactactaaatggtaaacatttaccaactatataacttaaagttctcatttcaaataataggaaactgtttaatagtcacctcctcaagattaaaatggaaacaaaatataactttgtttttaatccaaagagtaggactcaagcatcaaaccagttaagcaagaggcaaaaattattttatcaagctagtcaagcaataatattgattaattcacaccacctaaactcgcctttccctaaacatttgttcaaattgattcttaggattttatcatgaattcacctgttcaacatggactgacggatcgagatgccaagtttggtcatatgcggagccctgcaacaaatgaaattgaaaattgcaatccaatgtcaactaaaactaatagcaactattttctgcaaatagtaagagatatgctgatatttctaactacctgatgagtcttctttttctttttaggtcttcctgaggtttcagccatgtcataaggtaacagcttttcaaagttaacacttgactcaacctctgtgcctttttggactgccgatccaccatgcaaactactatactcatcctggaaagaactagtatccccactagacgcatctgtcttcgagggcactggtaaattcccagtagtagcacacccaaaaggactcacaaccctctgcctggaagcagtgcgcactcgccttgttggaactgagccggcattaatattactgtcaggcctttttgccatcaaacttgatgagttagagccacctgtgttgttgacgtatggtaaatcgtccccaagatcatatgaccgggcagaatgagacttcatcagattcttcctttttttgtggcttatattaaatgatctgctagactcgaaagctcccggaagataataggtacttgtttctccttcatcctcatcgaacgcagtaacattatatcctatatctacaattagagataaaaaattagcaaaaatttaaccaacccgcgaagctcaaacaacccagaattgtgcatacctccagcagtatcataggctgatgtatcaacctcctcctgcatgctacttccagacttctgggaacagagaaatactgttaaatatctttggagaacagatatatattctcaggaaaatatacgccatcaaggttacaatatgcgagctcctagcatagaacaatctcacatacctcacaacgtgtaagatgcgactcaatggacttaaggtacacctccattgcaccagatggaactgaataaaagaggcttgcctgcacagtaataaagctcaattagcaataatgtagaactatccacaacaatagtgttcaactgaggctgcggaaaatcttttcagaaattcatacttctgtaagctgatcaaccatagatatatccaatatttctgggtcgcacatattgtcaggtgttgacggtgcagctgaatgataggagatggaagagttgttgtacttcaaaaatctacttgcatattccttgacacccgcagctaaacatcttctgccattcaaacaattagattcttggcaagtctcctgcatacaaccaaggtattatttagtatgataccattaaattttacaaaaatcataacataaggagcgacagaaccagagactcctgtaggtaattatcaaagacaattcaagcaaataagaaagatcaggcttctcaatcataagaaggaaatatcagtagaattgtgttgttttgcagtctagtcacaaacataataatatggtttctcagaatgtcagtgttgtcaatactttaattcaacgaatgtatatatatatgcataattctaatttaaaagaaaaggaaagaaccatatgatcatcattgtcatcaaaaaccataaaagaggtcagacagtcaaataccttaacaattcccaagctcgtctcctccagctccccaggaacctcggcctccacagaactccagaattgtaagatagcattagataggactgaagctatttttttcagctttctgtgctgatttcgttcctcaaatctcaactgacaagtcaaagcaactcgatggcaaatttgtgcggcagcagtcattttccaaaggcgctcctagaagatgaaaagaaaaaaggtaacagaatgcaattagaacagtcacggaaaaatgttccagtaacataaaagtggacaagctcatttaagaagacgaatgaccagacgccgtagtaaataaacagaacaaaaatccacaaaatgcagcattttccatgcagatatatagaatttatgttagaaagataatttaactagaccagacctgcgcaaaatcatttgccagccatgccatttcttcgaggacaaaatcccattgagatttctcacggacctccactggtgcagtaccacaagataattcggcaattctttttttctttgcctgttaatgtattatgtcatacataaaaagatgagtaggtacataacatcataacttctacgaaaactagatagctaaaaatcatcaagtcaagattaaaaagaaaacctgtataatccgggcctcctcaagaatagcgtcctccttgacagtatctaacataactgcatctgagctcggctgatgttttaatgcttcaatgtcagttcctgacaataaactattgccaactgtgcaagaacttgtgtctacagatgcctgaggaattccagagcacaacgtgctgctaggattttcagataaaatactaccaactttactgtcattttcgagtacaaccaacccatcttgaagccttttctcagtctcggaacttttctccttagtttgcatctcagctgtacttctgtgactttgattttcaattttaaccgatttcatctgcatttcacattcaggaatgcactcactgataatggtggtagattgacctgtctcatcttcaatcttagttttggtcatttcaccaactgtttgatctagtaacccctctactctcaaagtcttctgcatagagatttcatcagagtcaagtttgtccactttataaagatctctttcattatctacatttacttctacgttgttcgcatgagaagactctgactctaacccattagtccctgtagctcctctatttgttaagctttcttcctctaccgtggaatctcttaggccattcagttgggtagaactatttttctggccagctattgttgcagctttgggagaaccaccagtcgaaactagttgtgccttctccccagcaaggccagactctccaactggcaaatatgcagagcttttactatacgaaatgtcggcttcatctttcaatagactagtcttggatccagcagtactctctcgtacaacaggttcaccatccaccttagtattcagcgaattgctggaaactctatttttcggaacgatattaccatttgaatttgcaaatactggacaagatacagaagttgtatgcatatccttttgattggctgcttcgggaatgcaaccctttccttccactgatcctctgcgaatagatatagacgttgcaagaccaccacgattctgaactaaatccgtagagcttgaccgtgctggatcccgacttatcttcgatctgttcctccgagcatacgggcgaaagatggcagaatcttctgtttctttggtattctggttggtgtgtgctttggaagatcgttctgactcagaagttctgttttgcctattaggatgtctcaaatttctttccccttcaactgacttgttttcagaatcaaacagtaaaagattatctgctgtattgggttcagaaattgtaggaactccaggtctaccgctactctccaccgagtcaccatgtggtgaggcagtcagggcaaaactatctttgacttcactgtgggggttatgggcaaataatgatgagttattccatgaaattaatgtgggaactacaccaaacacgaatgtacctgtttacaaaatgctctgcttgctgatctgtgagtgatgtagattggacgctatgtgaagttgcaataccaaacttgaaatccaagggattaccgccctgaagcagatagaagagtaaaggcttgtcatcataagttcttacacacacacacacaaaacaattatagaacagggaaataggtattcatactttctctagaaactccaattctctcctcctttcctcacgaacatcatactcttgcctgttgaaataagcatctttgttacacattggaaataatagaaagctgtagaaattatagagcatttaaacacactgcagaagatcaagatgtctcaatctgaaataccttagctccgcttgagccttctcaatagctgttcggcgcggagatgttttaacaccaataccacctccactatcgataactcctcccatggaatcaacctcagcatttactagaagatatcctgaaacgcttccatgcatcaccacgtcgaataccccatcaattcgaattctagcttaactgaaaaattatatcaagagctttcagtatttacagcattccgaatgatcatactgcagaagttagaatcagttacacctaaatgttggacctacaaataacactggtaaaatgtatgttctcatgatgcaaaaagcagtaccatatgatatcatataatagagtagcttatcagattcaagatgtaactgctcagaagatgtcaaaagtaaaacaacattcactcatatactctagccactatccaaaggaacatcaaagtgaagataactccccagaatctagtatttgactgagaattctatatatctaacgccaataccattctgatccccgagaagctcacaactacgtattccagcataacagagatagaatagaactctaagataccaaagaaatgaaatgttgcctcaaggcagagaggttctagaagcttaatccaacactaacaacgattactaggaaccaaagttagaaaatgatcagcttaagctacttaatggcgtgcctacgaactcttgaatcaagtattgagcatttccaagctaaacgagtagaaacaaagaactacagagacacaatttcagcaaacaattcacattcctgataaaagaagcactgggttcaaaatcacagaagctccagcaaagctggactctagggtttgaatagaagagtgaaggagaagagagttaaacctggaaattgaacgtagaacagaacagaacgaaggcaaaaagctagggcacaaaactcgggcaaaatcaccaaattctaaaattagtttctctctcctagggcttccaaattcttataagcttttctttcaaatcgaaagacgagaatcaatttctcagagagtagaagagaagaagctcctcccaaaacaaggaatccatggaaattgcttgcttgttgcgagattgattcctaattcagctatttttcgttttcaattttggtttccctctcgggagataaaaaaaaaaattgagttctcgttgatgtttttttttcgttctttctctctctctctctctcctcgacgcagtatgcgactctctctctctctctccgaattctgggcctgagattttgaccaaacaaggcctttctttttgtttgcttggtcttgtttcgggcctttttgtagtaataaagttataacagtttcatgttgtgtgacatggatctctacaaatctcaggcatgtcgctggttttgtaaaactatatttgtcccacgttgtccataggcaattcggatcgagtccgggttttttgggttcgggtttagaaatctaagagactaataccaaataaaacatatgaaaaaatattaaacttgaaattttctataatttaataattttattaaacataagatagtaacttaatttgtaaaaagttacaaattacaaaatattaagaatgtaatacatttaatcttattttttatcaaatagaaatattatataaacgcataaactaataaaataaactactaatttttacttttaaaataaaatttaaactatttttttctgtttagaattttccttactaacaacttctagtggaagtcttctctcatattttccatggacatgacaatagattcttttctttttgtgcagcctattgcgttgtttagttctaagaataataattttattaatttatgaaacaacttaaaaacaaaaataaaactcttaaacatgaacaattcctcacaaattcctcaagtatacctcaacatgtaaatgatgtaaccattttaaattcctcaaaaacaattttactatttacagccaaagtaaaaatttcgagttggaaaaaaagaagtaattttttttgccttctgcaaaaagggaattttactgccgtcactgcacagtgttgccagaagaagcttccttctccgataccaattttcctacaacaaatgtcgaaaatggcttcagtgagtctcccttctcccttctcaaaccgaacatgttctcttttttcctggtttttcgtatatatgagtttcgatttcgccctcttgaaagcctagtttcgatctatgtggtagacttagatgtatattcgtgttcgtgttgcaattgatttcactggatctctttgctcatttgctcattcatttgtatatttatgacttggttcttcttctgttaaggtttccattgattgatgagacttttcttattttacttattgatgtatctctcgtttggatttatcatgatatatgtttcttggtgttctgattccattcagcttatgtattattggcttgtttgtgagaatttagaaggcaattgtaattgacttgagtctttgcttaaacggaagtgaaactgttgaatgtagttatgtctttagcttgctttgcctcttgtatttgaacttaggtgatatatgagcaatactatacagtttctttttcgtatttagtgtcctttgtttataattctctcatatttttccatggacatgacaatagattcttttctttttgtgcagcctattgcgttgtttcggcagattccaatggcattcttggagcgagtttaagaggatttcaacaagagatatggtggtggataggaatggctacaactacttaacccaacagcttgaacaaagagttttggtacttttggctcatcccgaggagattagcaaacttgccaaggttaaggctctagtgaccaaaatgaaaggtgttatgatggagaacattgagaaggtctgaatcatatatccatgtcaatctcataattttatatcattcatttgagaatatatgacttgaattttctctgttttttcccacttatgcgaaactgactgaggtttatgtaattcattaacttgcaggctcttgaccgcagtgagaaaattaaaattctagtggaccttcgttcaaagtatagtaacttaccttttccctcatatgtgagctttttgatacaatatatctcctttctagttgtcacgctcttatatttccagttctgatatctacagggtcaagaagatatcataacgccaggaacgaaaattacaagaaagatgtggtttcagaacatgaagtttaagctcatagtccttggtacatcttcgtctaggtttgtcttaataactgaaagaagaagaagattacgttgacgaattataatgcccacattgctctactaaattgatgggaaactgtacccgaggtatatgcccttctttcttcattctgtttttgcgatctctttttcataaattttgttagggataatgaaatatgatgacttagtactgatttatgatcctttagggtatgaatatgttaagctgctgggatttgcaaatatctagattaggtctttgtgatgatatggtttcttgtaatctaaaacccaattttgagttctgctactctttttattaggaaaagaaacaacatctaatgagaattcaccattcttactttatagaaacaaaaacatcagataaagatacaacaaacgttaggaaatacttcaatacaataccaacaggcaacaacaacttgacataaacgatcaaattcataaccaaaagatcttaatggtttctgctctgaaacagaaaaactagccactccggtttgtatgaagcaatgagttgtgctattgccaatccaagtaacacaccaaccccataccctattcccacgcctttccaattcaacacttgttcctcttcttcttcctcttcttcttcttctttaggatgttgtgctggtggtgcgttagtcccaaagcaactttcttgaagaggcaaaccacaaagccctgcatttccttcaaatgacgatttaggttgcccagttatctgtgttccttgtggtatttcaccgttgagttggttgtgagacacgttcatgtatgccaaaaacgagagagtccctattccattaggaattgtccctgagagttggttacttgataggtctagtgactcgatcttcttaagattggccaaagacagaggaatatggcctgtgaaggcgttgttcgataagttgagtgcgatcagtgcctttaagagaccaatagattcaggaatttctccttcaagtctatttccagaaaaatcaatggtcgctgaggaactaaggaccctattttgctccatagacagacctttatattgtaaatctatagcttccagagaggtgaagtaataggtcccgtaaacaaccttgttatataccatatatagaccttgatcttcattcatcgtgagtgatgatgctttccaattctcaaaaaaatctgggggcaagctaccagtgaatttattaccagctatctcaagtatccgcagctcaggaaaacccagagagccttgattaggaggagatagaggaccatagaagttgtttgaatggagaataaggacttgcaatttcggtaaagccttaagggagaaaggaaatgtatctttgattccgttgtggtccacacttagaaactgtagagctgagcaatttagaagagaccttggaagctttcctgttaatcgattgtagccaacgtcgagtgaccgtagaggtgcatcggcataataagtgtctggaatacttccttccaagttgttcttccggagattcaaaatcaagaagttacttggacatggaggaattggaccggtgaagttgttgtagcttagatcaaggaaaacaagtgaccttctactgcagattgaaagaggtatgtcgcctccgtatctattgtttcttgcagagaagtagttgacagagagcggtagatgtggaagtgctccttctaaattgtttgacagcaaatttaagatccgtacagatgaatttactaaaatttctgatgaaccttcgaagccagtaaacaaattttcttcaatgaaaactgagctcagacgaggaaggctccataaccactctgggattttcccactgattttattggttgataaggcaataaactccaaattcggaagggtctttaagatgtttgggaaaacactgatgttgcagtgtttcaagagtaatgcttccaaggtcgatggaatgtatgaatccaaacttaaactagcctgagatatccaaccaccggaaagatcgaggagcaacaaatatttgagagaggagaagagtttcaaattaattgggtagcttgtgtttaggaaagaaaggtggagctctttgaggttgataagctttgagataggctctatgatttttccttcaaaatggttttcacctaggttcaaattctctagccttgacgacaaagaggagttaggaacttcaatagaaccactgagattgtttccacctaaatcaagataggataagaaaggcatagtgaagagagaagaagggatggttccagagaagtgattatcagaaagatgtagaatggagagcttggttagattttgtacaagcggaagactaccagtgaagtcgttcaagggaaggtacaactcggttaactgggtgaggttactaattgtggggggaacttgaccgaagaagctattagagctaacatccaataactctagtttgttgagattaccaaattcataagggagtgaagaggaggtgaagttgttagaaccgagatcaaggtaagcgaggttgtgcaactcaaagaggctactgttgggattaagagttccagaaaagtgattatgagaaacatctaaaattgtgagcttgcgtaaattccgcacaaacgataaactaccagtgagctcgttatggtggaggagtaaagcggaaagcatgcttaggttactaaaagaggaaggaacttggcctaggaagccaccagtagacataaacaaaacctctaatttgttgagcattccaaactcggaagggattgaagagggggtgaagttgttgtaagagagataaaggtgacgaagctgatgaaactggaagaggctactgttagattttagagttccactgagacaggccctgagtcgtagcttcatgaccgcgcccgtggagttatcgcaccacaccccattcaaggagtcactatggttgcaagcatgagtatcaaactcgtttttgaactgcgtaaaggcttgaatctggtggggaccacaagcaccaagaccaacaaccgggtcattaaaagagaagaagcttgaagccaaggagacacaagagagtaagagtagcaagagaaaattcaaacggaaaagcaattcagacatgatgaaaacagctttgtaagaaagaaaggtttttgatataagaaatgtgagagagaagattggtataaataaagataggaagtagttttgcatagtggagcacaaattgacttggaagaagttagaggtaagtgaagtcgtctttgtattcgggcttggagaagtgaagtccacgttagataatttttcttaagtataatttggattggaaccacatcactttgaaagttctcatatatatgttcaaaatcacataaataaaattagcataaggacaaacatattggatacgtttgattattggagacatttcgtagcccgacgtgctttgacgaagaagaattggcgttgttttgatttgtttgtcgagtatcaaatttcgaagttggtatggtaacgaggcaaagtgaaagtggtcagataatggggaagatgatagttttagctaacaaaagatcgttaaaccgattagaagatatgcggtaaagaggatttgaaaatgatgaagaagatgatagtttcatttttcttttacttgaatgattttctccattggaggatcatgagcacacttgcgagttacagcgtcagataatagggccataggggtgaggcaagatcctactacaaattaccaactgatattgtgaccgtgggaaaaccgttaatcttaaaaagaaaatcattttatgtattactatggtttttttaaaataaataaaataaaactaagaatattttcatgattgttgtagatttcgtgaattatataaatagtttttcagcaaaaatatatgtaatttttagaaatgctttactctttgtgtaaaatacatgagtaatcacatatgtatacatgcatgtagttttatcctattctattttattttcttctaatactggtgataaaatcgtatgatgatattatttttaatttctaaaatatttatttaccaaaatgtatagattagtttacacttaataaacttttatgtctatctaaattcgcattatatagagttaggaaaaaagtcaaaacattatatattaggaaataatttaatatagagttaggaagaaaaccaaaaatgaaaattcatatataattaacaaaatggaaagaattgaaaaaatttaataaccatgcataaaatacaatagaaaaatgaaaggggtgcaaaaactaaaaataattgacatatattatgtatatttttgactgagaacttttctctctctcttctctctcctttatttttcagagagaaagaaaagttttcgatatgatttcgtcggcaagagtttttataaaaacttctgttgcaatttcatggggcgtttcactggcttattaagcagtcaaaacttttcttctggcatcggtggctctgttatgcaccgttggccggcaaacttccagcatcgattggcttcttccgcaacggtggctggcttcgtctccatcgattcgtcttcgagagattcggatggcttatgtcccggcttttgtccggttttgggttgatgtaagcaagttctaaaaaaataaattttcctttccgattgaaaagttttgaagaagaagatgaagaaggtttcagattttcatcaagtggagtcataatttcatcaacactcaattggaatttcgcctctaattcttcgggcgaagaagatgaataagattctggacattttctgcttggaatgaagattccggtgtcacctctactttccggtgatcggaaattctctcctcttcaacttcccacgtgtcttccatctcttttcgacttgccacgtgctctttgcgctgttcacgtcacttttccttctggcaaaggaatttatttgggctttgggcttttgttgttttatgggttatgtttgttttttaaattgtaggcttgtttctttggctatgtataattgggtctgttcacttggctttgtaacattaataagacacttgtgacaaaaaaaaaataattgacaaaagtaaaatattgagttgaagaaagaatttcacttccgtcactgcgcagtgcgatccactagaacgaagctttccttcttcgaataacaagcaaacaagttcacatacaattgcgacggtcacacgaattcaattacctcgtccataatggcttcagtgagtctctcttcttaatcggaacacgttctctttgtgcctggattcgcgtaaaattgagtttcgatctatttggtagacgtagatgtaccattttgtgttcgtattgcaatcgatttcactggatctatttgctcattttcaatctccaccagtgacattcacgtgtgtattgatggattcgttctgtttctattgatggattcgatttttgttgttgtacttatttgattcatcatctctcgtttggattaatcttgatctctgtttattggtgtgtgattccattcagcttatgtattggcttgtttttgagaacttataaggcatttgtaattgagactttgcttaaatttactttgctacaaccaaactttttagcatgtattgttgaatgtaactacattcaacaattcgggtgatatatatgagcaataactctacagtttctttttcgtatttgtaaaccatttagggtctttttatgattctctcgtatttgttcatggacctgactatagattctcttctttttgtgcagcctattgcgttgttgcagcagattccaatggctttcaacaagagatatggtggtggaaaggaatggctacaacttacaaagagaccgaagtcaaaggtgtttttatggagaacattgagaaggtcagagttatatatccatgtcaatcatagacaaagtaactttgctcaccaatatcatccttacactcaagctgtctaatgtaaccaatgggaagtatgtctagccttggaccagagttgttataataaaaagtacccaactcgatgtcttgaagaaatggaaagatttgttggttgattgttgcattctcagggtatttgggacaaagattgttgtgataatccattctggcgagtcttatgaaatcatcgaaatagttcagctcaaggatatggaacttgacgaaggatatatacttagctctcactcttcacttttcaggcgaccaaaagggatagtagagatatgtcctcgtgacgcttatcaactgacaaaaaaacaagaggggatcataaagagcatccatatgattgtcagagacagaggaaaatttatcatggtactcttctttttttttctttttttttttctttagagattaaccagagaatgaagaagaagaggtaaaagatatatgagaaataggtgaatggtttttgtctaagtctttcttttgtgtatatgaatctttattttcaaagggaaatctcttttgaattagttgggttaaactttagtttaaagatttctttctactttgttgttatgattttttttttttttctgtaggaactttacttgaaaaagtcaggtaaagtagaaaaggggataaaaatagactaatgaagaaaatctctaaaggggttaaaaatcgactaatgaaggaaaaaaatcctaaagaaagaagaaagacatgacagtaactgcgccttccttcgctctccactttctttgtcagcttcagacaaatgtgaacgcaccaaaaggtacgtgcaaagaatacaaagtggaacaaggcaaagagtttttagtatttaccatggaaactgaacgatggtgatgatgatgacaggttcaatggtaaggaagactcccgttccctgaaaatgacttgatggaaattgtgtgccaagttgttggagacagatcaagactttttagacctctcactagaagtaaggtatgttttaacactgctaaaaaccaacagagaaagattgaaaagaaatgaaaattgtgacgtggtgcatgtgtgagatagttcttggtgattagcatggtgtataggttgggagtttacagttatggaacgtagggaattatagttttggtatgtgtcatagtggaactaagaggctgcagatcaacaagtcttgttgagacttattagcaaagagttatattgtgtttcagtgttagatgagttgtctatttaggaaaaaatcaaagatgtatatgaatatgctacgaagaattcaccattcttatttatagaaaacaaaatagacacaaaagcatcagtttatagataaagatagaagaaaggtaaagaaatgcttacaatacaataccaacaacaacttgacaaacattgaagggtcaaactcaaaaccaaaaaagatcttaacagtttctgctcttaattaccagagaagctagccacttcggtttatataaagaaatgagttgtgctattgccaatccaagtaacactccaattccgtaccctattgccactgctttccagtttaacacttgctcatcttcttcctcttcttcttgttctttaggatgttgtgctggtggtgtgttagtcccgaagcaactttcttgaagaggaaaaccgcaaagccctgcatttccttcaaatgacgatttaggttgcccagttatttgtgttccttgtggtatttcaccaatgagttggttgtgagacacgttcacgtatgccaaaaacgagagggtccttaggccattaggaatagtccctgagagttggttacttgataggtctagtgactccatcttcttaagattggcgaaagaaagaggaatatggcctgtgaaggcgttgttcgataagttgagtgcgatcagtgcctttaagagaccaatagattcaggaatttctccttcaagtctgtttcctgaaaaatcaatggtggctgaggaagtaaggacgttcctttgctccatagatagacctttatatcgtaaatctatagtttcataataggtgaggtgatagttcccgaaaataaccttgccatataccatatatagacccagatcttcattcatcgtgtgtgatgatgctttccaattcacaaaaaagtctgaggacaagctt

SEQ ID NO: 68 - DNA, 77483 bp, Arabidopsis thaliana
aagcttctacgtaggagtaaaaattaacaaacaatatatagtggttaataaaaaatatatagttttcatccttcataatataatctctcttataaaaataacatttttaaaaaaggatgataaactaaatatataaaaaaaatttaaggaaaatcaacaacaaaattccgcgcgtacactcatctagttaagtttaattaatgaatatgatatgtaaattctaagacataaaatgaatggagtaagcatggcgtcatgatgatcaaagccctaaaagagcacccaccactcgggataatgttcacaaatcgtaaccaaacttttttctattaaagaatttatattcactttaaataaccttaaaatattaagaaagtgcaaacacactcatatatgtgtgtatattatatatgtaaaagtgtgacataagaagactacaaatggccacaaatgtgaaaaaaggaaacgcaaagggaccagagacaacccatgcgtgtgaccacaaagtgatgcttacttatttcttatatgcttacacatatttgtttattcataatccagaaaatccataatatatatgcataaagatcacatacacacacatgggcaagcacttccatatacaaagaaactaatttatactactatatttcatatttgcttccataagacctacctcatcacacgtcaccgtttcatatttgcaagatagcctcttcaaccttcccaacatttcgtgcactaataatgttcgaattaaacaaaaaaaaaattataagaataatgttcgaattatcgacattttttcggatgagacgactaaacaaaagaatgtgcatccttttttcttatggatgatgaatgacatatttatatggtgtttaataccgggtggtaaacttctaatgattaattgagttatggtcgaactgagttaccgattaattaatattgtctttatttatttcattcaccattatatataaaaatgaattttagttagtgactgtgaagttatgaattgcaccataacgtagaacaaggtaaattaatctcacgtttatatgttacagttttctatgttaaaaggagaagacatttatataaatacattttagaacaattaaaccagcagaatataatgcaagaatcttcaatcatacggtagtttattgtaagcttcttctcacataacaaactgattgagctagctaatattattgctaatcgtttggttttgattgatttaaacatgatgattgatgataatggattaataattcatacattagttcacagttcatgatgtacatatgtgccacttcatggagattgggttttcatacgccaataagataagtaacttcaggcttatatttgtagaactttgtgaaaatgatatttagatatttattatatatatattacaaaatctacgttcacctaattttataatgagtaagtaattaaatattgataatcttatagctagttaccagagtgaaataagagaatctgatctttgttttaatatatatcctaaaaatctgtctgaactccgattttttttaaaaataaagaattataacaaaattaaagaattagaacaaaaaagaattgtcgacactttgttttctattataccgttttagctctgcctaaattacataaatcttgccaaaattaaatctcttagcgagattgttaggctacacttgtggattcctctggttcatggagttcgacctaattacttccaaccatgggatacaaatattagccggtgggagacacacacacaaaattaaatgaaacctaaaaacgaaagaacgcttttgtaataaatcatgatccaatgcacacacttaaagacctttgcacacatatatgtatgtatttacacatacacatgtaatgatgtggtcgtgaagacctttgcacaaatctgttgtgtgtagtcacatattcacgtgtaaaaggacaacttctggttctgtacatatatataatcgtcataaatagatataaatggatgactactgatagttttttttgttgttaaagaaacttttttttttgttaaagaaacctagtgataataactcagggattccctaataactcaaccagttattgcaggtgtaaagcgtcaataaatattcgaattcgagttcagtttgttactacttactacgatcaatatagggtgattggtgcatgacatgttaatttagacagattaaggtgtctaaaggtcccttaatctcctaattaaaaaaacgtattatgatatatgttttaagttccattcaaacgggtcgacagtatatataagcctagttaatgcttatgaaacgagtttataacctatgaaattctttagtcgatcttatgggattcaatatatcaaaacagccccaattttaatttttcattggttattgcaatttgcaagtaatatgaaggatcacaagttttataatcgtgaatttcatttagtgattgaaaaggaagtaaaacttacatttttgtaaaaaattaaatttagttggggtacaaattacaatgttttcaacttatataagagtacatttcacttcgtaattgtttctcaataatttctccatataagtttcattcaatttcgctgatttattttgttatacaaatttttttaccacactagtttttttttttttagttacagccaaagtaacgaactgatttggttttaaatgagccatgcttgtcaagatgaaaatgattttagctttttcaaaggccttttgaacatgaacactgactttattttaaaggtaatgattataggtttcttccaacaatggtttcctatcatatgattcttcaccataaaattattacattttatggaccaacagttaagcacatactcgctaaagggtatggtctcgtgacaatattaatataatatattgaaaaatgtatttttgttatatagtattggataccgtgaaacattatcaggttatgtccatagtcattagaaactagtattattattgctgcttttgatatgatgtttatcactttttcagtgtataaaatatggcttcatgatatatatacctttcgtatacttgattttgatgcaatgttcattcttttcgtaaatactagtattaaaatttagttaagtcttctaggtaagttagttaaatctagtacgctgtatagtttaaatagtacttcaatcgaacaatttgttttaatacatcatgtttttattggtgtattaaacggagcaatattcatgcatcttgtattttaattaattaatactatttttaaaaaatcaatcaaagcatgaatactcatggaaaaaaatctatgatcaagtccttagttgagtgattttcacaatttaagggtcggaaaaatattttataacgtctatatcaatatgtgatctgcttttatacaaaaaaaatatataatggattagttaaaacatggtggagtcaattatattaaaacattactgataaatatgctttttaactcaaacatagcaaatcaaaaatagtaaaccttcacatacaaatatttatacatttataaacgcatgaatatacatttttataaatattaaaaggtttctgagtttaattcatgattaattataactaaagatactaaaattcataagtagattgaagtagctcaattgaacaaatctcagcaaaatacatagtatatatgagatgtaaattcgattgttcaaatgtcttttcattaggacctgtgtaaaaagttttcgagagaagaattatagcgaggtttgtttcaagtttcaacaagaaaaaacagaaaagaatcatgtatataaatcaatcaagtactgataatatagaagtattattggaaacaaacaagaagagaagtaaattcaaagacaaaatgatttagaattcttggagaaggaaaaagaagaagacagcgtggagaaagagcccagaatgttgaacgtcgtgtgggcttcactctgcaccaccaccccaaaaccctagttcataccctatcctataatttatactcaaaattttctcatttcttctattatttatcaccattcatatggaagtatatatttaatgaagaattttcggatctatagatcattatatgtaaaatcagtttttgataaaacatgtgacagtttcacaaaaatagttcatctttcacaaaaatagtactcgaatccggtagcattttagtatcctactatttagtttttccactccttttcattatatatataatgatataagtctttttacctctttttcataagtctttttaactctttttttctttaaaaatgattatatgcacatctacttgataaactggcggatggtaaacttgagttaggtttgagaattttcactaattattttaggatttgaatcttctttagtatgagacaattaagctaacacactcgaagatatattcagatcataatcaaaatttatccgttggatatgtatgaatagattaaataaaagagagaatctcttcggtgcacttgagacaaatctataacatagaaaatcttgattagattaaaaactagattaaagaaggaaagaaaaacaagaaagtgggtttggctatacgaaacgagtgggattattaatgattaaaagtaaaagtctttttggtctctggtcggtcgacaatccgtgtgtcctgtggtcagtgtttgttttttattcttttggttaattttcgagtattattatgctttccactgaaaaaacaaaaacattaagcagccaaatgaaattcttttaacgcgttgtttcagaacctgatgaaaaaacaataatcatgacctctttcttcttcccctttaaatgcatgtcaaattgtgtaggagtgtttgattatataaattaaatctactttagtcttctcttctttgtagaattgtagagtcgtggtataaactcgaaaatttcttattatacttatagaaattaggcagacgaaatgctcttgatttgcttacaatcttagattaggtttaacccaagataaaaaaaaactttgttttgatgaagaaaaacaccttagttacaattttggacatcatcttttattttcacagttagcatctgagacttttttttcttttcttaaatagagttcttagacaatatcttttgggtccctgatcatgtcaaatgccaaaaaaataaataagtatacatgattgtgtctatttgaccattctaacttctaaaagtttcaaatgaaataactttgtcaactattatttttgcctatgaattaggtgctgaccagaatcatcttgctaaaatcatgattttctactattgcatattattcttgatcgcatttcacagatcttaatatatacgaaaataactgtatatattatcaactgttacgattaatatataaccatgcatatcgaaatattttgaattagtattttttttgctaaataatattttgatatagtggtggcgtggtattcctcatttacaaatcgcatgaactttatcctaaatacgattaacttaagtagaaaaggcacaaaaatcttctattcattaacatgaaatcaattcttaagaacataaataaataataatattcataggaagccaaatccatcagagaaatccacaagatgatgacagctccccatttagaagtcgtaaaagaaaagcaaagaagatgtgcagcacttgcagtttcatttgttttgttagatataccagaaaaaaaaaaagagtggtcccataaaaacctgtaatatataacattttaatcaaagaaaatgatagatttttttattaaacaggaaaaaccactaacttttaattaaaaaatttggaatacagcaatacatcaaaaatccattaacggtacattatagttgaaaataaattcaggttacataatattttttgcgtaatcactatactattctgccattttatatggaactaagttcatacgttatttctcacaattctccttgatgtgatcaaagataatggcggtctgattgtataacccggtgaaaaaggttttttggaaagaattctttaatattaaaatatcaaataaattttgtttaaaaattaaggacacattatatagcactatatatacacatgtgtatgcattatcaaatgggatgtttgtgaccttttgtctcttcttctctaaaattctctttctcccaaaaactaaaaaaccaaaaaaaccaaaaaatgtacgcaatgaaagaagaagactgtcttcaaacatttcacaacttacaagactatcaagaccagtttcatcttcatcatcatccacaaattctcccctggtcgtcgacatctttaccttcttttgacccactccatttcccatctaacccgacccgttattctgacccggttcactacttcaacagaagagcttcttcttcctcttcttcttttgactataacgacggttttgtctctcctcctccttccatggatcatcctcagaaccatctaaggattttatccgaagctcttggacccatcatgcgtcgtggctcgtcctttgggttcgatggtgagatcatgggaaaattgagtgcacaagaagtcatggatgctaaggctttagctgcttcaaagagtcatagtgaagctgagagaagaagacgagagagaatcaacactcatcttgctaagctgcgtagtatattaccaaacacaaccaaagtaagtcgtttataaataaacactcttctcctttcattatggtttgatatttcagaaactaattcactattttgaaaaccctatggaaaaatagttttaattaattaatgatccttcaaaatttctctttatttagttattattggttagagtagtagtaattgttgttgttttttaataaagagagtagtagtaattgttctttttctgataaatatagtactaattattcagtttcaaaaatgataagtactatatttttcaatattatcatttttatctatctctgttcaactattatcgtttagtagttgtaaattttcaaatttaaaataaatgtatcaaatcgatatttttggtaagtaattatagtccacagatggggtatttttgtactagttattattattgaagaagaagaataagaagattaaatacttatgattcgttttggttttgtatagacggacaaagcttctttgctagcggaagtgatccaacacatgaaggagctaaaacgacaaacatcacagatcaccgacacgtatcaagtcccaacagagtgcgatgatctgaccgtagattcgtcttacaacgacgaggaaggaaacttggtgataagagcatccttttgctgccaagacaggactgacctcatgcatgacgtcatcaatgccttaaagtctcttcgtcttcgaactctcaaagctgagatcgcaaccgtaggtggtagagtcaagaacatcttgttcttgagccgagaatacgatgatgaagaagatcatgattcatatcgtagaaacttcgatggtgatgacgtggaggattatgatgaagagaggatgatgaataatcgtgtgagttcgatagaagaagcgttaaaggcggttatagagaagtgtgttcataataatgatgaaagtaacgataacaataacttggagaaatcatcttcagggggtattaagaggcaaaggactagtaagatggtgaatcgatgttataattagttaattaagtcaagtctttattaactagggttagttaattagacttgcaaaatgggatttgattatgggttggtgatattagtattattttcggtgtttttagtagttgggattgggtttcttcttctatgtttttttaatctatgaagaaccctttgtttagggttttatagtgatgagtttggtttatatatggtagttaagacattttatcgtcttaattaatataggaaatgtatagagcttgggtttgtattaatttatcaagaagttttatttatcatattcatgaactctgcaactatttaatcttttgtttataagcaacaacactacgtagtaatagtatagagtatagttttatacttgtcaatttattttctattgtgactgatataagagaaatgacataaagaaatctcttacgcatatccattgttattttttctgacaaactacaacgattatgtcgaaatcagtttttaaatgtgcatgggagaaatagtctatgtcgtacttactctataatttatttcctcagtttctacatattttttaaaaccacaattttttcttcacatccgatatataattaatgtgatatttcttaaattagattgatgtagagagttatgtgacggaagatttgtgtaagttatatcaagtgaaatcgagagtagtagtagatcgaatctttttcgtgagaagtgaaaacttagatcttagttctatttatagaaacttagttttgggatctctgataatattgtctctttcgccgttactgacttacgttatttattacaatattacagagacggttgataccacaagcacattacgtcatgatctcgtcattttgtatctactggtttttcctttagtccaaaattcaacgtagaaccaaaaaaatgggcttattaatttggtgttttcttgagtcttattacttagacagctttagacaaattctgtattccggtccaacagtcggaaatttaatccactgaggaaaaaatttcaacaaaaaatatataaatggtaaaatatcggcaatatttaataatgtaacaggaatatgaaagaaaaaaaaatgacaaaaaataaagaaaagactttacaattaagaattacgagttaaaaggccaagttttctagacccaattttggcccaagagattcgatatgtgcttttgaagagtgtatagccggtgggtgatgatatcattttgacccatgggctgatgttgaggcccaataaagaaaaaatataaaaatggcctatacagggatcgaacctgtgaccttcgcgttattagcacgacgctctaaccaactgagctaataggccaatctgattgtaattctcgttttagatattaatagatgtaatatagacatagtatatgaacttgtgaggtttagaaatataagataatcaaacagattgacgataattgtcttataacagttgacattaagtaagaaattttcttttgatgtctatagagtataaacatatctattatataatacgttgagaaaataaaatcatgtgctatgttacagattagaagaacacaaatatgaatgcacctggagagaagtccaccaagtgttgaagtacaaggaagtgaacatacaagtatgtggaccaataatgttgaatcttttttaaacatatgtataataataatatctgaaacattgcatgagaccgaagactacatctacatgcagaccaaaaacactttagctagttggaatttgtgattagttggagacagacaccataagaattatgaacataattccgaacaatgaacttggtttataaacacatgaccatgcgaaacaaatatactggtgtgaaaaatgaaatagcagaatcatttatggaacataacttaatttttttcttataaagatttgcattagcctcccgaaataaataacagaaatcgcgactccaataaattttatgactagtgtaaaagttatggaatcattgaatcttgaaagctattgagttcttgaaacaagactaaaaatggaaataagatatagttcacaaatgttacgtgggaatgtttagttcaattgggtaatgtaaaataaaccattaaatcggaaactccatgatgtgaacatcaacaaataaaatttggacccagaggtgagaaagtgacaagagaagaggacgatggttccggtcacgacggcgacggtggtaggaccgccgtgttggcccgccgcacgtgatcgagcctatcctcttgtctttttgacctttcaacttcttttgtctcttcctcatcaataactttgtgcgtcaagattttcttactgcagacagatttttttctcactgcacatagatggatgtacaaaacaacaagagaaccgaacttagattctatagtgacaattgcaattatagttatgatgtatcgggataatactttctaccatacagtttctttattatagatgaaaagattttatcagtctaatatgtatagtctaagctatgtaactttatcattcatataacaatatatgtatatataatatatatatatataatatatatataatatatatatatatatatattcatatgtacatgacaaaataaactataggtgtagtgtagatgagtacataagacatatgggctacatagttaaagttggccgacaacagaatttcaatgagacaatgatgcagattcagtttcttcccacctgacatttcgaccccattttcttcctttctttatcgataattaatttagtgttcaattattatttttcatttttgatacaaagtgttcaaattttaataaacttcagcaattaatttagtgttataatgaggatattttgtggttggagcggttgagaaggtctctcattcaaaacctttgatacaatgatactacaatcaatatacttgttaattttaaaaataactataaatttatttgcgaaaaagattggcaaaaaaaaaatgaacattgacaggccttttataatatgggcccattagctgagtgcatggtttgtaatcagttttagtcttcagatgatattgagtattgacgcaattacaaagaagaaaaggaaattaaaattcacttttatttatttatagtagaataaatttgacgtgatatagtacatgtctttccatcataaattaatttggcacctaatggtcacgtcagagggaccgaacaataattttcgatgatattgtgtcccttgatttatatctatagtcattgaaacttgattagtttaatttgctaatataataagaactaagcaaacatacatcatcatagttatatatagagaagtcttaatgtaagtccaaataactaaattaaagtagagttatcccatacgtggagcaccaacattacatatgattagacaagtaaccaaagattatttaatttcagtttttaaattatcttcaaatcaattagctaatgatttgaactaggaagaggttagttggtttgactaaaaaatgggagtttttagttcatgcatgaaaagcagtgttaggcaaacttgtacctcgcataatgattttgtttatttaatagtaattgggatatataatattttttctgttaaaagcttcgtaattgggttttatgaaccgaaacttgctattaacggcgatgtatattctatgcatccgtgtaatttgtgagatatattaccttcttccacaagaaagaaattatctttggtttcttgttaagttaaaacatgtataattgtataaagttggttgaaactttaagtatttaacactagttattgtgtatactgacttcttcttttttttttggcaaagttactgacttcttaagatgtaaaaaactttgcaagtttttagtcgatttgttagatatgttaccattttcttatatctttcaacaaataatataaatgcgatgtcacatattagctagaaaacaaaatttcaaataaagccaatactaatcacaagaactgatcttggttagattatgtgtgagatatatagttgaatttacacagagaattctatggaacttataaggcaaaagccattacaaaattcatcccaaacttttattcgtatatttacatatatatcctccaaaaactaaacatatatccatatcgaaagtgttcaacttccatcctcctacgattgtctatcttcttgcaaaactcaaaccagtttcctctttcatatcctcttgcaagcaaaacccaagccggtttcctccttcgtatcttcttgcaagttgcaatcatcgctttgatccggttaagcatcaaagtatcaacacttgaatcaaccaagatcaatcttgccaacataggagcataacaacacatcgtttgatgatgtaaagcttagctctttgctctctaagaacaccaccaagtcctctgctgctcgatactcttctcttcaaaactcccatcttcgatatagagattttcttttagggtttttctttgattgttttgagttttagttgcgaagtagataagagaaagtgattaattgaggtgaacaaagaaatgtcttttatagaagaagaagaagagagttgtgtagtagggacaagaagtcgaagtcgcgcgtggaaatgcaccccaacccacccgacactgtctctcaccatccacttgtgttaaatgtcacatatcattttcaatgttttgagatagacgattataattgggtggtgtgtattcgtgttaccgtcatatatgttaggatttgaattgcgaaactgatttataaaacaaaattgaaacataagtaaaaactagttatggtgattcacttttaaatgtgagaattacataaagttttcgaagttcacattttttttttcatttttcagtgtataacaaacgaattgggcttcaagagtaaataaatgaaaagtttaagacaaacaaatctacatgttaatcaacaagaaatctatcattcacacggcctcaccttatcaccaaaacattatgctccacaactcataaatattattaggagaaatccggtaaaaatgcacgtgtgatttgtgaaataaaaatctccaggttcaagatatcaaagttcttattcgctgtccacaaaaagacaatataatgaattattgtacggttatataaatattttttcaatgtttgtgttcctatatattgctattttctgtagaggatatgtaaatattacatagttaaggattatgttgtagttacttttagcctaatctccttcttgtagcacactataaatacttgtaatcctctctcaataatattaagcttcctattctacatggcatcagagctttgaaggcaatgaacacggcctctttgctacaagaaggagattaggttgaaagtaattacaacataatctttaactatctaatatttacatattcaatctttcattttccatgttttgatgaatctacagtttttggtgcatgaaaaaaatcaaattattgtatgatgatttttctggaattatattgccccaaaaaaatatttcttaaatgttagtttttatgcagtattgtgaatcagaatgaatacttatctacgttttgtttgaacatgaatctgatgaatgcgaaatatctataagccaatcgttttcatttttatatggtcacaaaccgtgaacatacatgccctctttgttccctcttttatttcccaccaaatatctttgagacctataattaattataatagattgcaagaatacaaaattttaaagctcttaaattaacatatcatatttaattatttattcgatttcagatcatgaatcaaaacatagttgaattataaacaaaaacattagtattcaactaaaactgtgattatttgtacatcttccaatatataattttatataatgtaagaatatgtattttcgattattttgaaaatatagattcaatagattcaaaattttggtaccattaatatgaaataattgagcctttcatttaaggatatagtttatgaacaataatttgtttgtgtgttggatccacgtcagtacagttagaccttccatttgagttcaaaacatatggtgcattgacgacgtggcaatgatggttttgtaagatgacatagttcgtagatactaactaaagcaaaaagtggatgtattattaattgtaactgtgttttttcttccgtatttggattctaaacatttttcacattatctctttgttgtgagtgtttatacttttagaccaaattagtataatagttttatatgaagttcaatatacatttgaaagccgtttaagcaagttttttcatttattgatattttcaccaccttcataggacttgttgacaagcaagttcgcgtctgctattttcaacactttctctgaatttatggagtcccggacggaaacatttatatataaaaaaaaagtttcatataagtttagttgtattaactcttgtgtgtttgtttgttacatggtgctttaaacgggctttgtttcgtactttgtagacaagagttttcagtttgcttcactccttatggcctctaattctgaagcatttgcattggttgccacatctatgatctatctattggtttgtcatctaaaaatcgaaatgacaaaatgtggcaaataattgcgtctggcagattgttgaacacagccatgtttctcaaagaattcaaatccagtaacacatctgggccttgctttttccagcccatgagttgcttaaatttggaaattatcgtggggcgtaaaataataccgtgacaagtttagattggtttaaactttaaacatagcaaaatatggcctacgttgatggtctaagaagggttgtaattcttatttcatctagtaacggattgattacaaataaaatgtttatagctttatatgtttgctattcatcacaataatcacttcacatcacttattaacgtttcaattttctctaaattaaaactcactccctttagcatttgcggtagtatttaatggtagatttcatatgaccaaaaaaaagagagtaacattaaaactgcaaaaagcacttcacagttttggactttttagatataaagtaaaatttggcccactaactgacatagcttagcccatttagtcagtctaaatttttttgtagcttacaaattcttatatgatgatgctggcttgaaaatatcttatggtgattatgacttgtatgatgattatggcttgaaaataactgacaaactgtaattttttatgtacataatatacacacacaaaatatacatgtataagatatactggtatgtgtgtttatatggaattttgttgagtgtatatcagttcaacgtaggtgccaaaataattattatggctgattaattaatgttacgaatttcagagatcagagaagaacttttgccattagtcgtatttaatacatcaagaaattgtaatctccctaatactcagtacaataactgaaaaaaatttcagctatttttatattgttatcttgtgttcatttttttctttatatctacaaatttcttccccacatctacaaaaacagttttcaaaccagcaggaccaacttcttcatctacattcacatcatccacagcagcataagcttcagccacagactcatcaattttcttcttcacaagctcagtttcagcgacagactaagcaacttccttcttcacaagctcagtttcagcgacagactcagcaacttccttcttcacaagttcagtttcaacgacatactcagcaacttttttcttcacaggctcagtttcagcacagacttagacacttttagaacaatattctgaaattttggcacaaagtttacagatgtgaacttggtaacaattcttcttccagacaatgttggtttcatgaatccggagcaagaaagaggtaaaccaaaagaagccataatgaaacgaagaagcagtagcaagagtagaaaagaagcagtagcaagagtagagaagaagataaaatgatgaatgagatatatagtggtgaacattatatctctatctctacgagaaacacatatagatatcaaaactgtatctatattctctaagctacgaaaagaattacctgcaaattagagaaaatctcgatcagtcaacggttctgttgtgttcaatatatatttttttttttgatgtatactagatattgactggtaacatgagaactaagaagatgaattttttttagggatataacaggcaatgagtgctaagaatcgatatgttttatgtttagtcgagacttaagtttgaaaaatacagtaagaataaaactatggtattttagaaaagacgaatattctaaattacttgaaactaggtggaattgaatctttcagaatctagtttttgtgggtaaacaaatctaagtcaattcttaatttttatttaagatctactttttgttttttagtatataaaggaatttgtgatttaggtcgggatatgagcctttgagaggcgatttttaggtccagccgcccaaaattttttcttctcttaactttgttgttccctctccgatttaccggtacccttggccggagtcgtgagatgttgtttccgattgtcttttctcttttttttttctttggttcgagccttctctagcttctcttatggcggatctaaagacgagatctagatggttgtgcttcgatagggttgtttccgtttctcggtgacgagatctagatggttgtgcttcgatagggttgtttccgtttctcggtgacgagatctagatggttgtgctcaagctgaatctcaaggttttcctccttgttcctagcctgtatcattatcttcatctgctttagtgtggcctggctcaagtggttcatgtttccttggtcatgtttagtgcattggtcgtagacttctcttagtgagctatttttaaaggttgtatctttgttgtttgttgcttccctgtattttagggctatgtctccgttgtttgagctatgtttctcctttgtttgggctatatcacccttgtttggactatgtctcctttttgggtttgtgactacgatactatcccgtttttgatagcgggttttagtatccgtctttgtatgaacttgaatgaaataaaatgagactattgtgacaaaaaaaaaaagtatataaaaaagatcgcgagtttgtttgtttgcataggttaatgagcttattacgacattagaaagaatagtagtttttttttttgtcaaacagaaagaatagtagtttatacataataacactatatatgtagctctgtaacatagattagtctggttttgtttcgcgcgatattgtagtagaattgtaaacactacgttttgggtctggtggcattgaaaatcacaacaaggctaaggtcgcgtggtcaacagtctgcttaccaaaagctgagggagggctaggtctcaggtggttttcagaatggaatacaaccctcaatctgaagcttgtttggcggttattctccggaggaggatctttatgggtggattggcataggtatcaccatcttcagggtcttggggatgcctctgtttctaaattctggacctctcaagaattggtctctgattcctggaattggaaatgtctcttgcggctgagacctttagcagagcgtttccttcgatgtaacataggcaatggccttactgctaggttctggacagacaattggacgccatttggccccttacttattcacattggtgctgcacgtcctaataggttgaggattcctattgaagcttctgttgcagacgctactcagggcattagttggggtcttcctgtctcgcctctttgttgcttgtgttcttgtgcacccgagaccagggatcacttactgttgggttgcagtttcagcaaagccctctggagttcggttcagtccagacttaggttgcactcacttatttttctgaattgggctgaacttcttttatggattcgtcgttctagcacttctgctccctccacactgaggaagcttgttgctcattccgtcgtctacgcaacttggaagcagagaaataacatgctacataactcgcatcacttggatcctgcttcagtcttcaagatcatcgataggaaaatcattaactccatcaacgcaagaagacacaaaaagaagttccgtaatcttatgagtttttggctcatataatgtttctttctgaagattgtttacttctttgttttttatcttaatttttgccaaagaactaattatttaggagttctcattgtaattcctaactcttttattttatataatatttaccgacttagcaaaaaaaaaaaacactacgttttgagctaaaagaaagtcaatggcgtaacacacagtgtcttaaacatgtcggtccatgtgtaccgtgttacgtacataatattcatatacatttggtaaatatgtatgtccataatatatataaagctcgttgactttggttgaccttgaactttaactttattatgtggtgacgccactgcgttcgtcattattgatcgattagaacataaataactaaaagaaaagctacatgttagtgggagtacaggtttttgataagctcgtttgcaacagaaaaacttccctaaagaaatatctaaaataaactaataatatgcaaattgctaagttaatcaaattccaacatatcagaaagaaagagtttgctaagttatagtaatactaatagctctagttggctgtatttcgttcatgggtgtgtcatgtcggcaacgtgaatctacttattactatagttaaatacagtattaattaaatttttgtttatatagtatattattcatttccaaatcttattccagggaaattagatcttttaaccgtgatacatattttgctaacaaaacaatcatataagtttagtggttaatatacactaaacttgatttaaaacatgacgacatatacggaaaaataggttaaagaaaatgaaaattttattttataataaatagtcaaaatatggaaaatataaatgatagagcaaactaacattttatttaatgtgtttaagaaaagacacttttgaaggtgtataccattttgaaaagaaaattttagaccacatgagtaaatatgattcaaaataaaaataaaaccatatttgtttttaacaacatacattatgtgaattcttatctagatggtaacacaatgagaagagattttgctctacatcttatatgatatgagctttttttaatcaaccacacatttattaaaagataaatccatgattggttgtccaattgagaggaaaataatttataaaagtaatttaaaaaaataataaacgagaaaaatgaattttcctcagaaattatataaaagaaaaaaaagaaaaaaattgaggaaaaggaaaataaaacatggagcattccaaatttatctagtagattggagaatactggctaggcgaatgcaatatccagacatattatgatatgaaaattggatatgaaatgagttttaaattttttcattctacatattatcaaataatatttcaaaagtatcatgtaaatttatttaaaacttatgacactaatctacacaaaaatgaataaatgttaaagaaatggaaacttcattaatttattacaataatgtggctcctttgatatcagcttctcaaccaatggcaatataaatgtatgggggtagttggtcccatggcttcgaccaattatcttcttcgtttctctcttttctttttgtttaaaactactaagtcaacaaaagcaacttggagtgataacacgaggaactagtcgttaattaattgattaaagttaaagtataacgagctttttaactgaattggtcattaataaattgattacgttattctttaattactgtttttttccataactttatttgatgacttggaatgaggtgtatgactgcatctggtccacaagtggcccatgatctgatatagaatcttgcaaaatccgtgacttgattgataattttagttattatattcagcgttaagtattacctaattagctgatgttgtattcagacaaatagcgaaaattagacagttttcatgtttctctcgtattgattaactcaattttatgtatatttgataatataggtttttctatttatctgttgtgcaactttaacggcaatgtatattatgtcaataggaaatacacgaaaacacacagacacacatatacatatatagatgataaaagaatcatacctcttttttttctgttaaataaaatgtcatacttttacacgatttgaaacctgacattagatggtaattatgattcaaaatattaaatttagcagtcgtacgaaatcttatttttcgagtgaatccttacatgtgaacacagaacagcctgaagcgacaagttgcctaatcaaaaacacataaatgggaataaaatgcgtgacatggacatggcacaacgtttccatttctccaaaaaatactatagcttccccatttaaaaaaaataactagattttaacccgggtataccgcgggacgatttatttttaaaagtaatatatattaaaatttgcaaattttatttttacaaaatatttatattttacagtttattattgttattaagtaacgctataccacgaattcctgagacaattgttaaaaaaactgaagttttgacccctattaaaatagcatattaataatattttaaaattttataaatattgatttaaatacatccaccatataactcaattccaaaataaaacacgttctgtagtttctttacccgtcccatgatttttttaagtagtaatttttaaaatttaagaattattttttatatataaaagttttgcaaattgtatcattctctaatacatttatattttatagttatattttatatatagtaacattatacataccacataacatttttggttttatataattttttctaaattaggataatttgatatgtttaatattagtggtcttaaaaaataataaattaaagatttaacccatattgaaacagtggattaattatattttatttttttattaatgttgattcaaaaacccgtccctccaaatccgtcttgccaaaaagtcaatataatctaaacattttacctaataacataggagtgcaccatatttatttaataggggaatgtatcatatgacccgaatgcatttttatccaaatccaccaaaaaagtcttgcaaaaatactatagatataagaaacgatagtcggttttgatagatataagattagcaaatatattagttagcttaaattagttaaagaatacaaattaaaaaggtatattacactttattcaaatatagtatcaaaacttatataacacagagatttgataattttttaattgttgaatactttttttttgtgctaatttttatgtgattaagatttaattgatttcatatataaaatattaaattgacttatttgtttataatttggtaacagatagatatttgaatattcagtatattttgcttcagtttaggaaatctttgatgacccgtctttagatccaataagccctataatttagagattaatctgcagtataccgcatgtaggcttatattttagttaaactaaaaacttttattgtaaagatgatttaaaaatatatgatattattttatttgattttaaatgtatagtaaactgtgaattgtatatgttttgttgatattatattttagatcgatattaatacaagatggtatactacatgtgaaactctaaaattaacaatcaaaatacaagtgtataattttaaacactaaacaatataaataatatcaacaaaacatatacaactcgcagtttactatacatttaaaatcaaataaataatatcatatatttataatattatcatacatttaaaatcaaataaaataatatcatataccttctcacatacacacctatcaaaaacttaaaacctttcaaaacctcttggtatattcaaattaggattcttcattcatggaatcattattccaagggttttgagatgtcttatgaaatgattttggcagaagaggatgtaaaaaatttcgaataaaaagtagtcagcaaaacatatgttttttttgaaaatttttagataattaaatcagagaatagggttggacatatgagtaacccattcgagttcggatagaacccgttcgggtttgagattaatggtatatgatttactacccaatagaataattctaaacatatgttttgttgatattatctatattgtttagtgtttaacattatacacttgtagtttgattgttaatttaagagtttcacatgtagtataccatcttgtattaatatcgatctaaacccgtcaattctaggattttccagcttgtattaaaaattgaatcacatctaatatgttattaactattgtagtatataagattataaattttcaatataatatgtatgaaattgaatataaatatttcaaatttatgtcccgttactcagtagaaagttttcttaaatctatttttcacccgttataatattatttcatgtattgaacaatttatattcgtttttaaaaattcaaattatggcatatgcggaaaaactctaattatttttttataatgatgatattattattccgtaaaaatagaatcatataaagatgagaagtgaactataataattaataaaaaattaagatgataatttagataccaaatataatttgttgattttaattagatacttttttggaaattaataatgtatttcgtttttctaattaaattaaattaattaaaatttagatatcaaaccttatatgttgattttgattggctattatttttggaaattaataatgtatttcgttttttaattaatttaattaattaaattagtatttgatttttaatccttaaagagataaattaatttactctttaaaattttatttttaatggcatatctatgtaattatttataaaaattaagattatatttaaaatgtatttcccaaataatatagtagaataataattaaaaacaaaattaattggctcgtgaacaaaacgataagaactaacaagaaaacattattattgttgacaaataaaaacaagaaacattattatattaacacctaacgctgccacaccttttataagatatatgttttcttttacaactatctgaatctctaatgtaataaaaatatatgaatgatgtcactggtagtttggtaccaattccatgcacaacattgtaaaccattttcattttagtgttctttgaaccttttgtaaataaaaacaatattaaaccaatggaactcattgtatagttaattaataactttcgaatcccaaaaaagttccgagtaacgttttttctcgtctctatattggattgtaaaaacaagtaaaatatatatccgggtcagttcttctaatcaaaataatcaagaatgctcattagattagactggaatattttgataaacatccataattagaattgaaagttcttaatttaaaaaacaacaactaaatataaagtaacgaatacaggaaaattatattttctattctaataatatatgttgattgttgcatattgtctttttggtttaataataatcgttatctaaagtctagaaaaaagttaattataggtatatctttttagtaattcttatccaaatacttcaaagacacgacatacaaaggacaataaaaagtacatatctataacgagatcgacctttgatcttagaaaaataaaatgagttaagaatacgaatatacgatcgatccccaagaaaatagatgtgtaatttgggagtatatattactttttttttttcgtcaggagtatatattacatttttacatttatctataaaagaaatatattgtgttaatacactaaaatcagataaagaattaaataatttagcatattacgcggctgccgacaatagatgtggagtatgacttcacgtagacatattaagtcatctagtgtcaatatattaaattgattgttgggttataattgatcttaaagtgagcaagttttatgtcgcaccaaaaataaactattgagtgttatgtgcctaacacttaagaagttaagataatctcgagcgcttttaatttaatctaaacaagactaatgtgactaatgtgcataaacattcgctttgctttttttcatcacatcctatcgatggcataatcatattctctggatacgttatacttttgggtcggcaattcacgtttttattcggctatatattgagttttcttatttaaaagaatattgaaataatacatctaatcaaaaaataacaaaacatgtagcatagtgatttatactaatatttttgttgtggatcatcatcattcagactaaatatgtattgttattgattgaaaaaaagatagttaagtttctctaaacttgtgaaactaatctatttgaaaagcatcttgagatttcataaatatttttaatgaaatataaattcggggtctattgggatagttggattggtttaatctggttaactccggttaactagatttcggtttaagtttaatgtgcatagtatataaacttgagaatgtaattaattcagtttaaaaaagctttgtaacaacattttatcagataataaagttcgttatatctctcttcttcttctccgattagacttccgatcatcggatttattatggtatcagagccatacaatcgattctcccgcttactctttcgtcggagatgagcttgttcttagcttcattgtgtttttcgatttgcgatctttcactttgaagatttgcaatttcgttctttggttcgccggaatcttgcttttccgttctgttttctttttatttctcttcattttgacctcctgtgttgacgattctagctttctttacacaaattcatcacacatttctttgtaatttcttgttcttacactgagaatgggatattatgctcctccatcgattccagtgactcgacctccgatttcgtcgaatggtactgaacaacctcgttttcaaacggatcagtatgataatccgtattatcttcatagtgcagatcacgcaggacttgttcttgtgtcagatcgattaacatcttcttcagattttttgtcatggcgtcgatccattctaatggcattgaatgttcgtaacaagttgggattcatcaacggtatgatttctaaacctccaattgatcatagagattttggagcttggtcaagatgtaatgatatggtctcgacatggttgatgaattctgtggataaaaagattggtcagagtttgcttttcataacaactacagagggaatttggaataatttgctctcaaggtttaaacaggatgatgctcctaggatttttgatattgaacaaaagcttagtaagctagagcaaggtgctatggatgtttgcacatactatacagctttacttactttatgggaagaatacaagaattatgtggatcttcctgtgtgtacttgtggtcactgtgaatgtgatgctgctatgaaatgggaaaagatgcaacagcgtagtagggttactaaatttcttatggaattgaatgagggatatgatcaaacaagacgacatattctcatgttgaagcctattcctacaatagaagaagctttcaatattgtaactcaagatgagagacagaagtgtgttaagccatctactagagttgaaaatgtcgcttttcagagtgttgctcctcccatgatgaatgaaatggataatgcttatgttgcagcttacaacactgctagaccagtacagaaacctgtatgtactaactgtgggaatgttggacatacaattcagaaatgttacaagattattggttatccaccaggacataagataggtgcatcaggatataactacaggggaactactcaaatgcaaccaagaatgcagatgcaacctcgtatgcaacctcaaactcagatgcaaatgatgccttatgcaaattctatgcagaaagctaatgcagtagctcatgtgtatagtgagaatagttcctatcctcctgatggttatatgcctatgcctatggttaatccttatggatctttggctccttagtatatgtcgcatgttattcaaggtggtaacagtgttaatcttcaagcgtttactcctcaacaaattgaaaaatggtttctcagtttcaagctcaagcacaagttcaagagtctatagctgcttcaagcacacttacggctactgtttctgaacatggtttaatggctattacttcaacttctggtactgaaattctattcccttctactagcctgaaatatgagaatagtaatctcactttccaaaatcatacactttcttccttacaaaagcttttaccacatgatgcttggattttagatagtggagcttctagtcatgtgtgttcagatttagctttgattagagaactaaagcatgtgtctggtgtcactgtcactttaccaaatggtactagggttctgattactcatacaggcacagttcatatttcacagaaactcattttgcataatgttttgcatgttcctgattttaaattcaacttgattagtattagttgtctaattaagactttagcttgttctgctaatttttatgttgattgttgtttgattcaagaactttctcagggcttgatgattgggaagggtagagtatttcacaacttatacattcttgagactgcgaatcaatttctttctgcatcatctcctgcatcatcttatgcatcatcacctgcaacttgttcattttctggatctgtcattgatggaaatgtgtggcatcagcgtctaggacatccgtcatctctagttttacaaaaacttgttagtgtcattcctgctttacaatcttttacttcttcatgttcgatttgtcccttagctaagcaaagacgattagcatatatttctcataacaatttagctttgacacttttgatcttgttcatttggatatatggggtccgtttagtgttgaatatgttgagggttttagatattttcttactttggtagatgattgtacaagaaccacatggatctatatgttgagaaataaaaaggatgttactactatttttcctgtctttgttaagcttgttgaaactcagtttaaaacaaaaataaaagggattcgttctgataatgctcctgagcttgcattcactgaattggttaaagaaaaaggaatgatgcattatttttcatgtgcttatactccacaacaaaactcagttgttgagagaaagcatcaacatcttttaaatgtggctaggtcattattgtttcaatctaatgttccattgcaatattggagtgattgcatacttactgctgtgtttctcatttaaccgtttaccatcactattattgaaaaataaatctccttttgaacttttacttcaaaaattacctgattactctttgttgaaaatttttggttgtttgtgttatgcttctactaatcaaaatgaaagaaccaagttttcacttagggctagagcatgtgttttcttaggttatccaactggttttaaaggatataaggtgctagatttggaatctcattcagtttttatatctcgtaatgttgtgtttcatgaacagacttttccttttaaaactagtgagttactttgtaaggctgttgacatgtttccaaatactatattgcctttgcctgccccattgcattatgtagaaacaacacctttgatagatgaggactctctggtagacactactgcatcatcatcatcatcatcatcatcatctgcattagatcctagtatcataccatctaatactagtacagagatgcatgattcagaccctagttctgttctcattactaggcctaaacgcactactagagctcctaactatctatctgagtatcattgttctcttgttccttctatatctaccttaccacctacagaaagcacatcacaaacacttcctccatcacctaaaaagacttcaccacatcccatttccactactatatcatatgatcgatatactccattgtttcaatcgtatatctttgcctataatcttgaaacagaaccaaaaacatttcgccaggccatgaaatcagagaagtggacaaaggcagctaatgaagagctacatgctcttgaactcaacaagacatggactgtggaaactttacctaaagataagaatgttgttggatgtaaatgggttttcacaatcaaatacaatgctaatggaacagtggaaagatataaggcacgtttagtggcacagggcttcactcaacaagaaggtatcaattttcttgatactttttctcctgttgctaaactgacaagtgtgaagtttatgcttggtattgctgccatcaaaggatggagtctaacacagatggatgtgtcaaatgcttttctccatggtgaattggatgaagaaatttttatgagcttgcctcaaggctatactccacctcagggaactactttacctcctaatccggtttgtcgacttcttaaatctctttatggattgaaacaggcttcacgccaatagtataagagattgtcttcagtcctattaggtgcaaactatattcagtctcatgttgacaatactctctttgttagagtaactgcgaactcctttgttgctgtgttagtatatgtggatgatttgatgattgccagcaacaatgatgaggcagtgcaacaattgaaggctttgttgagatttgaattcaagattaaggacttaggtccaactcgtttctttctcgggttagagatatcaaggtcttcaaaaggattttcagtctgtcaaagaaagtatgctcagaatttgttgacagattcaggtcttctggactgcaaaccgagctctatacctatggatcctacaatacactttacaaaggacatgggagtaccattacagaatccaacgtcttatcgtgatcttattggcagattactttacttgacgattacaagacctgacattacttttgcggttcatcaactcagccagtttatatctgcaccatctgatgttcatttacaagctgcacataaggttctcaggtatattaaatcaaaccctggtcaaggcttaatgtactctacagactctgaattgtgtctcaatgctttctcggatgcggattgggctacgtgtaaggataccagaaggtcagtttcaagttattgtgtttatattggcacttcattggtatcttggaagtcaaagaaacagtctgtggctagtaggagtagcacaaaatctgaatacaggagtatggcacaggccacttgcgagattatatggttgcaacaactcttgaaggatcttcatgtttcagtcactagtacaactaaactcttttgtgataataagtctgcacttcatatttctatgaatcttgtgttccatgaaaggaccaagcacatagaaatagattgtcacactgtgcgggatcagataaaggctggaaacttgaaggctttgcacgttccaactgaaaaccaacacgctgatatcttgaccaaggctctttatcctggacccttccattacttactgaagttaatgtcactgtcaagtctataccttccaaatcatgttgctaaggtaaagacttgaggaggggatattgggatagttggactggtttaatctagttaactccggttaactagatttcggtttaagtttaatgtacatagtatataaacttgagaatgtaattaattcattttaaaaaagctttgtaacaacattttatcagataataaagttcgttatatctctcttcttcttctccgattagacttccgatcatcggatttattagggttcccagttttgcaaaattatatttcagacatacatttattttaaaaaattgcaaaatattaaatagttcgagatggttcttgaagactgtcatgcagttttttttttttttttttttacttaacttaccttcattactttcaaaaacttggatagaactacacagtgtctctcgcaaaagtaacacgtaaaaaaacaacaaacaaagaaaaaaacaatcaaaagaacacattaggcattgaacatgccgaaccaagtagcgaggaaggaagtcccttgatgtcctaatctctgagctctagacaaaggatccaagtgacagcggattaaagcttttatctccaaaataattccagcagcaggtcttgaggtagcattgttaagtcgagagtttcgttctttccatagagtgtacaccgaagcttgatgagcaatcctaagaatcatagtcacattcttgtcatgacaaggattcttaagccatctaactccatccccaaacaaatgaggaggagaaacatgggcccgagaggtgaaataattccaaacttctcttgcaaactcacaataaaaagaaaaatgttgtcttgtttcatcttgcgaattgcaaagaaggcatacatatggaacactaagtctccaactgataagcttgtctctagtatgcagcatgtgcctcatattcacccaagaaatgaatgcatgtttgggaacccttcctttaaaccaaatagccttggaccaatccactctatcctctaaaaaatttaattgaaaccatgtcgcagctgagggaaacacacatgaagctcaattcctctaaccttccacaagaagagatcatcttctgcatcatcttggaggttcaccacattagaaaccggaagacagttattgagcatttgaataattgggttcctgttcctacttctattaatccaccattccccatcatcttggaagttttttctttttcttaatttgtcttcagattatgtttctgtttgtactcttaaatggaacccaatttcataaggaaacatgacatttctcatttctttgtttcatagagttatattccgtatttgttaaaactagtttcaaaaagtgatattagctgttgataaagaaaaaaaaaaggtgataatagcttgttttataaaagtacacttgagaaaaagaaaaacaaagggtggtactgttgagtgttgacatatgatcgttattacctgtaatagtattaaaattattgttatatgggatttggccatacaagcgaccgacctaaatatggaaagtaagatgacgtaagcaaagcttataaaatttattttccacctatcacgtttttgatcgatgatacgaagctatactaagtttttatttttttaattcatcagtaaacttttactaaataaggtaatactatacaaaaaaagttaaaagtaactttttaaataaattttttgatattcgcttttataatcggtaactattaaagcggtatattttatattaaaagtttaaaaaatcctgataagtagaaaataaaataaaaaattaaagaaaatttggggaaaaaaaatcatattaatatatacttcatatttttattcactaagaaaatatctttttcatattttctctaatttattttctgaaatttataaaataaaattattgtagtaaaacaatttataataaaaattaaattttatttttaaacagtgattgctattttatttacaaattaatagttaattcaactctaaagctaaaattagaatattgtttttggttatgaaatcatgtgtatgaaagtaacaacattttattttttgagtattaaatcgcacaatgtaattatatatatttttttcaatcaaaaataatgttattaaacatccaaataaaaaagggggatttttttggctttttccttatattttgctctaaaaatagagatgaatagtgttgcctaaaatttaaaaatatgttttaatactaaaatttgtgctcattataatatatgtaattgttatatacataaatttatgtgtgtgtatatatatatatatatatatagaccaaaaagttgaatatagacgatgatttattttctctttatgtaagcacggatctgatgctatgtatacaaaaaagatagaataacgaaaaggtatgatctcgagcattgaaccattgcatttgtatatacatgaaggattcatgcttgcaaaaagatcctcacggaacaaaattcattgagatttggagaaaaacatattaatttttagtgagaaaggaataatatcgtaacagttaatttgcatctctatagtaagaaaatagatcgaattccttcagctccaacttttttatttattttcttttacaacaatttgctaatcattatattattttaatcaccatgcttgtaaattaacaaattgtatataacatcagggggaatgaacttaactaaataatattctatttatcatgtgaatctcttttatatcttatggtccacttgccgaccccacttccccatgcagcccacaacatattcatatcaccttttttcgtcgtgaatatcataaaaaaagtttggtgataatcggtatcaaacagtgaaaggaatggtatatatagagcaatcataaaataaaaaataaaaattaaagaaacttaagatcaaacaagttttgctgattaataagtaataaccataaaatataaaataaatttagattcatgattttttgggggtacttttagctatagttttaatatatgcatcgtagatatatattgattgagttaatttattttatatataattatttgtttaattgaaacataaacctaatatggaaatgcgaatttaaccttctttttttaagtattctttatcttttgcatgaaccttcctttgtatttaagttgacccacaacatatacacacacaaacccatattattccgatacacctacccatatattataccatctccttaaaacacactacaagtaataaaaaggacggaacttttttttttaataacatacatgcacacttgatgtttcttatttccccttgtctctctatatatacacacattcattcacacacgttcacacatatacattcacattactaatctctcaagatttcacaattttcttgtgattttctctcagtttcttatttcgtttcataacatggatgccatgagtagcgtagacgagagctctacaactacagattccattccggcgagaaagtcatcgtctccggcgagtttactatatagaatgggaagcggaacaagcgtggtacttgattcagagaacggtgtcgaagtcgaagtcgaagccgaatcaagaaagcttccttcttcaagattcaaaggtgttgttcctcaaccaaatggaagatggggagctcagatttacgagaaacatcaacgcgtgtggcttggtactttcaacgaggaagacgaagcagctcgtgcttacgacgtcgcggctcaccgtttccgtggccgcgatgccgttactaatttcaaagacacgacgttcgaagaagaggttgagttcttaaacgcgcattcgaaatcagagatcgtagatatgttgagaaaacacacttacaaagaagagttagaccaaaggaaacgtaaccgtgacggtaacggaaaagagacgacggcgtttgctttggcttcgatggtggttatgacggggtttaaaacggcggagttactgtttgagaaaacggtaacgccaagtgacgtcgggaaactaaaccgtttagttataccaaaacaccaagcggagaaacattttccgttaccgttaggtaataataacgtctccgttaaaggtatgctgttgaatttcgaagacgttaacgggaaagtgtggaggttccgttactcttattggaatagtagtcaaagttatgtgttgaccaaaggttggagtagattcgttaaagagaagagactttgtgctggtgatttgatcagttttaaaagatccaacgatcaagatcaaaaattctttatcgggtggaaatcgaaatccgggttggatctagagacgggtcgggttatgagattgtttggggttgatatttctttaaacgccgtcgttgtagtgaaggaaacaacggaggtgttaatgtcgtcgttaaggtgtaagaagcaacgagttttgtaataacaatttaacaacttgggaaagaaaaaaaagctttttgattttaatttctcttcaacgttaatcttgctgagattatttatgttgtaagttgtaacaagtggaaaaaattaattaggtgtcaaacaaatcttgtgttaatattctttgtataatgtatggatgagctgttattaattactgtaatttttaattgggcatactcgtaattttaattgggcattattggtttataggcccattaaagtgtttcttcctcatattctttctttggtccgttgcttattcaccagggaaaaatgttgcagaagatttctcagtctatttctttatgtaacggcgatcaatttaagccgttaatatacctcgccggagctccgacgaacttcatctcttcccctctctcaggttgttctctactttactttgtttgtttcgtcaaatttcatgtttaggtttcgagaaaattgattgtgaaggaattagtagaactttgattggactaatgatttttttttggaatctatatatgaatcatgattttgggtttatgtattgttttgtttcaggcaagaagaaatcatcttctctgagaattaaaaggtatataaaaacaaaactaaatttacatgaaggtgaaattttagtatatagttttaatttgatacattttattttgtaggatacaacaacttcaaagtacattagaagatagaataaatccaccactagtatgtggaacagtatcgccacgtcttagtgttcctgatcatatactaaagcctctatatgttgagtctagcaaagttccagagatatcaagtgaattacagattcctgactctataggcattgtgaaaatgaagaaagcgtgtgagctcgcggctcgtgtattagactatgcaggaactttggttagagtaagttacttttgaatctctaactatgattgaatctctttgttgtaatggtttttttgttttgttgttgcagccgtttgttactacagatgaaattgataaagcagtgcatcagatggttattgagtttggtgcatatccttcacctcttggatatggtggatttcctaaaagtgtttgtacatcggttaatgaatgtatgtttcacgggattcccgattctcgtccgctacaggtttggagtagcatgagaattctcttttgtagtatatatgtaacaccccggtttcaggaatatggtggtgcatgcggagaggtttataatatatcactaatcaacaacttcttgtattcagaatggagatattataaacatcgatgttgcggtttacttggatgtaagtatatatttctaagtttcttttgctaatctcattcagattttaaacttcggatggatgtaacactttgaaataggggtatcatggagatacgtcaaagactttcttatgtggagacgtcaatggaagccttaaacaacttgtcaaggttaatgtgtgcctctaactttcgaactcttaggaacctgttagaagctgacatagttattgttcttaaaggtcacagaagaatgcttggagaaaggtatatcggtttgtaaagatggagcaagcttcaaacaaatcgggaagataatcaggtactaaatagtactaatcccattcaagggaagttaggaggatcagttttaattatattttcaacagtgagcatgctgcaaagtatggctataatatggagcgattcatcggtcatggtgtaggaacggtattacactcggaacctcttatatatcttcatagtaactgtaagtaatataaactggctttttctgtaagaactcttcattatgatggagttttttttgctgaaaaactctgttttgtgcagatgattatgaacttgaatatatgattgaaggtcaaacttttacgctcggttagtattatctatatagaatttgatgaatgcatttatactcttttatgaagtgtttggttcctattttttttcacagaaccaattctcaccattggaacaacagagtttgtaacatggcctgacaaatggacaattgtgaccgcagatggtggtccggccgcacagtttgagcatacaattcttattaccaccactggtgcagaaattctcaccatatcatcatgaattatatcacaatgttacggaatttacattatgaaccatccatttctgttgtaaataaaagaaaatataaactgtttggttctgagcagttgatgttggtgtcgttggcaattcctatccctgtgataaatggtggattggttctgagcaaaaattaatcacatgaacattcaaattaaatctaaaatcgagtgattaaatataaaaattaatcatatgaaacaaattaattttatggcacctctaaaatgattttggataaagatcacttgtgatgtgaaaacaaattaattactggatacaaagttaactcggcaccaaaaaatcattgcaatgtgatgagtagattcattcaataatatcggaactaactttaacgttgtgatgtgaaaacaaatttaatttggcctttctaacgatcaaaagactggataccgagtaatgtttgttttgttacatacttttgtataggactcgacataaaactagaaatccgaaaccgaaccaaatagttataaaacccgaactgataatgaatatataccatgcacagctgaatcttatagtaaatatatacattttgattagtttattatgagtttttagttttttactatgtttcaaaacatagtggttgtggtttgtttaataatggttttagaagaatcttactttattatctaaaaagtaaataacaatttagtgtaccattaacattttaataagatgacattaacaaacttaattaatatcagaatcttctatatcttatgtcagggtaaagtaattttttttctttaaatggtagaaaatcaggataaaagtatatgtcccatagtttttaaaaataatgatatgtataactaaatatattgaaacttaattatgttatcttttttttttgttaaaactagattaagattaaatgaaagaagacacatgtcacatcttagagcatgtgtttagaagaaatctctctattatctaaataaatagtaatccataatttttaacatttaaaagaaaatgacatttacaaaattttaattaatactagaatcttctataccttctaatagttaaagtaattttgtttttcattaaatgattaaaacaaactaggagaaaagtatctttacttgttataaagaattatgccacaatccacatgttagtttctcatatcatgaaatcttgtatatattttcaagtttccagtcttccaggctttaatttgttttgaagttgtttatctgacaagcgataacaacacagagagaactcgtcgataaatttcaaagatggagaaaactgagtggtctgatttacctgaagaactcctagatttaattgcaaaccgttattcctccaacattgacgtcctacgtatccgtagcacctgtaaatcctggcgttctgcggttgcgatgtctaaagagcgtcttcagtttcgctttgaacgctaccttcctacctccaacaagaagataaaggctcatctctctcccaccactttcttccgtataactctcccttcttcatgtcctaacaaaggatggctagtaagaactagacaagcctccaaaatgtatcgtaagattactctcttgtgtcctctctctggcgagcgcatcacccgttcccaccaaaccctagaccttttgaaggttggcgtttcagagattcgccaatcttacgagattcaaatattcgatggattgaaggacgaaaagataccattagattcagagatattctctaattatatcaagaatagtgacaaaataccatcaggtgtattctttagagttgctttcctagacaatattttttttgcagtcaattaccacgataataaaatatggtgttgtaagactagagaaggaagtagaagttggacaaaaattaaaaaccaagtcgaagatttctcggacattatacttcacatgggacgtatctatgccgtggacttaaaaggagcaatttggtggattagtttatcacagcttaccattgttcaacagacatcttcaactccgttggactactataaatatgatagttgccaagacacgaggctcgtggaatattgtggagatctatgcattgttcatgaacttagcataactcgaaatcatatccagaggaccgttggttttaaggtttataagatggacgaggatttggcaaaatgggttgaggttagttgcttgggagacaacacactcattgttgcttgcaacagttgttttactgtcgtagcctctgagtaccatggatgtttgaagaattctatttacttctcttattatgatgtcaagaaggccgaaaatataaaagtgttcaagcttgatgatggtagtatcacccagaggactgatatttcttctcagagttgttttcacatgttctctcttcccttcctcaactattaattacctttaatttaaaaatcttgattattaaattaaagatttttttatttaatttaagtatatttcaaatatgaatttaatgcatatctatgttacttataattaacagaaaatttaattaaataaaaactaattaaattaataaattaaatttaaaatcatgaaaataatattgtattttttttctcaggaataatactataatttaacttttcacaaaatgttttttgaaacgatcatatttcgaaattttgaatgtggcaatgaggtttagaatggaaggaaaagtaaatacatggtaaagtaaataacaatgtatgtgactgcatttataaaattataatctaataaataaaatttaaagtgaaacattagttcctaagaataatacattagagagagttgttatttattattaaatttttacataaatgaaaataaaataataccaaactcaacaatgtaattatccatcttctaaaaacgtaaataatcaagaatcattattttcatgagttataaaacaaaatatataaaaagtgatatgtaagctgttagaaaaaattctatgtaatttatgtagcacaactctttaacatgatcaaaatgaagaaaaagtttgagatttcattacttgaatcaaatgttgaatcaaaggctgactttaaacaaaatatttaaaataagtttttttttctttgagaaaaatgatagtccttatgtttttagttgatatttgaggataaatttttggaaattcacatgtctttggaatcataagatcatatgagcaagaagatttagatttcgaacctatttgaaattcccttttcaaaagtatgatttgatatgcagcggtgagaaaaaaacagagaagtagaacaaaaattctattttgttgaatagatttgagaattaattataacggttaatttacttagagaattaggaattcaaaagaaattgagccgttttataattaagttaccactaaaatccgctaatttatttacaaatatttgcttaaacacacacatgcactcgaggaaacgataatcgttttgaaatcaaatgacggggtttcagccaataatacggcgtcgtttaaccgtggagaggttggaaatttacacggtggcgtttaaaggttagttaacttagcgaaaggatttagacgatgttgttttggagttttatatgttttcttgtgtgtcaagctttgctccttaagtctgatttttttgtctaaattctcgagtttcttccatacctgtaaaaattcgttatcctaatagttttagaagaactaaatttctacagcttttctttgtgaattcgatttagtacagaataacatacataataaaagattttaaaaaaaaatcatgtctaacagagaggcatgttcatctaacaaaactattatcttttattatacacatacatatataagatgccaaatattttattttcatctaagagatgtctatctaattaaataatgtgggacaaatatgtagttagaataacgaattcaaagcttcacaagtcgcacgtttttcatttttctttctgtagtttagggaccggccaaaagtacatcaacttagacccaagctaagacccaaaaatttggaccattttctaacaacttgccgtccatggaaaccgaatcaaaaatagcatcattcgttggtgacccatttttgggatatttagcattatcccattcaccatttatcagccatcaatcattcatccaatatatatacacatagacatttcgtaaaactcaaatcactcaccacataaaaccaaagtcccatctcttaaaaaactaatcatttcaaagttttgtctctagtctttctttttattgagcaatggcttcttctacaatctctctccaatctatctccatgacaactctcaacaatctctcatatagtaaacaatttcatcgaagctctcttcttggtttctctaaatccttccaaaattttggtatctcatctaacggtccaggttcctcctctccgacaagtttcacgcccaagaagaaactcactcctactcgagctctctctcagaacttgggaaataccgaaaaccccagaccaagtaagtttattttcttcttgatcttttcgcttaagtttcgaaaaatcatataaacagagctttttccaaaaaaaatgaaatacttttttttttttttgctaaactgcaaatatcatataaatgaagggaaaggtttacatgagttagaacctaaacaaaaaaatgaaatacttacaaaacattttctaaatacattatctttatattaaaatcagtttttcatttcataatttttctaactccattaaatttatatgattccagagccttaaaaccaaaaatttgcaaacttgataatttaaacataatatcagatctcaaaatcaagaacgtataattaattcacaaattgagtttttaatttttcaggcaaagttcaagaactgagcgtgtacgaaatcaatgatttagatcgacacagcccaaaaattcttaaaaacgcattcagctttaggtttggtctcggagatctcgtcccattcacaaacaaactctacaccggcgatctcaagaaacgcgtgggaatcacggctggtctctgcgttgtgatcgaacacgtccctgagaagaacggtgatagattcgaagctacgtacagcttctacttcggagactatggccacttgtccgtacaaggaccatacttgacttacgaggattcgttccttgccatcactggtggcgctggaatctttgaaggtgcctacggacaggttaagcttcaacagcttgtgtatccgacaaaactgttctacactttttatcttaaaggattggctaatgatttgccactggagctcataggaactccggtaccaccgtctaaggacgtggagccagcaccggaagctaaggcgcttaagcccagtggagttgtaagcaactttacaaattagtgaataaaattagtcttatctttctcgtgtcctgtatatataataatctttttcatagagaattttatattcttatacttgtaatcaaataatttgtatggatcttagtatccttgtgaatgcagtatgtttgagttgaaaaatacttgtaatcgaatctttagttttgagttgtccccttttggggagtaaaatatcttcttcttatttttattgggttgaaaataggtttttgcatagttttttttatcgacctttcaaatacgtcacaattacatttataggagttagggttggtgttgtaatccatatacattaccactatgaaactttcagcgaatacaagcatatactatcaaactccaagcgaaataaatactcacaaaaggctcaccatggtcgtaaagtgaggattgaagaaaaatgatcatgttgatggatcaaataaatcttccatcgcctgatttcatcatgatgtacactcatctcaagaacaagaaaatgatactaagaagaaaaaagataagctggattaggcacgaaggtttggaagaaacccaaactctaacccaaatattgtggataaataaaaaacaatcaactttcgagttccttctccagccaacttatgggttgcaaagatacttttacatataaaagggatgctgacctagtgcgaatatcaagaaattgtgtgtgttttatgtgctccgggttcaatctctatttggtatacaaatgactgttttttaaatccggatatctaaagtctaactttgagtactaggaagattataaggcaaagatctagaactcttatagcttaaataaaaaatgattttacatgtaaaagacagaaattacctaatattagttaagagatgatatattttcaagaaataatgattctagttgtataaaatacctagttttttttttgtatttttttttgaatatttagaagtgcaagtccgaaggccatacatttcctagagatatgatccacaccaggttaaattcatttcttttggagaagagatccctcccaacagacttcgaacccaacacctctacctgcgagattttttttttgttattcgtattagatgtgattttggtgcaccacgctagcgttggagatgaaactcccacattttcgcactgaatcgactattaaagcttggtctaagctatcaatttattacagtctatgccagaaatttatggcatcctacctgatataaaaagctttatggcatcctacctgatataaaaatcagtgttctatcctttaagttgttcatgtattttcattccaagagcagccaatgttgagacagattctcttgctaagcttgccttatccgtttatgctgaaaacattgttagttaatccaagtattggcgtttcaaaaaagaagtgattttggtgcaaatatcttttcacagaatataaaataatttttaatcaattttacatacatgtatccgggacaaaaatatagttagattcattacatttagaaggttttttattttatttttgtagtttagggaccggccaaaagtatttcaacttaaatccaagacccaatgcttagatcacgttccgaccatggaaaccaaatccaaattcctcccaaagcatctttttagtttgagacccacttttggtaatttacgcacgtgctacttcatcaatcatccccattcatcactcatccaacatgtctatctataaatagacggagatatttcgtagaactcaaatcactcaccacataaagtaaaagtctcatctcttcataaaatagctttaaaccaatcaagtagagtttcttctcaagtctttttattttatttttatcaatggcttcttcagcagtgtctctccaatccatctctatgacaactctcaacaatctttcatgtaatcaacaatttcatcgaagctctcttcttggttcctctaaatccttccaaaatcttggtatctcatctaacggttcagatttctcctatccatcaagtttcactgccaagaagaacctcactgcttctcgagctctctcccaaaacgggaatatcgaaaaccctagaccaagtaagttaattgatccttttttgtcttccaaacttgattaaatatatgattacagagactcaaaatcaagaacacaattcacaaactgagtttgttttttcaggcaaagttcaagaactgagtgtgtacgaaatcaacgaattagatcgacacagccccaagattcttaaaaacgcattcagcttaatgttcggtctcggagatctcgtaccattcacaaacaaactctacacaggcgatctcaagaaacgcgtgggcatcacggcaggtctctgcgtcgtcatcgaacacgtcccagagaagaaaggtgaaagattcgaagctacttatagcttctacttcggagactatggccacttgtccgttcaaggaccatacttgacttacgaggattcgttcctcgccatcactggtggtgctggaatctttgaaggtgcctacggacaggtcaagcttcaacagcttgtgtatccgacaaaactgttctacactttttaccttaaagggttggctaatgatttgccgttggagctcaccggaacaccggtaccgccgtctaaggacatagagccggcgccggaagctaaggcactggagcctagcggagttataagtaactataccaactaattcatgaaattaaaatgtttctcgtatcgctgtgtaatgatataaagatttgtagttttgtgctcttatctgtaataaaatcattgaggaataatatctcgagtatgttttaagtcgtttggacgttggtacacgaatatatgaaaagtctttgtaatcttttggtcactctcaatgattttgaattaaaaatagttttagttatagaaatgattttatgtattgcacaagaaaatcaaataaaaagaactattaaataatgaaaatatatatcttaaataaaagagtataacaattgaattcttaaaaatcatacagtatctcaacaaatccaagaaacaacgaaacgaaaaattgatgtatcatttggtcgagttaagatacaaaatgaaaaattacatttttttttgtagccatcatcgacaaaaaaaaatgtcttagtcgcagattaaatgaaataaggacaaatgatggctacaaaaaaatatgtaatttaaaaccgtccctaaaggtaaatctgactcatcttaagagattgtttgatttttgatatataagtcataagtggttgactaatgtcaaataagtgacgccttttgatgacatggagaagtatgcagatgacattgattgatacggatggaatggagaagttaatgatctacatgtcacactcctcatttcaaaaatagttaacggtgattatgagtcttcatcgaatactcattttaaaggagttgctgataaaaaaaaaaagagtggatgttatgggcatgtatttaagggcatgtatttaaacaagaagttaccaatcgtagcctatgactaggattatggcatgcatgattaccatgatgtggatcaggatatagagtagagaatgttaacgcaagagacattgctagatcaagaattaactcatacaaaaatgatgaccggagattgatgatatcaaattaaattaagtaacatagactcacaaacgcatggtggtaatttgaagcctatgcattcaaagaatgttggagtcatggatccgaatagaattgttgatactagtgggaccagtccttccttgagaaaaaggatgcatgaaccatctcgtgattgtagtgctattatgtgtgtacacggcaaattgacacaaccgaaccgaccaagttatatatatgtcactaaaacagtctgaccaacaagagtttgaagacctgcaggctacgtttatatcttttgactattatagtatgttcccattactttgagatctcgtagtactcaataaatattacacggttttaagtcgataaataataaatacataaaattctctagctaacgcttttagacaattcgaaaccgagtggaaactacacaaagcatcttttgacatatacgcacgtgttacttcatcatcgtccaatataaatagactcattactaaactcaacaaccattaaaaccaaagatcaatctcttcttaatagtcaatcatatatcaaaaaatttaaactcttcttgatcaatggcttcttcttctgctgctatgtctcttgaatccatctctatgacaactctcaacaatctctctcgtaatcatcaatctcaccgcagttctcttcttggtttctcaagatctttccaaaaccttggaatctcatctaacggtccagatttctcctcccgatcaagatctactacttccaagaacctcaacgttactcgagctttcttctggaattggggcaagaagaccgaaaactccagaccaagtaagtttaatagtttatagatccttttgtcttttagtacactgcgactaagtcaacgcctgttaatccgatatttttcctagatttgagacaaatcaagatttaaagactaataatcctttttgttagctcagaaatcaaaatgctttatttcataagcaaaatcgattagatctttaaatgccctgctcaaaattgattggtctaaaaaataatcagatcttaaaaaaacaaagtaccgaattcataaattcgagttttaattattcaggtaagatccaagaactaaacgtgtatgagctcaacgaaggagatagaaacagtccagcagttcttaaactcggcaagaaaccaacagagctttgtctcggagatctcgtcccattcacaaacaaactctacaccggcgatctcaagaaacgcgtgggaatcacggcaggtctctgcgttttgatccaacacgttcctgaaaagagcggtgacagattcgaagctagttacagcttctactttggtgactatggtcacttgtctgtacaaggacaatacttgacttatgaagacacgttcctcgctgtcactggtggctctggaatctttgaaggtgcgtacggacaggttaagcttcgtcagcttgtgtatccgacaaaactgttctacactttttaccttaaagggttagctaatgatttaccgctggagcttactggaacggcggttacgccgtcgaaggatgtgaaaccggcaccggaagctaaggcgatggagcctagtggagttataagtaactttactaattaagtaattagctgtttaatagttgttttgttttgtaatagaatattttgatgagttgtgtgaggttagttaatgatgtgttgagggaataaagtatttattttgatgtgactttattgattacaactggtctttctacaacgtggaactgttgtactcgatttcaaagtaaaactttttacattagtttcggtattttcacggaataaattgatagctagaacctttaatcttatggtttaaaatggtacactcatatacacagttagggtagtggagttaatgctagtaattagtaacacaatattttttggttcgttatggttttggtgttaattgtgttaatgtcataatgctttaacgctaatttgttgttggcacagatatttaaaactaaaaaaagcaacctagttattgctggctatctttttaaattgagaagttaacatcttgtcaagtgaatcgtgtaatattgttatactctaaagatcgatattattgtgtctaccagtcaaaacatgtgttggagggaaattttatttgtaggttcatcatatgtcaggaacattattgtcatgtttctgtaagctttctgacatttaagttcagattttgaccataagttttgatcataaatgagaaaagaacaaagttaagtttagttttgcgaatgttaaaaaaaataaatatcttatttgcactttttgaattatttaccaaatataaaaaccaagatggtgttttttttgtaataccaaaaaagagagaattttagctacgagagaatgcaaaattcggatttgtgatccgttttattgaaaaagattttagtttcatagaacatatatcaagtagtatacaaattgaaaaatagggtctgatagatccgagacacttgggtattatcacctaacttttaaacgtttatgccagttttttgacaaacaaatcacgaagtatttgaggataaatacagtatttgtttatgttttctatctttttttaggaggatgagttcattggtttgatcttaaacaattgaaaatttataggttaccaccaattttgcgattttttttcttcttctatactttagatttaagtttatatatagatattttcgtttgatatcaatatgggaagcccacaaagttggggagtttagtggtacctttttttttggttcacaattgcatacgaatattggggagtttagtggtactattgcatacgaatattggagatacgagaaaggggtggaaaaaattgatgataaattgagcccaagtaggaaacaatacacaaggccgtatataaagttggcatgttgggttcaatacatgaggccgtctttttgttcggccgcggccagtggtgaacactgaatatggccttttgagactccgaggggacaattataatccaacactaaaatacatctctaaactctatttgccaactaatttctttatttaaaatacgtttcaatctaatcaaaacagataagcctgttaaacacaattttgatttctcgagactacgaataggtggatctatttgtatcataacatcataacatataaatcgatatttaaaattttgagtaataaatttgatgttggtctctaacaatttgcgggtaatttcttgatattttggacatcacccgaacatattagctcattacacaccaatttctatagaggcaacatattttcttatcattaaagttgacagctattagagcccttaatcacgtttgatttcatatctaattccaaattatatggatataacaacagcatagcatataaattgatatgtgtagcattaggttatatctttgaccgggaaatgcattggcaggccattatactgggaagatgcattcgcatatatattagtaggtgtacttagtaatcgtctacttgacataattaaaattaccggtcaaaaacacgagatatataggaactcatattgtgtggatatatatattagtttacatgtgtatttatggataaggttataacgaattcaacaaattctcaaggtcctatgaaatttcaacaagtatattacagttttttttttatatatggcttttcttctcccatgtttcggctgtctacgaagagacatttggcttttcatattgggatattgaaaaatacattttcaacgttttatatatgattttgtgtgggtgaaattaatacttacagaacaaaagagctcatgcacgtttagtgttattttggcggctgtttttaaggatttgcatatattctttcccacgtattgaattctataaatgacataataatcaaacttgtaaaaataatagaatgaatagtttatagtcttccaaaattcgatttctgttgtagtggaatcgcagacattttctaacttatgaatgttgttataggacttctttaaaccttggttggatatacccaaataaatataaagttcacacgaaaaaaacttggaatcacatccaggaatattcaccactggatcaatactactatacaacaagggaaaaaaaaatatttaacttgggaaggtatatacttattttataaacaaaagcaagattcgccttgtaatgcgacggcccgacttctctctttcaaataatgatccttgagaaaccctatagagccatatatacgttgtctttataaagagacataactcatctcttcttgactaactttatagttaaagttatcaattattcgaaaacaaagctggttttttgttttgtcccttaaaccagcatgatcaagaacttaagtaatatgaagaatgacaatcagaaacgtgaaaaatgttgcgagtacatcgaagctctcgaagaagaacgtcgcaagatcaatgttttccaacgcgagcttcctctttgcgtagagctcgtgactcaaggtacatacatatgcatttacatttcatataagatataatgagtttatatatatggattaaatgttagatctaaagatttttaaaaaatgttttatggaatttagcgattgaggcgtataagagggagatatcagggacgtcgacggataacttatacggacagtcggagtgctcagagcagaccaccggagaatgtgggcgcatcttggatctgttcataccaatcaaacactcttcgacctccatagaagaagaggttgatgacaaagatgatgatgatgaagaacaccagtctcatgaaaccgacatagattttgatgacaagaacatgaaatctgaatggctcaagtctgttcagctctggaaccaatccgacgcagttgtttctaataatagacaggtaagatttttattttattttattttttctttgtttacatttgtgtttttgtttgccttgaattacatttactgtattgtttccaaaccagcctattgacgttgttaattgttaacgtaaagactaaacgcataaccttctgtgtactttatgcgattgtgtttgtaacttacaacttcacaaatagattattcttttttcttccagtttttgttttttttaatagaccgaaaaaggatgggtgcacaaaaagatagtaaattgctcacaaaaagattttgttttgtaatttaagtttctaatagcattttgcgtattcaggatcgctcacaagaaaagacagagacgctggtagagttgataaaaataaacgatgaagcagcgaagaaaaacaacaacataaaatcaccggtgactactagcgatggtggcagtggcggtggcggtggcagaagagggcagagaaagaataggcggtgttggtcgcaagagttacacagacgcttcttgaacgctcttaaacaacttggtggccctcatggtgcgtttcttggttttaagttaaaacatatatatcagtagtcatatctttttgttagggctcatgaagtttaattaattcgtaatgacctttttgttcactaaattttgaagtagctacgccgaaacagataagagatataatgaaggttgatgggttaacaaatgatgaagtcaaaagtcatttacaggttagtaaatcatattccatgaaaaatacatgtaactaatatgtaaaaggtatatattaatttcatcattttagttacaaatgtttttataatttagaaggaaaataatatttattgtttcatattttttttaatgataaatagaaatataggctgcatgcaagacggccaagccaaacaacaccgaacaacagaaactctcaaacgcaacatttcgtggtggttggtggaatatgggtcccacagactaaccattcaacggccaacgcagtcaacgccgtcgcatcgggtgagaccaccgggatttatgggcctatggtcagttcgttgccgtccgagtggccgaggcattccaattttggtaggaagatttcggaagatagatcaagatgctctaacaacggattttttcggtgtagctcaccagctatgtcttgttctactcgtacaaagacgaaagatgcaaaaataatatcataaatttaatttttgattatttattaagagaaaaaagttatagacattaatattgtgaagagtgtatatatatagatgttggagcgtgactctatgttatttttagtttcttggtttttttctattagccgatgatatctttgatcaaagatccatattagctaatgcatactatatttttttacgtcgtgcaatatgcatatcgatgataataagttaataacacaaaattattagattactagttgaagaatcgtatatagaaagaatcgtaattatatgtagaatgatggtatattatcagcatatatttttatagaggctttagccaccaaaattaataaatgtcagtcacaaactcaaattaattaatttcgtccttaacatatgtatgtcggccaggtttctatttgctatagtaatataagatacacagaaacattgtagaaatgtaaaatgtcttcgaaaacagaagaaaaatacatatataaacttttttgaatgaaaataaaaaaaattatgccatacagaaggatcggaactcggtagaatatgccggaatctgaagagcataatctgcaaatatgtttttcaggttaaactttattctcttgttgcttgtactggatattaacacaaatgtgcacgttgggctccttctcgtggagtgaattattctttatttgttccttttacttttgtaaatacaatttttccatataagtatataactgtgtaaatattaaacccaaaatatgttaaaagacaagtttttttgtaacttaagggcaagaaacaaggtgtaaagccacatgaaaattgctgaccattctaactctcgacactactatacaattaatatctcttgacttgtactcattctctataacaacaacaattgttgggttttcttgttcgctctcactgttgtttattaagtgttgttcgtttgcgaggttttctgaatcaataatcaaaatgatttcgattgataagttatcctttaatcaaaatttcttggttcctatggtttcatcacctcaaacataaaaaaatcataccaagttgttaaatatctttaaaaattcctaccaagttactaaataagtgttcacaaatttagggatcctttcatgtgactctatgagccatgtgacctatttttctactacctttataacaaatggggctacagttttaataatattcttactgataatttaatttgaatacgaagaccattgggaaacttgaacattgagaaaggctattggagttcccgagatggcggtttgatctatttcaaatcttcaataatattactattatcaaatacttctttgattctatagatgtgtaagtattaataatttaatatttgacgatggatccaaaagaacaggaatcggattagggtttccttatgatatgatttattaatagattggaatgggttttaaactcttagaagcaggatctttatgtgacctttcagagtcataaaaagcctaaatagctcttgatacttactttaagaccattatgagatcaaaccatggaaaaataaacaaatagtaaagcaacaaatgctttttcttggtctatacttcattacttctcatattaactaatatcatatccataaggaatattcgactacacctattattaattgtataatgttagttcataatttatctacatttgtgcataaacaattaaacatatctctgattaacaataataaaatatatagtacgtgctaatcttgttttaatcttctcttatataagattaggattgatcaaccaagtttgacatggtgtcttagtcttataggagtgaaatttttaatcaaccttccaaggattctttcgtctatccacgatgacgaataggttgaaatggaaacagatttctttcagttctatacgtgtttgattttatttttcttttaataatacaaaataattatcaatgaaactatttaaatagtctcagagctataaatgtaataaagtaacaatgtttactaattttctaatagcaacatgatgtttcattatgttctttaattatttctgcaaaacaagtatcaatttgggattcagctaacgttgagtgctagctgctcttcacatttgcacacaattttgggctaatgagcccgaaaagtttacgaagatggaccaagcccgtttatagcccccgaggttaaaattccgaaaggttaattcccaaaaacttaaaggttttgacgatctaaattttgattttaatgaacggaaatagtaaatgacctgaaatagaaaaaaatcaactagataatctacaatttaaagatttgcagaaaatcttggacgataaaacaagatactaacatttctcacagaataattttgctataataatttaaagttcagctgctatattttttttcctttgttaatttcatctgctatttatttgaccaaattaaatatgttatcttgatttgttatcgtacgtctacatagtctctaattttaaaaaacaattgccgtaattttagtttttatttaattgaaattttatttacacatgtaacaaataaaaaaaatgattgaaaagaataatgtatattattttaaagtcataactagtaacatgtaaaaaagtagttatacatcactattttaggcagtcaatggtaatgaaaaaaaaagagcttattttctagacctgcattgtttatattaatttatacatagttgaaaatgagattcaaactatgctttcaataaataggtgaaggatcgaggtcgaggcaccatcgatatagagtcagctcgtccttcaccacggcaatttcatgccaacatcttgctcaaatgagtattccatggagagtgattggtaacctgcaaaagaaaaagaaacttaaaaaggtttatatgtataaggttcacgtcagtgtttgagtgacttaaaaaagtttgtgttagttataaaactaatatctcatggactgacgtaaagttaattaactctacgtaattgttgttaatatccttcccatttttcaatcttacctcatttatacaagtgttgttaattaagtgaccggcggtttttttttttttgtatatatgagcatgcaaaattactaactcttactactaaacaaaatctctttactgtatatatgagcatgcaaaattagtcattatattttattgttagtgaaacctaaataaaccagaaccagtgatagtaagttaatcaatataatctgaaggtgcgaaacatcagcacgaacccaaattcgagttttacgtattgcggacgttaaagataatgaactgatttatcaaaaaaagaagaagaaagataatgaagtgaaaaacaaattataaaatagagtgaattttttgtccaaaaaaaaaagagtaaaattaatgttaaaaataaaaataaaaataaaaaataggtcaaatattctttgtgtataaaataacctaaaccaaaatatggataaaataattattccagcaaaagagaaaaggtaagctttaacaagaaaaaaagaatgttaaaacgttaacatgcataaactttaaaaaaatagtaatcaactaaaagggtagtgtttaccaagctaatacgatccgattctttcaacatttgtttctgtctcgctctctttctcgatatatgaatgaaaggcatcatatttttatttttcttattaaaagaaacctttggaagaacttatataaaaaatgatcaagtagactctatttaaatagacaaagtaaagcttacatacatgtgtatgtatatacgtgtttggtaggaaataacaattggggtaaatctaaggtagtagagaattagacatataaatgtcttttatttgttttggtggttgggatatatatgctctaacctccaacattttttaatactaaattggcaatataccttatacagttatactcattgtattgtcagcggttatgtctaatcacaatcatatactataacatagtatgttctcatgctatcaattcacaatttctttgtatataaatcaaattttttgatgagaaaatgttagttaatttgtaggtttattcgaaagattttttctttaagaaaaaaaaaaaaagatcgtcaaacaaaatggatggaatcacatatgcgatgtatgctgcagtgccggccttgaacatacataaatatttgatattttcatgtataacaagtcttttaaggctgggcttgtggttttgagaatttggttattacacgcttcttgcgttttgtatttttttgggtcataaaaaatttcacccaaaatattaaaattttgaattatatatggatagatacacagatatgtaagcaagttccattcaggtatcaagtttagactaatcgtaaaaaagacgacgccatatattcgtagtaattaatatacatataccccaattaacagaattcgatttcaagcccccacaatctattagtatatgcttaattcatcttgtgtgatagtttgacgggttattatgtaaaacgtgcatgtgatgagtgcttacttagcagtcttgactctcgagcctacacgtttgttgcgcgcgtatgcatgcagcatatatacacatgtacgtagatgtgaaatgcatgcactcagggccggctcaacaaaacgtgggaccctgtgctcattagtttttttttctaatatatgttttatatgtttagattttagtttattatacactactgtttgtataatggaccttgattgcttaaagaaaatgaatgaaaaaataaaggaccctgtgcactagcaccaagggcacaccctctaagccgggcctgcatgcacacatatataatatatgtatataaccatcacgatcgcgcgatactgtttcttaagtatggtgacgtacgtaattgattacttgatggttctactacatagaaaggaaaacaaaaaataaatataaatgggttgtttcataaaatctcaaaccaaaccaaaacctaacttaaatgtagctgagttatcatataccatatggtataaattttggaatgactttgtagttatttattgtaatttagaatgttataattactgatcataatattaagtcaaaaacatcgaatcaataaaaagcgacatagattcttagtaattataccggccaaataatactattaaacaaaagttacaaaaaaggatccgtatatcgtgaaaatcaatcacatgcatcaaacaatagaatgaattaattcacgccggaacatctacttggtttgattttaaaactaaaccgaaccaaacatattaaaaatcgaaataaaccgaccaaaaaccaaaaccttaattatccctaaataatttcaccaaaataaatatattcaaagcaacatgcttgtgttaagtagcttttgaaactccatattgttccatttacactacgttatgatattaacaagacgatatatgggttccagttccacttacaagtacaaaaaagagttgtagaagcatcaaatctatgacaactccccttcaaagttcaaagttcaaagttatgaatgattaaattgatcaagtttcacgtggagtggtggatatactcaccatttaatatctcaactctatatatatttcttatttaaaaaaaaaaaagaatttaaacgcatattaaaaagcatcgcaagagctttttgcttggatggttgttggggatttcaacgcaaccatctcgctatcagatgcttccactccaaatgtcacgcattactctccagccacggaaatatctttcacttgtgctttttgaatagtgatttatttaattttgactatttaaggtcccacttgatcaaatagaaaacctaattgcgaatatgctctcttttattcacaaaacagtggctatcaaatcgtaaataacttggtacatttatcgtaaaataatattacactattcatttaaattacttgtattatatatcatttatttacggtttttgtcacaattgttttcatattaattttgctatataaatttggttatgtagctaataagcatatacaaaatattgtttttcattaatctgcatttcattttgttttatccaatccgtgattcataataacacactttagttttggagtttcattgtttcaatataagcttcctactccgatcctaaacatatatatcttgaagagttggagaagatttgttatgcattcttatggaaatgaatcacgtcttcaacacatggagtcaaaatgacttgagattcttattgcttttcaaaataatgtggatgtctttgcatgagaagattaatcgattggaaaaagattttcgtgtttaagttgattcgactcttgttttgggagaaagtttgctatatatgtatcacggattttcaagaatttgatggaagactctattttctaggttttcaactaccaaaacgtaggtagctggatcattcatggtattcaattgactgatgatcctagctagcattgagcatgtttataacttttctttcctcaatatatagtgtactgtctattttacataaatctccaagctctccacagtttttgtcattcagataaaaagttttatcagaataaaatttgtagagggtgggaatctttgttgatgatataattaaaacaaacaatttttttttggcaggtggaacaaaaacaaaataaacaactctgtttgattgcaactacacaataaaagttctaaccaaaaaggtatgtaaaatgattttattttaagaaaaaaaaaatgattttattttatttattttgggaataaatctaccaaatattaaatgttagaatgttgatggcaacggaaccatccacgcggcaatgaacatggcctttcaaaaattaggttcttttttttttttgataattggaaaacggcttacaaattcatactataacattacatagaatataactatataatataaaaatgaaatgaatactaagctgttaagaatactttattaaaagataaacatcaatattgaaaaaaaaaaaaaaacaaatcaagttgattgtggaaagagaagattagacaagaaccgaaacagtcggccataattaagcaatggttaacttttaatcttttagtgttgtggattttgaaaacactactcggtcttaagcagttcaattgtgttacaacgatgttacgtgccctcttacaaaaattgtgttaagacgatgttcacgtttttcgaaaactaatccaatgtgaaatgatgaaataaatcgaactataaatttgtttggttatatgactagtactataaaacaaaaacttgcttgcttatatcaatagtaggggggaaatcgtgatacacttttactgaaaatgatctttcttttctttttttgttctttcaatgcaaattttgtaacatgttacattttcgaattcattttttctaaatgtacttctcaaataatattggtactagtagaacattaccagaaaattttaacacgattatcaacacgttttattcgtagttagttaggcttaagcagcacgttgaaaaatacaagtaactaactacgaatacatgatctacgaaaaatgtttgttgaactaaacgaaaagttatcaacatagagttttaaacacattagtagcaagacaatggacaaaacccgtaccgaggcactctagtagtttgcgtgtaataaaaaacacaagacgagaatccactactacgttacaaaagtcttgagatttgttttttttttcaatcaaatagaaaacgattataagcagagagacaagatctaatggttttagctagacatcatcacattgtcaatagattgtagagcttggtttgcgaaaaacctgacatcaacatctggatcctcgcttagctccacaagcccaggacgaatcgtcttctccacaaccttttttcaccacaaaaccaaaatcaaacagagctgttttcataacaaactaataaactaaatggagttggcgatgcacttaccgattgatcaactattggaatgagggattgaagtactttagcgacgttgaatttgatgtttggaactctgtagtagtgaaagagttgtttatttacttaatatgtttgaagtacaatgatttgagtattaactattttacagtgagaacttgcctgtctttagatgcagtcattactacaggtaagagcttagagcatgtaatctctgagcccattacaggtgcaagaagagacaccgcacgcaaaatggtcattcggtagagatagtgagggttgttaaccatctcaagaacctgcggattaatgaatagcgactaattaacactaacaagatagacactgacttttctaaagttgtaaaaattctagacaaacctgaggaactatatgttgcattgcccattcaggaccaaattcctcagcaagccgcttgagattgttagcagcagcatcgcggattgagtgaacctaatgagagcatccgcaaaaaaaaaaaaaaaaaaaaaaaaaaaaaaaaatcaatttctataaataagaagcggtataatctgatcattcccagtaaaagtaagagagagaaagaaataccttgtcttgtaaccattgcatgcaaagagcaccaagcttatcgtcaaagaagccaacacctaactgacttgccaacaaagggatatactcgattatagcaagtcttactctccagtgtctatcttcagcaagttctacaatagctggcaacaaggattgtgatagtagatcaatcccaataacctgccacatataaaatatagaagtcatcaactgaatatggatgggcgagaaaggcaagttaaaagagtgaaagtcttttaaacaaaacatgttatcatgaagccattggcatgatctggtttgggtatttctgttgtaacaaacctgattcacttggtcaagtttgctgataatgttcaagcgtacatccgggaactcatctttcaatagagaaagaaagattggaaggagatgctcaattgttgcatcctaaaatagaaaaaacaacgtgaagttaaaatctgcaacatacacaatccaaccaaaacatcctgtataagaaacgcacgtcaattaaactcatttttgtacaattggtaacaacctaagtatatttcttcttaatgatgaaagagcacatgagacgcttcagacatcaggacgaaaaacagttggacatagtcataatcattaagatgctaaaatgaatttgtgcattatgaaccaacacatctctgtttgcaaactctcttaccttacccaagactggagccattcccattataactgaggccaatgcagatctgacatgctgagaagagtctgatgatagctcctacaggtagcattaagaggaatcatcagtaatatgcaacaactatacgttgattttctgtaaggaacttggaaaacaattgaattctcttaagcatgtaccttcacacaggggagaatgtgctggatagcaatttcagggtttagaatccgacaaaactttgtaacttttccggcagctgctatgcgtacttcagcttcattatcacgaagtaggcgcacatatgcaggcaccagctccgtccttaaaatagaagacacagtaaatagtatcaagaggaagtaaatgggatcatcaagttccttaagcctattggatgatatgcatttctatattgaacattaaattagcccatcaaaggtattaaaacatgctgcattaggtttatgcaaaacgttcttacctagtaggctcaggtcccacggcttcacaaagctcgtagagttgatttgcaaccatatagcgcacacgccaagacttatcctgctcagtgaaaaagtacaaagattaagcatttcttttaaatgtagatcatcagcataaaagcctacagacataatcacctgcgagaaattaacaatcacgggaagaatgtgttggacacaatcctgaggctccaacaatttcccaagagcagcacaaccctcaacggccaataatctaacagaatcttgatctgatatgaaaaaaacgtaagatgaaattcgacaaatatatatgctgtagagtaaataaacgctcagtgttcaataccatcttgagtaagatcctcaaacatggacataacgtcggtcttcaaatgcgctgattcaaccgtagcagcaaatttcccaagattagttgctgcagctctccttaccatcggcatatcatcctgacaaagctgagtatacaacgatcttaactcagtcttcaacatatccggcgcgctcgggtatgcaatatggaaaacaccgcaagccgatactctagctgtgaaccactcaccagcggcaagtcgcttaactaacgaaatgaaatgatcaaccaagtcactctccctcatctgagagccaactctacaaagcgactcaacagctttctccctaacacaagtttcttcgacagtcgaaagagtttccaaaggtggaagaagaacatgtgcatactcaacaccaccaacataaggaataaacacacccaattcttcagccattgctaataaaacctcatcatcatcgtcattgttttcgctaaggaaagggatcaattcctttctagtcctctcttccccaagagcacgagcgatcgtagaaagccttctgatggaattcaatcttagctgaatatcatcgttttttaactcgtctataagtacggcgattgggtacaacggctcatcgatcatagacatcttcaacaacaccaacaacaaaattacagcataattataacgagatcgtaaaatcaatttccagagcccaattctcaggagatgatcaattaggcgaatctaaattaccatttctatcaaaagataaacagaccaacaatcaaatcggaaattgggtcttacctcaacacaaacacggctcaattttctcctcaacgaaacacaaaatttcgttcgacctacgaagaaaaaaaagaggatctaatggcgaaatgtctcttttctttattgagagcaaacgacgacgtctttatttaattggaaccatacccttcttaaatgggctttaacgggccttttggcccacgacgtttatgctgtttcggtcaggactttacttttgcgattcatttcttgcaatttaccaattttatagagttttcactattccttcgtgaaatataaattcaaatgtggaaaaaacattaccgatacaaatgatagaattttctaaaaatgacataacaaaatttccataatataattacatttgttataagtacaacgacaatatgtgtgtatactaacaaattaaattgattcatcttcgagattgagaaacaaatgatatgcaagtaaaccaaaaacaggaacaaaccttagatacttcaccaattcaatcttgttcttcttcacattttgcaggttctctccaatcaaccatggctgaaagattgtgtacagacatatatcccatataaacgcgtaagctagtctctccgatcccaaataaccaatcagatactgccatctgtccatgattccaccgaaatcaccatctgctcgaccgtagagagaccacaatgctgatatcagacacaccgtagctccggtcagaccaactattggtgcacctttggtcatcacttcaccaagttgagaccttttgcttggtttatcatctgggtcagcgtcattgagccgtaaagccatgtatgggattagaaacgctgtttgcaacatgagatcaacagaaccaataatctagtttagagggttgctttccagagaaactgaacttcttaaataaaaactaaagttgtatttactgtttgtaaggaacatcatgagactccataagacgtcaagagagcttttgtatcgatttctctttcggtctgtgtatagcaatggagcaaacatgagtgtccaagctattacaaagttgaataacccttcagccatctgttgaatttaaaaaaaaaaaaacaatttcagaacgatttactttcactaatacacaaaaacctgttcagctcaaaggtacaaaccgggtgaagaacaggagcttgtaagaagtgaataccagctgttctgtcacaaagtccataagcaagaaactttcatcaaagatcaaacaggtaaacgaaatcgatatatcttaaggctgaacataccggcgtttgtaagaggcaagacaaagaagaaattcagagaaagtcccaaaagagaattcactgtctctgaactaattgcccaaactggatctccctgttgatcatagagattattttctaattaagcaaccatacaagattacacaatctaagataatgctaaccacaagcacatatcatgataatctatagagagaagagcaaatctcagtaataagttgaagataacaacaaaactattcgattctcaaagcattcaagcagagaaattgaaaaagttctcattcctaaaatcatccaaaatccaaattacttttgaagattcatcaatgtgatgctacataaaccttccaaacattcacataatccatagataaattagtagccacatagaactatggctatatcaggaactatgagtatgattcaaaaagaacaaacctactagattctcaaaacattcaagcagagaaattgaaatggttctcaattcctaaaattatcctaaatactttcaagattaatcaatgtggtgattctacataaaccttagaaacattcacacagatatatcaatgtctcaatctcaggaactatgaatacgaatttttgaaggtattatcactcacaggagcgtaagggagaagaaagagccatagtatatacacagcttcactagtccatagaagataccgaacaattctccttatagaatcatcttcaacctctaccgtcgccgtctccggtttccggcgagcacagcataagaaggaactgtctcgtgttcgtaatttgaaacgattcgtagactgccatggattgtagcagcgatcgactgtggagatttctctactccgaagaaaatggcggcgaatttgtggcgatttgatttgggaactgtggagacggtgacggagatatgtcaacgtcggtgaggttatcagaatcatcgtcgtcccttcactgcattatccaccgtttagtcggagaattttttttatttatctgagagagacttgctaaaacggcagcgtattggttatctaaatttgaaagcaacgacgtcgttttaattgaatcgaattacacattacagttggctttaaacaggccattggcccacggccttataaaacgccgtttcggtgagacactgaaattggatagtcacatcattattatgggtgctaagccaaatatctttttcatcattattattcgacattcctcaattttcgtcaacttcttttaacaaccccaaaatcatggttatataactttgctttatatctagaggcttagttaaataaataaataaattcaaaattaaaagaacattgaatcatgtaggcaagattcaatttcaactattttggttaattttattatttattttcatttaattattgtggaacgtatgatttattcatgtagatagttttctaatctcattagaatatcttatcatataatttaagtgtggaccaaaacataatttatttcttctacgttatttctcttttttttttgtgtgcaaaatacttgtattcattcaatcaagaaagaaccaaatacaaagagaactgacttatttctctatatgtaaattattgaagaaattataccttttaaaaaaataaaaatgtatcgagatacatttaaatttctgttgtatgtaatgtgtatacgtgtaatccaatttcttgggattctatataattatttatgttgttatggtctgtacaaaaatatcacatgcttataatataagagatatttcttttatacgtatgtattcttttaatggtttttaatatagcaatattaagattcattgttcatctaaataagtttttattagttagcgcaaaaataaaaactcgtttggagaaacaaaaaatggttaaagcgattaaatattgtttttcaatacattaaaattgtttgccatcttctaaagttgtttactcacttcagaatacatatgatactctctaatgggaagaatcccatgagccaaaaccaattgtctttggagtagaaaaaacttatagatctttttgtggaatcataaccctagattcagtagggtttattgaaaaaggaaaagataatacatatcctaacaagacatatccaaactaatccacaaaaaaactagacgattcgtgatatattggagatatcaaatgtacgatgtggcttcgaattcctgccaaattcaaagggatctaaaaggtctttaatgattcttcatatgtcatgaatttctactacattgggatgaaagtaagttagttagtttttatttgtttgcttttcatttttgctaaaatttttgatgaattttatcaaatataaaacacagtagcgtagactatattgttaaattttttttgatgaattttatcaaatttaaaaatacaatagcgtgattttgagaataaagcctataattttccttcatacggcttattgagtatacattagaactatattttttacaataggataacatagttctgaaatgagtaaattgaaaagagtttttgaattgattgaagtatgattctggttgtttagaaaaaaaaaaaaaattaataaaagaattaaaccattatgtgtgaactgtgaatccaaatattgttctttttctcacttttattagttaatcactgatatatctcatcaatcatagatattgtttgcaaaaatacttaaaccgttttgtgtacattacgatcacaaaacaagagaatcacataacctttttttcaaactaactttttttattaagttgaatcaaataagtttacttctatattatttaattatatctctctacaacatttaaaaaccaacacgtaaattcgtattaaaataatatggaaattgttttttcaaaatcctctacacatataagttatttgaatcattaaaacggagttacaaactttttttcttcgattatcaatgtttttctcctaaagaacaaatgaaatcgacgacaacctaattttttttggcatgtctgccaacaaaactcatagccatcagattgaactgtcttgtaatcaaacttgaactgtctccatcacttaatctttgtacgcagtttttataacttctatatttaatcatgtagaagattttaattagataaatttcagttacaaaaagtggatattagacattgcgaaaagagtattgacatgcagcaaaattgggtaaagtttgtcacactatttaattgaatatacttgaaaaataactatttatctggtaatcttgtaaataaagatataataatagatatctttaaataattgactatgatttataattttatatggtgaaaatagaaataaatttggtaaataagatattgtagttggcacatacacaaaaataaacttcaagttaaaccaaattggacaacctattgaaaaaaaaaaaaaacagaaacaaaatcatgtaccgaaatagtgttctaagtcatcattctgactctgtctatataaagttataaacgtatgtgttctccaatatattcagccagaaagaagagaatcttatactaattcaatggctactttgtgtataggttcagctcctatttaccaaaatgcatgtatccataattttcgtcttcaacgtcctcgtcgtttcatatccaaatccatgacaaaaacgatgccggatgctaatcctcttgacctccgtcgacgctcgggcaactatcaaccttcttcatgggaccatagttatctcctctccatcgagaacaaatatgtggtaaagtattcgtcattattaacgtttcatttggtgacgtttttaattacaaaagttgttactacacatgtaaatattttgggaaaactgacatgtgcatggttttattggatcaatattatctgacagactatttttctcatgaactctggttagtatacatttcatacatagatatatatatatatatatatatatatataagaacatttggttatacttttttgttaaaggtattaagataactaatgtattaaatatttaacaaaaatgatttatatatgctattagatcataaatctgattttctttctctaaaatatctcttagtagctagtattaaagatgacttactaattagttataatatgatggatacagaatgaaaaagaagtgataactagacatgtgttgaagaaaaaggtgaagaagatgctagaggaagtagagacgaagagccgtctcgagaaattagagctcatcgatgatttacaaaagcttggggtttcgtatcattttgagcaagaaataaataacattttgacaaattttcatcttgaaaatggaaaaaatatttggaaatgtgacaaggaagaagatttacatgcaaccgcactcgaattccgacttcttagacaacatggttttggtgtctcagaaggttagtattttcacactcggtaaaaacgaaatgaaaaaattctataaattagtttcactgtataaatatcatatgtaactaaaaagaccatgcatttcagatatatttgatgtaatcatcgacaaaatcgaaagtaatacgttcaagagtgacaatataacaagtatcatcactctatacgaagcatcgtatctctccacgaaatcggatactaaattgcataaagtcatcaggccttttgcaacagaacaaataagaaatttcgttgatgatgaaagtgaaacttacaacattatgttacgtgagatggcgatccatgcgttagaaataccgtaccattggagaatgagaaggctagagacgagatggtatatagatgcatacgagaagaaacatgacatgaatctttttttggccgaattcgccaaaatcgatttcaatatcgtacaaactgctcatcaagaagatgtcaaatacgtttcctggtaatagagattaatagaaggaaaatatataaatgctggttttggtaaatctcacatcaatattttcatatatatactctttctaatcctctccttttaattgtatgaagttggtggaaggaaacaggtttgggtagtcaacttcactttgtaagagacagaattgttgagaattatttttggaccgttggaatgatatatgaaccacaatttggatatatccgacggatcgtggctatagttgctgcacttattacagttattgatgacatctacgatatttatggtactcctgaagaacttgagctcttcactgctatggttcaaaagtaaggactctactgcttatatttattctgaattttctttgtatataattacaattacataacattatatttaaaataatatagtatacgatgtaaattaagtgtgtttaatatatcccatattcacgttttaaaatatatttttaagtagtagtcgtttaaaagtatatataattaatcatattccacacaagttcacataaatatttttttcaattccatctttctattagtttttttttgtaaataaaaattataggaaaaatgatatgttgatgatagattattaggattttaatcagctatttttcatgatattcttagttttaaataataatgttatctaaaatatttatttgcagttgggatataaatcgtcttgatgagctccccgaatacatgaagttgtgttttcttacattgtttaatgaaatcaatgccatgggatgtgatgttctcaaatgtaaaaatattgacgtcattccttatttcaaaaaatcggtaagttcaaatttgtatttacacattatagttttattttttggataaaaataaataattattgattatatatgtttttgttcaaactatagtgggcagatttatgtaaagcatatctagttgaagcaaagtggtacaaaggaggatacaaaccaagcgtggaagaatacatgcaaaatgcttggatttcaatttctgctccaacaatgttaatccacttttactgtgctttctctggccaaatctcggttcaaattttggagtctttggtccaacaacaacaagacgtcgtccgatgctctgccactgtgctccgtctagctaatgaccttgcaacttcgccggtaagtgttctctcttgtaacttcgccacttttatgtgttttaaatcgtgtatgagtatttataacaaggataatcttgtaagtaactcacaaatgaaaccaaagtcttaaaactcgactgcataaattaggtggacgaaagtctctatatcatggcaaaaaaccgctaagcaattcatatatgacttgacaatgtaggatgaattggcgagaggagacgttctcaaatcggtccaatgttacatgcatgagaccggagtttcggaggaagaggcacgcacacatgtgcagcagatgataagtcacacgtgggacgagatgaactatgaagcaagaacagcggcacgcagttcttcgttactttctcgacgttttgttgaaactgcaatgaacctggcacgtatgtcgcagtgcatgtaccaacatggcgatggtcatggatgtcccgacaaagccaagatcgttgatcgtgtccaaaccttgctcgttgacccaatcccattagattaaaagacactaaaatatttcctaatagtaagaaaacaagttatattatactttgtgtgcgatgttggattacggaactgatttaaaataaaagtttcgatttccaaaattaagacttttgcaaagttaacaattaatttttaaacttaagcaaccatgggatactttcgcacaaaaaccagcaaaatcggctcacattttaaaccaatgaattatatacgttctttacgatttctagtgggcttttaagaggcaagacaaagaagaaattaagagaaagtcccaatagagaattcattgcctctgagctgaaaatagagatgttgtataaattgaaaatagagatttctgaatatagaagaaaaaattgagatttctattttagagttagatatttttgctttaaaatagaatttacagaaaaaaaatatagagtggagttggagatggtcttatggaaatcaaaaattcaaattttttgtcactcagcacaaaaatatattatacaaaaggccagggttttagaacagataatattttaattactagttactataattattccaaatttcttttagattttttcaatgtgattcaatataatcacacaatctttacaatagtgactcggaaaagattcaacaaacacacaaatgtatggccacagtttgatactatttctacagtttaaaccctaaaaacaaaattatataacgaattcaaatagagaaacatggcgatataacactactcttcactcatctttgcaccaatcaatgaataaagatgattcgaaaacaataacatgcaaacatcttgcagtatcaaataaattttttactataaatttttgcatgttatttgtctcgaaccattttgtttcatattcttacactttgtaaaaccttctcttttcaaaggaacatcgatggggttgaattaaaactgatgtcatagaatactgcttataaaagtcgatcataatgtagatctaataaagctcattagaaaattcctctattatctttctttttttgaatattatgttaaattatactcaaaagcaaaaatcactgagttttacatatgaatgtaaagaacttttcataatatatacaagaaaaaaaacagtactagtcttggtttcttcttgttgcaaaccaaagtactatgccatcttcatactttggtgtgcctccggtcttgagcgtgcttagccggttcttgacgtttttatcgatcgtctttacaagcattgcagcttgtaatggatgttccccatgtctcatgttgttcctttcccgccatactgagtgaattgtgttttgaaatcataccgtgtgatgaacgtcattgtttggtctctactcctttttgcgattagctttgtgatttctttccagtccgccgtgaatttgtccaacagcaagcctctcgtgagctcctcccatatctgatacgtataagggcatgagaagaacaagtgatctcttgtctcctctagatcattacaaaagacacattttgcattggcgttgcctttccacttcaacatccggtccccagttgacaatctattcttcattgctaaccaagtgataaaagagtactttggggtggaatgtgggaaccatatccctctgtactcttccatacttggtttggctgtccgaatctgtgaccatgtttcttttctcataaacgtattcctacagtgatcgttctttcctttccacaacacagtatccaaatccccatttcttttgagtttctgattacttaactcctcctcgataaggtttagaactgggtttcggtgatgtctctttcggtgtgactccatcacttcacccaccgtacaagtttttgatattcctaagtcaacgaagcctttttctccaagctaatcatataaacttcccatagagcaccactcatcaaaccagaaagatgttagatacccatttttaacctccactcgataaaactgttttgctatacccccgtatttgagaatcttgtgccacatccatgagccccgagttgtgttgccttttatagaccagaacgaaccatcacggattagatatttttgcacccagttcacccacaaagacccatgtgccgagaggatacgccatattagcttaagcatacataccttgtttgcttcgtctattgatcgcaaacccaatcctccttcctgttttggagtgcagacctccgaccaagcaactttagccttctttgggtttagagatggacccgaccatagaaacgctgaacagagtttatctatttccttgatgcatgcttttggaagacggaaagcggctatccaaaaattggtgaggcagaaagttaccgaacttaagagttttagtcgtccagcaaacgatagcgtacgagtcgaccaggagttaatttgcgacttgatcttttccaacaagggcaggaaatctgaggaggtcattcttcttgttagcagcgggagccctaagtagcgaactggaagagagccatactcgaaagggaattgttgtaggatctcatctctctggtgctcttgtaaaccagccatatataaggtggacttttgaagacttatctttagccccgagtgaatagcaaagtcttcaaacacttctaaagtattctcaatggattttttgtttccctcaataaacaccattaaatcatcagcaaaacagaggtgagttaagtttaacgtcttacaattcgggtggtagtctattcttttatcacttgcagccttgtctattttcttggacaaaacattcatgcatatgacgaacaatagggactaagagagcagccctgtctgaatcctctctcactaccaaaatagcctgcgagttcaccgttcacttgtaccgagaaagacgctgtagagatgcatacctttatccaattaatgtagactccggaaaatctagagcttgtagagttgtggtgagaaacccccattggactgagtcaaaagcttttgatatgtcaattttcatggcacatcgaggagaaactgtttccttgtggtaatcctttataatctctgttgctaggaggagatttttcattaatagtctatctttcacaaaggcagattgatttgaagagatgaacttgggaagaatgattttgagtctgtttgcaagaatcttcgatatcaccttatagagaacattacagcatgatatcggtctatagtccttcatcatcacagcttcttttctcttgggtatcaaggccaaaatagtggagtttactcctttgggtaggaagcctgtcttaaaaaaagattggatggctaccacaaaatcgtttcctactatcgaccatgtctcgttaaagaactcacaagtatatccgtcagggcctggggatttatttgaaggcattgagaagagaactttccgcacctcctctgcagtgacttctagtgtgagcttgtcttgtcattctcatcacatctataatccagtagagtttccagttcctcccgcgaccaatccacgtagtctggcggtttgagcgttaaaaagtctctgaagtatcgaactgcctctgcttttatttgctgctgatttgatgcaatatgtccatcatcacacttaatctctctaacattgttacgaacctcccgaatctttgcagcattgtagaaagttttattattttggtctcctatcttcatccaatgcagttttgctttttgcctaaggtagctttcctcaatacccgacagccttaaccacttctcatatgcgtccgcttcagctaccactgcctgtgaagatggccttgtcatagtttctgcttgcttttcacataaagttttataggcttcttttgctttttttgagatatcaccaagtaactgcttccccatctttctgaaatgtggcttcagaccttttaatttttttgataagcggtgcatggctgaggtagaatgaaagagaggctgagttgtcttccaaagctcttctgtctcacttctgaaatccgaatacgaaattaaagcatttataaatttaaaaggcctcttgactcgttgttcctgctccataatatagaatcgacatcttaggtgatctgaacaaccgcctgattcaaagacgctgtaggactgttcatactattgcatccattgcttgctaatcagtaccctatccagcttcttacatattactccttcctttctcttgttacaccatgtgtatctctggccttggtagctcatatctgttaattcacaatgtctgattaagtcttgaaaatctctcatcccttggagaacgaatggagatgattcatagagtgaatggtcctctccttctaatatctcattaaagtctccacatattaaccaagctttgttatagaacaaaggggaatcatgatgatatttaatatcactccacaaatcctttctttctgctgcaaaatttgatgcataaacaaacgacacaaagaactcttcttgtcttccttctaataagacagagcaagtgatgagttgtgacgtcttatatattggagatacacgcacgttatcttctattatctttcaatagtaatttgatataaattaagataatgtgcagtgaacgagtggcgattgttaagccaagtgaacattatatactttattttatactttctccaagcttcgaatggagaatttatttccatacgactaactctacctaaaagggccatgtttgtttgccaacataacacgacgatcacgagatacacataacatttagaatttggagaagatacattttgtttgacttcactttttgtgcgaatggctgttctacctgaaggggccattagtataatttttttgtacataataacgtcaccaaatataacacgagaatcacgaggtacacaaatcatttaggcttggacattatctaatcaaataagctatgatatcaaatttacatacatatagtggcctcgtgggtataattacacaaggagcttttggagaaaaagaagtgtgtgatttaaatgacaattatacaaatgtgtacaattatcagatccaaagttcatgttttaaatcatcaaaaaaataataattgatgagttaaatgatatttttttcatttagatttagttagattagttgtacggttgtaccattatttaataatttaaaagttgaaatgattataatgtataaaagttgaaaatattgtaacagatatagattaagcatttttgcggtcaatatattataaaagcttttttagctattaattgaaaaatattttacacccttagatcttttgatctcctaattatataaaatattttcttctaccgtttgtctatataaccatatgtgttgtctagtgcatgtattcagccacgaataagagaatagtctactaaatcaatggcaactttacgtataagttcagctcttatttaccaaaataccctcacccaccattttcgtcttcgacgtcctcaccgtttcgtatgcaagtccatgaccaaaacgacgccggatactactcttgttgaactcagtcgacgctccggaaactatcaaccttcaccgtggaaccattgttatctcctctccatcgagaataaatatgcggtaaagttttgtactatattttcataattttttattgttgcacctaagtttcacttttatttatgaattcttttattaacaagttgttactacgtgcatgtttaaacatatgtatgtatatacagagtgaaacagaagtaataactagagatgtgttgaagaaaaaagtgaagagcatgcttgatgatgagaagaagagccgtctcgagcaattagagctcatcgatgatctgcaaaaacttggggtttcgtatcattttgagatagaaataaatgatactttgacagatcttcatcttaaaatgggaagaaattgctggaaatgtgacaaggaagaagatttacatgcaacctcactcgaattccgacttcttagacaacatggttttgatgtctcagaaagttagtataatataatgaaattttaaatttctatatataataaattttgttgtgtgatcaatatcatatattaactgaaacaaccgtttatttcagatatatttgatgtgatcatcgaccaaatagaaagtaatacgttcaagaccaacaatataaacggtatcatttctttgtacgaagcgtcgtatctttccacgaaatcggatactaaattgcataaagtcatcagaccttttgcaacagaacaaataagaaaatttgttgatgatgaagatactaaaaacattgaggtacgagagaaggcgtatcatgccttagaaatgccgtaccattggagaatgagaaggctagacacgagatggtacatagatgcatatgagaagaaacatgacatgaatcttgtcttgatcgagtttgcaaaaattgatttcaatatcgtacaagctgctcatcaagaagatctcaaatacgtttcaaggtaatactatcaaagaaatatagatactagtctttcgttgttaattattgtatacataattcgttctaatcctctttcgttaatgatatgaagatggtggaaggatacatgtttgactaaccaacttccctttgtaagagatagaatagtcgagaactatttttggaccgttggattaatatacgaaccacaatttggatatatccgacggatcatgactatagttaatgcccttgttacaaccattgacgacatctacgatatctatggcactcttgaagaactagaactattcacttccatggttgaaaagttaagaaatattctacctttttttggtcaatcaattggttattttgcagctgtaccatggtctaccactagaccattattacagaaatcttctacttaagctt

SEQ ID NO: 69 - DNA, 71184 bp, Arabidopsis thaliana
agttttaagaagattatggagaggagggatagccattttttattgatcaattatttggtctgtgtactctgtgtttttttgttaaacaaaatggcatactctgtttctctcagagttttaatgaaccagtgttatatagcactttattatatcttttgctcaaatttaatatatcatttatactattcaactgaaacatgtgtgttatattgtgtcgaacatagttcttctgaaagctgattgtaaagttgacgtgcacattacgttacatttctttctcatggtgtgacttgtgatgtacgttacatcttcatggctaaaagaaaatttcacaaaagaaaaagtttctctctcacatttccttaaacacatagttggctaactaaagaaacagaggaacatcagattttgtgttctgtttaggtataatcgatgctacacttattctgtaatctcatgatgaatttagttcaagagttcagttgtctaaatacttcactggcacaagtagaaggtcatttttcttgttgacagtgagtccaggagcttcttccatgtccatatcttcaaccttcatgccttctggtaacttccaatcaaaatgatacaaaagattcgcaagaccaaactccaccattgttgtccccatgtacattgcaggacacattctcctgccgcctccaaacggtagcaactcaaagttctgtccttttgtatcaatattactatcaataaacctctctggaagaaactcctcgggatctttccaggtattgggatcacgtccgatagcccatacattgacatgaatctgtgtcttgggttgcatcgtgtagccgttgatctcaaactcagacattacttctcttggaagaagaagaggtgctggaggatgtagcctccatgtttctttaatcaccgttttcaggtaatgaagctgctctatgtcttcgaagctgattagttctctgttctcaaatttgtttcggatttcagattgaactttcctcatcactagtgggttcttcgcaagttctgccatcgtccatgccatggttcctgcagaagtttctatccccgctagaagaatgtcctgttacaagaacatttactaagttagaatacagaacatcttaccattggattttgagtattttattattagttaccatcaagattgctttaacattgtttcttgtgaaattgttatttccaacaacagtttcttctttctccaatttcaaaagcaagtccacaaaatcttcacttcctacttccttttcttctttatgcaaatcaataatttgttcatagaacgcatcgagatctcacacgcttttttctctccgcccttgcaagccagtgaaccgatcgatgatccaacctatgtacggtataaaatctgaggcagagaaacttcccaacatttcgaatgcttcacggattaacttgttgaaactgtcattgctaagcacagttccttcaaaactcacaccaaatgctatcctacatactatacttacagttaaagcaagacacttcttgttcaagtttatcggagtctttaaagaagctgattccgcgattgaaacgataagtttcttgacctcctcgtccttgatgtgttgtgttgagtgaatatttttagcactgaagagctcttgagtacagagcttccttagctctttccaataatcattgtaaggagagaaagatatgtctcggttgttgtaagagagctctcttccccctgaggagtgagagatgaattaatgaagtaacaattcaagattttagtatgtggaatgatttatagtacctgctaaggaaggacggctacaacaatggagatcatagtctcttagagcttgtttcgctgtctcggacgaagaaagtatgactgttgggacctttccaagattcaaaagcatcacaggaccatacttctttgagagcttccatagagactgatgtggtaattctccgagctgatgtaagtttcctatgatcggaaaaccaggaggagatggtattggtcgatgttgccgccgctttgctcgtttgaaggcggtgagaagaagcaagatgacaaggaagagaagtgatagaatcaaaatgttaaccatttgtatattaatgttttattgagttatatgacatatgaagaaagttcatgccttgctatatatactactttgggaaatgctcactttactaatttaattgatgaatgcgacatgaaatttttagagtagtaaaattataataattgctacgtttactttcacaaatttttggcttgttattaaaataaaagtatattatatcacaataatgacttttgaatcttgaaaaatccataggagttgacactataactactttgtctaatgaaaataactaattaatggaagttctttcatataaataaatatttgacgttaacttatcataatccacgattttacaaaaaaaaaaattttaagttagaagcttacggttttaaggcaaacttgtaaactcatcccaatccagttcgatttcaccgtgtgcatatactgcttatagaccacttttgtcaactggacttggcccaagtgttatatatggtagactttcataaaaacttttattcataaaaaaactttctcactcgcaaaatcattccaacatatgggaaaattttggattatcggtagcaacccattcatgttgatatgtatgaatatctcttttgacgagtgaaatctgtgtaaggtttcagtcgttttattctgatttgtttttcaaatcatgatcatacaagagtacaagatcatcccatcttagaaccaaattcttgagagcacaatattacaaaacgtaatgcgttaaaacattttatttaaaaagaagaaactctttttttttgtcctgtctgattaaacatcaaaggaagatgcgatgtttttatatattccatgtgatgacattattttaaggatctagaaacttcgttggcacaagtataagctcgtttttcttgttgacagtgagtccgggagcttcttccatgtcaatatcgtcaaccttcatgccttctggtaacttccaatcaaaatgatacaaaagattagccaaaccaaactcgaccattgttgtccccatataaactgcaggacacattctccggccgcctccaaacggtaacagctcaaaatgctgtccttttgcatcaatattattatccgtaaacctctccgggagaaacacttcagggtctttccaggtatcgggatcacgaccaatagcccatacattcacgtgaagccgtgtcttaactggaatcgtgtagccgttgatctcaaattcagacattgcttcccttgggattagaagaggtgttgtaggatgtaacctccatgtttctttgataaccattttgaggtactcaagcttatcagtgtcatcaaagctgattctttctttgttcttgatttgacttctgatttcggattgaacttttttcatcactcgtggattctttgcgagttctgccattgcccatgtcatggttattgcagaagtatccattcctgctagaagaacatcctgtaacaacatataaacatcaattgtttaaatttttcttacagatttgattgtgaatatatgattagttaccatcaatatcgctttgatatggtttctagtgagcttgtcatttccaagaacagcttcttctttctccaacctcaacagcaagtccacaaagtcttcactaccttcttcctttttctgtttatgcagatcaaacatttgttcatagaaagcatcgagatctctcatgcttctctctcgccgtccttgcaaacccgtcaacaagtcgatgatccttccgacatacggaatgaaatctgaggcagaaaagcttcccaacatctcgagcgcctcacggactatgttattgaatcgttcactgttgagcacagttccctcaaaattcacactaaacgctgtcctgcagaccacactaacagttaaagccagcaatgtcttgttcaagttgatcggagtcttctgagcagctgattcggagattgaatcgatcagtttcttgacctcctcgtcctttatcggttgtatagagtgaacttgtttactactgaaaagttcttgaacagcgagcttccttacttctttccaataatcatcataaggagaaaaagcaatgtctagatagttgtaagagagctctcttgcccctaaagaatgattcaagatacaaaaagattcaagatttcaagattcaagattcaagggtttgaacagagaaaccaaagttaaaattgtagtacctgcaaagcctggacgactacaacaatggaggtcatggattttcaaagcttgttttgctgtttcagaggaagaaactatgactgttggtactcttccaagctttaaaagcatcacagggccatactttttggagagtttccatagagattgatgtggtaattctccgagttgatgcaagtttccgatgataggacagccaggaggagacggtggtgtccgttgataattcctccgattcttgtggttgaacacggctacaagaatacaaatgacgaagataagtgacagaagccaaatgtttgtcatttctgatttaattgcaattaaagtggctccataagtgtagtctttatattatactagtacattgctgctctcttcaattattattatcttacaatatatattctctgctacgtagtacgtaacgttaaacttaattttatattcataagatatactttttaggtttgaaaagtcaaacaagaacaacaacataaccgtcgatatgatgagtcagctctaatctcaaccacacgatcttctcatctctggcacaagtaggagctcgtttttcttgtttacagtgagtccaggagcttcttccacgtcgatatctttaacctccacgccttctggtaacttccagtcaaaatgatacaagagattagctagaccaaactcaaccattgttgtccccatgtatattgcaggacagattctccgaccgcccccaaacggtaacagctcaaaatgttgtccttttgcatcaatgttattatccataaacctctccgggagaaacacttcagggtctttccaagtatcaggatcacgaccaatagcccaaacattcacatgaagccgtgtcttgacaggaatagtgtagccgttgatatcaaattcagacattgcttctcttggaagcaaaagaggtgttgtaggatgtagcctccatgtttctttgatcaccattttcagatactctagctgatccatgtcttcgaaacttatcattgatctgttccccatttgagttcttatttcagattgaactttcttcatcactcgtggatttcttgcaagttctgtcattgcccatgtcattgttattgcagaagtatcgattcccgcaagtagaacatcctgtctcattcaaaacatatcagactctttggtactactacattacataaaggattgttagctaaatcttgttttagttaccagcaagattgctttgatatggtttcttgtaagtttatcatttccaagaactgcctcttctttctccaaccttaagagcaagtccacaaaatcttcattcccttctttctttccctctttatgcaaatcaaacatttgttcaaagaatgcattgagatctctcttgcttctttctctccttccttgcaaacccgtcaacacatcgatgatccatccgacatacggaataaaatccgcggcagaaaagcttcccaacatctcgagcgcctcgcggactattttgttgaatctgtcactgttgagcacagttccctcaaaactaaccccaaaagctgtcctgcatactacacttactgttaattcaagacacttattgttcaagttaaccggattcttctgagaggctgattccgcaattgaatcgatcattttcttgacctcctcgtccttaataggttgaatcgagtgaacttgtttagtactgaaaagttcttgaacacagagcttcctaacttctttccaataatcatcataaggagagaaagcaatgtccagatagttgtacgaaagctctcttggccctaaacaatgattcaagattcatgaggtttcttttcttttttttttggtttaaagattcatgaggtttcttgaattctatgaggaacagaaattgaaatttgagtacctgacaagcttggacgagtacaacaatggaggtcatgaactctcaaaacttgtcttgctgtatccgaagaagaaactacgactgttgggactcttccaagcatcaaatgcatcaccggaccatacttctttgagagtttccatagagtctgatgcggtaattctccgatctgatgtaagtttcctatgatcgggaagccaggaggacatggaaactgtcgatatttcggatgtttcttgtggttgaaaacggccagaagaatacagacgagaaagataagtggtagaagccaaatgtgagccatttctgttttctgaagggaaacctcaaaaaatgtataagcacgttgctgtcttcaattattttctgactggcgggtaatccatgtttatagataatcatatatataattagagtactctttctatctaaaatatccacatcagcaaaacaataaattaataaaattaaaaaatattaaaaatatcattcaattcaaatctatacatgagaataatttgaaatacataacaaaagagttaagtataattaataaatattaataataatatatacaaaaatatgaagtatttatgagtataatatttttaatttaaatcatatatataattagagaatactatctccatctaaggtgtcaacatcagcaaaatattaatttaataaatttaaaatatattaaaaatatcattcaattcaaatctatttgtaatatatgaaatttttaaaaaatatataagaaaagagtttaagtataataaataaatattaataataatatataaaaagatatgaagtatttatgagtataatattattaattaaatactgtatttgattgtaaatttgtaatacaaactttatgcattataaaatattaaaataggtaaaacaagcataaaataagagtattagatccaaactatatataaaaacttaaaataaataagagtaatttattaaaatataaaattgagtgacaagattattgtataaaaatagctataatagtataggataccaataaatccacacaacgtgtgggttgatttctagtaataataataaaaacattattgtcttattgtgtcaaatttttttttctatagtaaaacttacttttatattcaaataaaacttttctttccgatactacaaaaacaattgttttatataaaacaattgttttatataaaacaatttattgataagggataggcaaaatattcgttaggttcgatccggttcagtttgattcgaaaaattcggatatccgtgattttacgaggcaaatcaaatactaaaaatgatattggttaaaatcggagcaaataacaaatactaaaatttaaacaggcggatatccgctccgatccgttgtacatgaacatatgtatatgtatgtagataattacagatatatattataattttacactttttaatgtaaattttctaagtttttgttcatcaaattaattatataactattagttttaaaaattaaaaagaaataatttttcagtgaaatattacttaatttggattcaatttctgattttgtttttcattataatttttataattgtttttgatagatattcagcaaatcagcaaatatctttgattctaacggatatccgtacatccggatcttcggttactttcgaagcaaatactaatcataaaattaattattcgaacatagcaaatctgatcacaaatactaccaaatccagaatattctcgtgcccacctttaatattgaataatttcttttgagctagcaattagaccaactgataacaaataaaaagtaataaatgacaagatttatttgtatacactttattttgtaatctcaagaaaaaacaaagtttaagtgattagtgatctaaatacttcagaggaacaagtacaagctcatttttcttgctagcattaagtccaggagattcttccaagtcgatatcttcggccaccatgcctactggtattttccagtcaaagtgatacaacatattggcaagaccaaactccaccattgttgtccccatgtacatggcaggacacattcttcgaccacttccaaacggtaacagctcaaagtgttgtcctttcgcatcaatgctactattaacaaacctttctggaagaaactcctccgggtctttccatgtatcgggatcacgcccgatagcccagacattcacataaagccgtgtcttaactggaatcacgtagtcattgagctcaaattcagacattacttgtcttggaatcagaaagggtgatggaggatgtagcctccatgtttcattgatcaccattttcaggtaatggagctgatctatatcatccaaggtgatcattgactttttcccaatttggtttctgatttcagattgcaccttcttcataactcgcgggtttctcataagttctgtcattgcccatgtcattgttattgcagaagtgcctatgcccccaataaggacgttctgtgtaagatcataaaaaaaaaaaaagttagaatatctagggctacaatatatcttaatgatggaatgagaaacgttgtatagttaccatcaagattgctttgatatggtttcttgttagcttgccatatccaataacagtttcttctttctccaacctcaagagcaagtccacgaaatcttcaacaccttctttgtttccctgtttatgtagatcaaacatttgttcatagaatgcatcaagagctctcacgcttctctctctctgcccatgtagccctgtgagccagtcgatgatccagccgccatttggaaaataatctgaggcagaaaagctccccaaaaacaaatatgtatcatggattagtttctcgaatctgtcactgttgagcacagttccttggaagttcacaccaaatgttgccttgcatgtcactcttacagttaaagaagtaaacttctcgctcaagttaaccggagttccctgagaagccgattctgagactgaatcgataagtttcttgacttcatcttccttgataggttgaaaagattgaactcgtttaacactgaagagttcttgcacacatatcctccttaattctttccagtaatcatcaaaaggagagaaagcaatgtccagataattgtaagagagcgctcttggtcctaatcaatcagggcttttgtttattaatgctgtgaacacacagacaaaaaaactaagactttagtatgttttgagtgagagtcacggtacctgctaagcttggacggctacaacaatgtaggtcatggattttcagaacttgctttgcagtttcagaggaagaaactacgaccgttgggatacttccaaacttcaaaagcattacatgaccatactttttggagagtctccatagagattgatgtggtaattctccgagctgatgcaagtttccgattatcgggaaaccaggaggagacggtggtttccgttgatgttgctgccgcttcttgtgcgtgaaggcggctagaagaatacaagagagaaagagaagtgatagaaacaaaatcgtagccatttctgatgatttgatggataatgaagggcagctatacatttaagaaccattatcttcacttattatgatagcaatgagcttagggaccactacatggaggtaatgagacactttagaggcaaaaaagtcttgtaaccaattcggagactattccatatcgttgaatccagtatctttccagaagaaaacaaaaagatgaatattgagttgattacataatccaatatattctcacaaccacatgaatcccaagaacataatcatatttctttttttttcttaataattttagttggattattaataataaataatatttcaaaaaataataattagaatttaaagttaaagcaaagctccgacttgaaatgcatattgatgctcatcaggaaaagtcataagactttttcctgcattacctttttcttctctcaacattgaaccaattcgaagggtttagagtttattattatcaagtttcaacaaagagagtgttcaaagttttttttttttaaatatcctatcggctgatccggtcagttttggtaggaacgcaccaaggtgctacagagtgaatttccccgattcaagtagaattgggccaccacactgcctgatccgagtttgagagagttgagaaaacatcgtcttctcggttaaacaatgttgttttgtaaggttgggtggaaattaaagaattgattactgtaagagtcaaagatttattaagaaagaaagaaacagaagatatagttttatttatcatagtcgatactacattctttagtactatcatgaaaagcttattttacagatttaaatacttcctaggaacaagtacaagctcatttttcttgctggcattgagtccaggagattcttccatgtcaatgtcttcgaccaccatgccttctggtaatttccagtcaaaatggtacaagagattggctagaccaaactccaccattgttgtccccatgtacatggcaggacacattctcctaccacttccaaatggtaacagctcaaagttttgtccttttgcatcaatgttactgttaacaaatctctctggaagaaactcctctggatctttccaagtatctggatcacgcccgataccccatacattcacataaagtcttgtcttggctggaatcgtgtagccgttgatttcaaattcagacattacttctcttggaactagaagtggtgctggaggatgtagcctccatgtttcattgatcaccattttcaggtaatggagttggtctatgtcatccaagcagatcattgacttgcccccaatttgatttctgatttcggattgaactttcttcattactcgcgggtttctcataagttctgtcattgcccatgtcattgttatagccgaagttccaatgcctccaagaagaacattctgtaataagaccattataatctttaggtattataatcctacaattggaaagcaaagctttgtatagttaccattaagactgctttgatatggtttcttgtgagcttgccatatccaagaacagtttcttctttctccaacttcaagagcaagtccacaaaatcctcaactccttctttgttcccctgtttatgtagatcaaacatttgttcatagaatgcgtcaagacctctcacacttctctctctctgcccttgtaaccccgtgagccagtcgatgatccagccgacatttggaaaataatccgaggcagagaagctccccaagaacaaaaatgcatcatggattaacttgtcgaagttgtcactattaagcacagttccttggaaactcacaccaaatgctgccttgcatatcacgccaacagttaaagaagctaacttctcgctcaagttaaccggagttttctgagcagctgattccgagaatgaattcatcagtttcttgacttcctcttccctgatgggttgaatcaaatgaacttgtttaggactgaaaagctcttgcacacacatcctcctcaattctttccagtaatcattaaaaggagagaaaactatgtccaagtagttgtaagagagcgctcttggtcctaaataatcatatgacttttgttttaatcctacgcacacaaacaaaatatataaaaaaaatagtaagtgttaagtgagagttacggtacctgctaagcttggacggctacaacaattgaggtcatggattttcagagcttgctttgctgtttcagaagaagagacaacaaccgttgggatacttccaaacttcaaaagcattacaggaccatattttttggagagactccatagagattgatgtggtagctccccaagctgatgcaagtttccgatgatcggaaagcccggtggagacggtggtttccgttgatgttgccgccgcttcttgagtcttaaagcggcaagaagaagacaagagagaaagagaagtgggagaaaccaaatagtagccatttgttgatctgatgactgatgaagggacaactatatgttgaagctcagtgttgtcttcaattatttctgacacatctttattactaaacttttgaaaagaaataataacttaactcaatttgcatgtataaataataattttaagacgattgtgggtgaccttggactatttatatttttctctagcgttttacgacggaaagaaaataaataattggccagaaaatccgttttcaaaacgtgattgtaaaataaaacaattttttaaagtctattaaagtcttagaaatatatatattaccaaaaaaaactgaacctcatagttcatatttggcaggactattcttgtaatcttacgtcccaaaaatgttggttaaatttttatttgagtaactttacaaaaaatagtttatttgatttactatacataaatacacatatagatgaagtttttgtaccaaaaaattcaggtgagaagagatcatcaaattaatctataggtttgattggtgacctataaagaaatataaggaatgaagaggaacatgactaaaaaaaaataataaagaaaaaaaaaataaaatagaaataaagaggaatgagtgtagtggcaaaatagaacaaatattattgtaaatgataaccaaaacatacaaaataataacaaaaattaaaaaataaataaattatttttctaaataaaatattaaacaaattgaaaaaatttataaaaagaactacaaaactacgtgaaactaatatggtaattatagtgagtggtcatttgattttagctctgtaataatgagttcaagcataatttgacagtgcctttccttccacacatactataattgatgtatataagtaatcatgtttggctttaatatttttcatcctacgtatatgcattgacattcaataagtaattatgtttactacgttatcataaatttaatttttaagttttaattaataaatgtttaatttgtttttctgtttgttcctcatcaaatttcggaaggaacaattttcttcttcgattcctcaaaaaataaggaataaataggaatagtgtacgatccacatgttataatttggaaaaaaaattactgttgaatggtaaagaaaagaggaacaataaggaacatgttgttcctatccattcctttcctaaaaagtagtcaccaatcgaagcctatctttcaatagcataccttcttgattaattgcttctataaaaaaaatcaagatcgttttaattaatctctatatgtttacaaaaattaacaattctgaattgttaaaagcattatttcagaagaaaaagatgatgaatatagaattggttaggtaatccaagatattctgacattcacatgaatcacatggatcactagatgctatatgtcatcatattttcttcttctttggtttttccataaaacctttagttggataaataataattggaaaaaaaaacatcacgatattgttttctagttagctacttttttctaaaatttgaactaccaccatagaacatggtattttataatctataccattcatgggtcctatgtgacttaaaacggttaaaaacatattaacagtaaaaaagcgcggaaaatagtacaacactgtaaaaaaaaaagtggtaagcaaaagacattcacaaacaaaacttggttttgattgcagctaaaaattcggtttggattggtaacttgtatcgtatgatgaatcaagtgaattagttttatggtctctacaagtaataatttattatcttctgtacagtcacttgaaaagtagttaagcattaagggacatattttggatacttgtgtgtatctacattgtacaacaaattgaaaaacagaagaagaaagaaacaggttatctattatgttatctattatgcaacgtgatcattgtggccaaactaacgtctacatcattcgcaatacaaaagaaacttgaatctatgattctgttcattgatgaacaaaacataagtgatgtaataaaactcttagtaagatagacaagaatcacagtacttattcggcagcctcttccatcacatgttccgcggtgattggagccacggggtaataatggtaatgtagctcgccaacgtcgtctccagagagtttcgtccatccttgcggcccaacgtggtacactgatcatacagatttaagaaagtttaatacaaaatttaaaggaaaaggatcacaagatgatgatgtattggcagaagaagtaaggattgatctttaccgctagcaactccaccactagctccatcacggaatgtagcatggtagatggatctccttgctaactctgaggcttcttcaaccgacatatcgaatttgtatctgttaacaaaaaaagaaccataagattgagtggttataatagtaaagcaagatctagttttggtttgggctttgactaaaagagaagtagggcaatgatgatatcttgaaatagatacgtacccgctgtccagaacaccataagcgtatggtgaacctgaaccgacagagaatctgtctcccttaagccgtcctccttcgttgtcaacatagtacaatccagggccctatttcaaaaaagattacaattttagcatctcgactttcgctttggtgagtgaaactacagaccgagaaggaaataacagttaggatataaagtttagggtactgactgtttcatcccatccagcaatcattgtgccaacagaaagtcccattccacgatatgaatagagcatgttagcaagaagctttgaagctcctgaaacagagattctccttttgtttgccagctcatgtagacggcactatgatacacaaataaaacactctctatcagggtcatagtttcaacataatccagatttggtatacaagttagcaatcaaactattaggataaaactgggactagattttggatacaagaaatcaacgaaaccatttgtatgcccttgaatacaacaactcaaaacaaaaagattgatgcataatgatatataaatgtttagttcacagtactgagaagctaaagccaccacaccacgcagaaaaatacattactaaaattgaaagagacacacgttcttaggtcaccaaacagataataaagactattcttattccaggaaacagacggatacaaaacgtttttaagtctctaacaaatgactcaacagctttcggatatcaatacattagctatatgaagttatgaacaaagggaaggtaagaagtaaccggattgccacagcaaggaagataactgatagacccaatcatcaattcagaaagctaacaaaaactaacgttagggtaccttaattcccagatttctgtgccagaattgacaatcagcagcaccaccagccattgtaccaagcatataaggattaatttcaataatcttcttcacagattgcgacgctgaatggaaaaacacaaacaaaacatcagcaatcacagaaatttctcctttcttttactgtacagtatcactggccaacacaacaaagattagaaatttctataacaagaatctaactcattctccatttttaggatcctttagagagctcacaactaaaacacaaacagaaatctgaaataaacataacaaaagagaaacatacagatatatcctcccatgctagctcgagaatcagcagctaccataacaccttccttaaagataaacgcaagtgtagttgtaccctttgcaggcttcaccatctccacagcttttttctgaaacccatcaaactaaaaaaccaacaacaaacaaaagcaacatatcacaatcaaataaaagcaaaatcaaagtatattggaatccgaaagaactctaatttcgtaactaaaactcacatcagtggtacgaggaagatcaaacgaaggtgcagacgaaaacccatcaagcatctcactgtttgatccaaagccaatcacaggcatagttgtctccaatccactagtgtcaagcttcattgtcaaatttctacagaatcatcgaatacccacaattattcaataaaattatgcaaaatcatgaagcttgagaggtacccaaatcagggtattaacaaaaagagcttcctttcacaattcaaatcggatctagcacgagattacttttgtacgtgtgtgtataaaccataaaccctaatacttcattgtaaagtcaaagtaacgacaattaggggcctgagacatacctgaagagcgaaatcgagtagaaaattaacgaagcagaagaatgtgtgagaattggagaaaagagaagcaaattatggagggatgtttcttgagctctgggcaaaccgaatgcgaacggggcaagatatgggcgatcgggtcgggttgaatcatttcgggtcataccgcttaagtttaaagacagaacagtgttcattatgttgggcttcatgggccattattggccttttcttctttttttttttttttaatttccttggttatatgaatattaggtatataactttttattaatcatttgttattcaaataaatttagtaagacaagtcaaaatatttggatcaaatttatcaggtattattcgtttattattttattttattagttggaataaagtgttattttaatcaaatttttatggattttacattggactttaacagattttaaaatgtttatggttaaacatacaagagaaattgcctcatatagcaccatatcaagatttttggttcatatctaaaagttaaaaaatttaatgttaatgtttggttttaaaatcaacaaggcattccaaatcctatgtgcattcaaaattaataaacacctccttaaacttaaatattagatagtattcttctctttccgtgtgaaatttataaagttaaaagtcttaaaacagcctcttaagtttggaacattctagtttacaaaaactaacgacgcaattaaaaaatgattaaacaattaacgattcttgtagacttgtaataccaataaatacagaagattaattatttctaacagtggcaaaaaaaggtaaaagaaaaaaaatgagcaaacgcaattgcaaaatcgctagcgtttggtattgcatcttctagctcgcatagctcctaaaggaggaccattcaatgaaacgctgcaatgagtatgcaacttataagagtacctaaacaatggtcctatatgcgaacgtgcatgaaacattcctctcaggttcaacaaaaccggacctgtttcaatctgacgctgcagctcccggctctgcgttgcctgaagctggacctgactgctcacaagatgaacattcgcaaacattgacgttttcttaggaaccttgaaaggttcaatgtattgagttgctatgagtgtgttgtaatagtaaagctcgaatgtcacatagctaaactccacactacttttcttgcttgggtttgtgacgtttgctaaaatggttagatcaccgtttagaagaaaacccatgtcgagataagcagcgtttaggttagcagctgagatgtcgacgtaaggtgagcgaggacggtagacgaggtaaacgattaggatgataagaccgccgagaataagaatgacccagaatattgcacagcaaaatgcagctgaccatgtcattgcgtttgtctctcttgagggtggtggtaaccgtgggccacggcggtgatgcggggatggtgttggagcggttctccatggacttggtttgggtattggaggtaatgttgatccataaccccctccgttgcgttgtggtgcttgtggtggtggaggtcgttgttgttgattatcttcagggcttaatagcaatggtcttttcgatgagttttgagtttttcgtggtggaagtctctcctctgggcttaatggtacaggtattacagaatgtttcggttcttggattggattttcacggtggcgaccacgagtcttgattaggattcctggtggagctactgggtgaggttgcgtggttttgtggtgcgatttttttgggtgcggaatgggcgggatgtgtggttggttcgaagatgtttgtgaggtagaagcaccaccgcttttgagatgtggattctgcgatggaattcgcgcaaaatgagggttagtttcatggtgatgatgatgagacatttagatgaagaagctaaaaagcatcaaaggaaactaagttaagtaagacttgagatgaaagaatgagaacagagagattttgaactgttttaagtttctaaatgagatagagagagggagagaataacttggtgacaagttcaagtaaggattctttgttgtagaaaacaaaataaagaaggaaagtgatagcacgaagcaagtaatctttgttgtagattccttgcactaaaattaaaatcagtttctaatctcatgaaaaagtataaaaacattctctgtatctttttctcattcaaaagtttttttaagaaaattgtaattactcggtccaatttatctaaaacccaaataaaaagatctcgattttaggagagacagggttaaggacttacagtaacagtcatgaatatgtcaatctttctacttcagctcactccaggggaaagatgttgattctcagagcaacttacgaaaacttgtcgaatatgtcagtaaactatgaacatgttaagatatgtctcccatagatcaagaaggccgcagattagttagcgcaaatctgatgcgaaacacgttgcttctgcaggtagatactctgttctctgctcaatttctgcagcatcaaacatgaaaccaactctgcaatgccggttactgcaaacgttgacaaagacaactaccaatcgagcctgaccaaacagatactagtaaaaaagctggaagcaaactgaaaactaaacccatacaaaaggtattttccacgatcttcggtgcaattgttcttcctatatctcttatccccattctttggcatggcatggtatatagtaacatgaatatacataaaatgaaagtgtaaacgcctggaaagagctaacctacgctttacacgcgaagaaagcagaacaatctcagagtaatcatggccggaacaagaaacacaattcaagcacagagacccacagaacacagtcatacagagtgcaggagaagcaacgcacttgccctgaaacaactttcaatacatgtactcctaagatctgatgttctttctcaagatcattgaaaacttacgaaagagaagccatagagtaaacaactaatcaaatccaaaattccaattccacattgattcaactcatcaaaagttcaaaatgtaaaactgtgttatatcacacacagatactagtactgatcaacatagcagcactcttgcttcacctcagctctcataaacctctgcaaagaataacaataagaaatacgcaagatcttactaaactaaacaacaccattaaaaccctaaaaaatgtgaagcttttgagaaaaatcagaaaacattacctgactttcttgatgaggattgattggagttttcgagcaaagtcaatggatttgattctgcgttcaagattcttcctagcgagaaccttcttctccgaattcttaatgtgatgagtctgagtccctttgatcagcctctccattccactcgattgcatcttcttctgcaaaatcgtcagtgccttgtctaaatcattggagaacaccttcactcttatccctcgctcttgctgcaactgctggtttagactcggacgagtcaccaaccccgtaactcgcttcgctatcgtgttcatctcttttacttgttttctgaaaaagtatgtttctgaaaacgtaaatgagattgacgagagacagtgataggatctgaattcgacttaccggtcggaatctcgccggagagaatcaaagagccaatttgagtgatgatggagaatgtctaggttaaaaaagaggcgatggaggaaatgagataaaaaccagagaatttactaatataggggtggttatgtaagttttatgagatatagggatgtttttgtaaatatccttaaatctaatcttctgtttgattcagagagtattgactttaaagaagaacattcaagcctttcaaaaaaaaaaagcttctttaatttctctctctctctgtggagtgttcgaatctccaagctctctctcaaatggcagcgtccacatagtagagctgaagaagcactgtatctatctacagagaaagtgaagaggaagaaaaggaagagaggatatagaaattaagctggcgacttttagtccgaggcgagcaatggcagagttacggcactcgagctctctcggtagccgatcttcttcttctccgttacgtgccgccggagatgaggattcttcatcgcctcatgtacacgatcactctcctaacggcggagacgacgaagatggtcgcccacgtcatccttctagagatcgagaccgtccgatctggtttcactctttgtttcctttcttcggtgatgatcctagggtttctcctcagaagaataaaatctcgcttctattgattttgattctcgctattgctagcttgatctcagtttatgggattattaatcacttggtaagtctcttccttcgatctaggaattgagatcttcaaggctctatgttctaactgtggaatcgatttggaaaagtatttagctttgttttgagtaaaggggtttgtttatttaggtggatttggattgacattgttctcagactaagattgcttctatgtctatcttctgcagaatgctccttatttatgtaaaaaagatgggattgtgctaaactgtcctcatgtaagtgtttgaaaactttggttatgtgttttgttgaatgcataagctttgaatcctgtaaatttaattgtgtgttggtttgcatttgtaaggtaaaagagtcaccttctccttgggagaatcctttatctgcaacaacttcttggaagccttgtgctgagcggcggattggtggaatctcaggtattgaagggctagagcattgtcattttcattgtcatgtgttattttttttttttattttttttttttcgtcgaaacacattgtcatgtgttattgatctgtcttttcgtgaaagttcaagtctttttccttggttagcttattagattgtgtcaactgtttttttcagatcttcctcctgagaatgaaacaaatggctatgtattcattcatgctgaaggtggtttgaatcagcagcgaattgctgtatgtatcttccaacttttatctctttttcttctcgccattatccaatcatggatcaatgtctaaatggctgttgttcttcttgccatcgtccaatcttgaattcatgcccttttgtttccagatctgcaacgcagtagctgttgccaagattatgaatgcaacactgattctaccagtactgaagcaggaccaaatatggaaagacacaacgtaaaatcatattcagatattgatttcatttcatcttgaattacttctctattttctttttggtttactgagcttgttaactttcttttgcagaaaatttgaagacatttttgatgtagatcatttcattgattacttgaaggatgatgtccgaattgttcgagacatacctgactggttcactgacaaagcagagctattctctagtataaggtttgcttgtcaactcattatttgttgatgatgtacttgttggacgatttcaaaagttagcttgtggaattatggcgtcactgggtgctccttgtgtatatctctgatttaaaaatcgatctgtattttttaatcagatatgatgttgaccaagttatttatttatcttctgcagaagaacagtcaaaaacattcccaaatatgcagcagcccaattttatattgacaatgttttacctcggataaaggagaagaagataatggccttgaagccttttgtcgatcgacttgggtataaccaatattcctatagtttagtgctcagattttggaaatcgtcttataaacaatgaatgatttattcttgtgatgctggaaattttttcaggtatgacaatgtacctcaagaaatcaacagattacgatgccgtgtaaattatcatgctctcaaatttcttccagagatagagcagatggctgattcacttgtttctagaatgagaaatcgcactggaaatccaaatccatatatgtatgccatatcagagattcgactttgttataacttaggaccatatgcattatatcaacttaaaactatacccatgtctcttgtatagggctcttcatcttagattcgagaaaggaatggttggtctatcgttctgtgattttgtggggacaagggaagagaaagttaaaatggcagaatacagacaaaaggaatggcctcggcgtttcaaggtgacatttataagcagttgtcaacttcttttggtggctaaacaacctcaaccgctaccttaatgaaatttcttgacatatattgcagaatggttcccatctctggcagctcgccttgcagaagcgcaaagaaggtcgatgccctcttgagccaggagaagttgctgtgatcctacgtgcaatgggctatccaaaagaaacacaaatctatgttgcatctggtcaagtctatggcggtcaaaaccgtatggctccactaagaaacatgttcccaaatttggtaagcacaacaccggactcttataattctttgatgaatcagcacaaacttgtctctcacattaactgtcctttgaatcaggtaacaaaggaggatttagcaggcaaagaggaactaacaacgtttagaaaacacgttacaagtcttgcggctctagatttcttggtgtgcttgaaatcagatgtatttgtgatgacacacggtggaaactttgcaaaactgatcatcggagcgcgtagatatatggggcatcgccagaaatcaatcaaaccggataaagggttgatgtcgaaatcatttggggatccttacatgggatgggcaacttttgtggaagatgtagttgtaacccatcaaacacgaaccggtttacctgaagaaactttccctaactatgatctttgggaaaatcctctcactccatgcatgtgtaaagcttgatgatgatgcttttgtttggtcttggattttgtctgatgaggagcaacaaactatagagattcgtagttttcttcttcttcttcttcttttttgacctttcaaatctttgaagtcttcatttaccatctttgtaatcattttgatattatgtaaagttcctagtgatgaaaaaaaagtttcttttttatattaaatttgatcaaattgatgcactaaactttaattaaaagaaaattagctcaacggttactaatccaattcttaattttttgtcacgctctctaatagtacccgccattaacacaaccattgcgtgttgtcttctctcttactctcaggttctcaacaacaaaagaggaaaacaaaatcagaagctatcgtaatcagttctcatctctatgaccggactatccgtagagaaaaccgggtcgacccggtccactgtcttcttcatcatctttaatctatccatttttaggtactccgcttcactgggtttttgaatttgattttggtttttgagtgggtggtgtttgagtgatcgatcaatcacaaaagtttcgtctttttcagtttatcgattgaagcaaggtcgaggcaacaacatgctagctttcctccaagaggatggaattcgtacgattccttttgttggactatctctgaagctgagttcttgcagagtgctgaaattgtttctaagcgtcttcttcctcatggttatcaggtaattgtgagtttctttatcctttagaatgtaaaagtttaggtttttaattgcttgtgtttgtgtgtgttgatttggatacagtatgttgtggtggattacctttggtatagaaagaaagttgaaggagcttatgtggattctcttgggtttgatgtgattgatgaatggggaagattgcatcctgatccaggtagatggccatcttctagaggcggtaaaggtttcactgaagttgctgagaaagttcatagaatgggtttgaagtttgggattcatgttatgggaggaatcagcacacaagcttataacgcaaatagtctcgttatggatagtgttaaggtattgagttgattgattctttctgagtttatgaagtttgtttggaagttatcaacaagtgaatcttttaatggttgaagggaggtgcttatgaagaatcaggtagacagtggcgagcgaaagatattgggatcaaggagagggcttgtgtttggatgtcgcatgggttcatgagtgtgaataccaagttaggtgcaggaaaagcattcttgaggtctctttatcgtcaatatgcagaatggggcgttgatttcagtaagagaatcgacttcatttccgtaaccttctttaactttattcgatatatgattatctcaatcttgtctcactttcttggtctttagtaaaacatgactgcgtatttggcactgacttcaatatagaggagataacttatgtgtcagaggtacatatttgtgataactaccaatcttctggttaaagtcagaggtacatagagatgaaacattgttcttatttgtcgcaggttctaaaggagcttgatcggcctgttttgtactccatatctccagggacgagtgtgacacctacaatggctaaagaagttagccaattggttaacatgtatagaataacgggtgatgattgggacacatggaaagatgtcacggcacattttgatatctcgaggtcaggtttcaagctgaaaaatactcttgccaagtttttacctttctttgatgtcatataattttcattcttccagagatttatctgcttctagtatgattggtgcacgagggttacaaggaaaatcatggcctgatctagatatgttacctcttggatggcttactgatcaaggtttgacttaaaaatcttgaaatttcaattctgtatatggttccaatgaacatttgtcttttttataatgtttggtaaaggttcaaatgttggacctcatcgagcgtgtaatctaaatcttgaagaacagaagtcacaggtataccacaagctttggacctcatctaaggatcctagtttattagtaaccttctcaaccacaagttcaaatttcttatgctttttatattgcttactcagatgacattgtggtccatcgcaaagtcccctctcatgtttggaggtgatgtgagaaatctcgatgccactacttataatctgatcacaaatcctacactgctggaaataaactcttatagctctaacaacaaggaggtgtgtaaaaatcataacactttaatcttcaagttcaaactcatatccgtattttgaaactccaaacttctgtcatcaaactctgtctgtttcgttatttacagtttccttacatcaccgcgacaagagtttctaggaataagcacaaaggctatcctcatcatccaacgggcaagaacatttcaactaagcatgcttttggtctcactagctgcaaagaacaaaaagccaacacttggttcattgtagacaagaaccgtggacaaatttgttggaaccaacactctagtgaaaaattagagaagccattttgcttatacaacagaaaagctcttctagcttcgtaagattttttattcaactgtttctttctcccactttacatttcacaaactgcccttagccgattaatctgcttcgttttggtgcagcgataagaagttaaaacacaaccagctttaccaaggtaagcttcatttgcatacaaatgataaagcacagtcttgtttagcagcttcctcgcagcaaaagctcacttcgaaagattatagtcaaggtgctttatcaccttgcaaactagatgcaaaccaggtatagttaatgattttcgatatctctcgcttattaccttaatatcttatcttgaattccatacttttacttaatgttacacgcgctataacttcagatgtgggagctccacagtaatggaacactggaaaacagttattccggtctttgcgctgtgttaaatccagtgaaaggtttgttcttttcagatcaactaacttctcctctcttttcttcgacatacccttttctaatccttggcattgtcacccatcttgcagcagccgaagctagctccaatggcgttcgttcttggattgccacgggaagaagaggagaagtatacgttgcgtttttcaacttaaatcaggagaagacaaagatatcagccaagatatctgacattgccacggctcttagaggcaagaagaatcttgtaggagcttcgtgtacgagccacgagctatggagcggcaaagatttcggaccaacaaaagattcagtatcgattcaagtcgaacctcatggtcctgctctgtttgttcttcattgtagcaacgcctgactatatcagatcaacaggcatttcttttaccttctcacgtcttttctcatcgtagtaatgtttcatctttagtctataaaactcttgtgtaatcgaaagtcgaaacatacaaagtaacgaataaaaaaaatgcaagtatcaacttagataagtaaaagaaataacgtatatcaaaataaaccacaacttataaaaactcttaataattaattaagactaaaaccctaaatataatctctaaaatattttaagaaaaaaaaacaaaaaccaaacacaaagacctaagattgatagttaatacttatcatgatccttctgttctttcaagtttcattgaaatatgtagggatcccttttcctcaagacatcgatcactgttcaaaaggactagacttgccttacgatagatcttctcgtggctgttaggcaacccaatcttagcccgacccatcacaacaactccatgggaggttcccggatctttcctcgacgataatcctagcaattctacgtaaagataacttgcatgagaatctaaccgaatcattacttctttgttaaacttcaacttgtcaccatgataaacctttatcacttgtgtttggtctcgttcttcagggtctgtatatagcacaactacgtacttcttaaagccctcgtaacgtttcagaagagttttgtcatcgcttgcgaatgctcctaccctcacgattaaatctgttgtttcgtcttcattaatttttcttttccctttgctaatcattagtcttcgtttcttcgccgctgcttgccccaagttcttcatcatctctagagaacaaagtgaattaagatttggagttttagggttttatatacaattatttcctcttttttctagggtttattctaaatatgtttttccttttttctttgcatggtgataatgatgaaattatatactccctctgtttctgaatatttgtattttaagggttttacacacaaattaataaaacatacaaatctcatttaatttatctcttacctagaaaaacatcattaattacaactaatctaaccaataaaaaaatatgatgtaaaatataattggttaaaaactattaaatatatttaatgtttgcatagaaaagtgaaaacaacacttatattgaaaaaaataaaaaacttttaaactacacttaattagaaacagagggagtatatgaaaattggtcaagtctctccacataaatgacatatcatcacacaacaaagtgacatatgtcattcgatgttttttaaattaataaaactaataaaattaaataagcaaattaaatatatcatcaattctactcttaattgatttctccaaaataaaaataaaaaataaaattatgtaaacaaattaagtactactttcattatactctttttattttattaattttttatcatcaataatcatgactaatttttttattgtgttgtaattgtttgctacctaacctcttattagtttagtaatttaattttgagtatttgataaccttgacattcaagttttttcaaataataaaccttcaaaatattagacctaccaaataatgtaatacacgatcatttctcttatattgatatatgcaatgacagacgatataaaagtattgactttaatgatactttaatttttgcattctttttattcttttcatatgaatactcttgaaatcttgttcagtttatatcaattctatatatttaatcatgagcctataacatagttgttggagtattatatctagaaaataaataaaaccataaatagtttatttataatcaagttgaacaattttcaaattatccaagacacgatcatttctctaatattgatatatgcaatgacaaaagatccaaaagtgttgacttcaatgacattcaatttttgctatctttttatctttttgtacgaatactcttcagatctttttcagttgatgtcaatcgaaactttaatcatgagtctgtcacaatgttgttgaagtacataaaacaaggaattgatttatttataatcaagttaggaaaattttaaaccacaaaaattacatagttacacagaattgtatcaaaatatcattattgttgttatatgtattcatgaagtgaaaaaatattaaaatcttacaaataatcagctttatacacacaaatatataaattgatatttcaagtcacaaatgaatctaaccataaaaattgtaactacatattatagatctaattttattaacaatacaagaataaacaaatagtaaatataaattagcataaagaacaatcaatgtaatttttttttaacaattttcataacaacgctagggtaatcatctagttagaattgatttagttatgaattatgatgtgtgatttggtgagtgtaagtcactcgcttctcatgtaaactataatatattgaatctcctctctcttctctttttcgcaactttcacagagaggtagtttttgatgtttgccggccggaatattttccggtgaatagccgtcccgagtggctcggacttctgcccggtatctttcagctttgatagtggagatagccggtttacgtctggcaaacccaatttctatgaatggttttggccgggtttttatcttttctcgccgtcgatcggtttataccgattgcttttcacttttatttcaataatttctacagatctgagttaggaattgatttttaggtactagatcctaaaaattaataattctggcttgtgattttggaaacctcgatttgcaggaaatctatcaagcggttatttcttggttgaaagattgaagaatattccgatgcatattaccattcccttatgttgtgttctttaggagttccgttcagtgttatttcggtggtaaacaaaaaaatttcgtgcgatgtttcgacgatattttcttcaccggattctgggcttctcgacggcaaggttgatgtcgttaaatttctgatgatgacttatcggcatgtgttacagttgaattctaaagtcaacacgtgttttcggataagagtccaacgttaagaatctttttgctgtacatgttactctaatgggctattgttgggctccaattttcttgctgcacaatcgttgtaggctttaagtcttgtatcttttgtttaataaaattcacttgggaaaaaaaaaaaaagtcactcgcttctacagcgcgtgatggcttgtttctccacccatctctccttcgttgagaagcatgcaccaaaaaaaaaaaaaggcttcaaagagaataaatcccaaaaaatttcaatctttacgcaaaaggaataaacatttctgtgacggtttcaaggtttcatcggaaccctagatctaatactttttcccgatttgaatttgcgatttcagatctgagagaattagtcaaattctgaaatttcaaaattgatgtcgaaagcttggggtggaattggaattggagcttgggctgatgaagcagagcgtgccgatgaagaacaagcggcggaagctactgctgcgacggcggatacacagagttttcctagcctgagagaggctgctgctgcgactgcgactagtggtaagtctaggaagatgaagaagatgagtttatctgagtttactacaggtgcttatacagcacctggaggtagaaactctgttggattgactcagcaagagattcttcaattacctactggtcctagacaacgttccgaggaggaaatgcaacctggtcgtttaggcggtgggttttcatcttatggtggtcgttctggtggaagaattgggagagatcgagatgattctgatggctcttggagtggtggtggtggtggtggtggaaggagaccttatggtggtggatttgatgatgataggagggggaatcagtctagggtttcggattttcctcaaccttctagagctgatgaggttgatgattgggggaaagagaagaaaccacttccttcttttgatcaaggacgacaaggtcgttacagtggcgatggtggtggttttggaggtggtggaagtggttttggaggcggtggtggtggtggaggtggagggttatctagagctgatgatgttgataattggggtgcagggaaaaggcaagcaccggttagatcatctacgtttgggtcgagttttggtgattcaggtcaggaagaacgtcgtcgtttggttttggaaccaagaaaggttgagtcaggaggaagtgagactccacctgttgttgagaagacgagtaagccgaatccatttggggcagctagaccgagggaggatgttttggcggagaaaggtttggattggaagaagattgactcagagattgaggctaagaaaggaagttctcaaacgagtaggccaacgagtgcacattctagtagaccttctagtgctcaatctaacaggtctgagagttcaggattgaataatgtggtgaaaccgagaccaaaggtgaatccttttggcgatgcaaagcctcgagaagtgttgttagaggaacaagggaaggattggcgtaagatggatttggaactcgagcatcgcagggttgacaggtccttattcatttggattattttaattttcactgaggattgtggatcttttccaattctatctttctgtggtatttgaatgttactttatttaatgatcccatcatgctgcatgttgattttctgcttgaccaatgcttcaatcagaaagttaagaattttgaagaaatatttaagtgcttgatacattatgccacaggagtcaatctttatgtagttggataaattttggaggtttaaatgtctggaactgagaacctaaagtagtttgccatgtatgctttaggtttcacatccctagtggctgttatttgatgagcttctttgtatttagtgataaagttttcatggttattaagtgtctatgagttccagatctcgccgcatgatgcgaagttctgaaaatgtgtgatactctgtttcagttctttgtcatatttatgctctttttacatcggtgattgtttttagtatgtcatttatattttttctatcagtgcattgattgagtttcagagcctgtgttagatagcttatgcttgtttctcttgggtatttccttatgtttgtgcatgatataatctccatcttgattttgagatgcatcttgtgtgatccttatgttatgaactctgtgatgcttcttttttagctttatgacaatcggctattgatctgagtgttgtgaaaaatcaacttttccaggcctgaaacagaagaagagaagatgttgaaagaagagattgaagagctaaggaaaaaactcgagaaggaatccgttgctccagagatcaaggaatctgatcaagaacctggcagtaataataatcacaatgatttaccagaaataatacgtgggaaagagaaagatctggaaatactaacccgtgaattggacgacaaagtcaggttcaggcagaaaccagttgagaggcccgggtctggtgcaggtagaaccggaacatattcagaaagaacacattcccgggctggctcaattgatgaaaccaggagttttgaatctacagagagacccagatcacgtggtgccgtcgatgcctgggttagaccagccaatgagcagcgaagaaactttcaaggaaccaaagagcgcggattcttcagcaacaggttagtcccggggattagtatctaaatgactaaatctctttagaagtctagagatttatgcagttggtacaatagatgcatttaggctcatcatatctttaagtttaaccaaatttggtgaatcgatgttatactaatttctaaatctcgggttttcgacaggtcttcctctagggaaggatggtaagaagaaaacgaagaacaaccaaatgtgggatatctttaactactactacacagttcccagattttgaagaagacttagagcagcgttaatttcattaataaaatattcataaaaaaccctaatctttgttctttttttgttggtccatcttcggaatcggagctttgttgtttcgttttggtcttctctactcagcgaaggcgtgtctcaagagaatgtgtctcttcttgttattatattgttagacattttcgaatgttgattgttatattttttgtagctattcctggagtctctcatctccttttgatgtattttgttaacacaattatttgccagtaaccctatttgtattggaacaacaagaaagacaaaaacgaaattgtttagcatacaacaagaagaaaaaaacacaaaactaattgcttacacatacttccctctatacttaggttttggatctttgaaggctttggaatcagtgtcaatctgagaagaatcaatgggtttgaatatagaggagtgaatattaccatcctctaaccacttaagatgattctctctaaactctaaatgcattaaacgagcagcttcttcaacctcttcactataaggctctactttcaccatcgttagcagaacccgactgtaccgcgagctcaggatctgttcagatacagctactaacttgaaacacgggtgctccgggaacttaacctcgctgccagtctcatctctcaaaaccgggaagaaaaagacgagcctgcctttcatcaccaacattcttgcagcaagatgaagtagatcatgaacacactccactagactatatgcaccagtggatggaatgtgatctgttcttttgtcatcagggacagtgtaaggatccactgttcctctaaggattttcctaccaccggatttacgtccaccagcacgaaccccgtaaggtggatcgcagataattgcatcaaagatctggaccaatagatacataagacataaactcagtgatctctctactcaatataccaaagataataatgaaagaactgagatatagagcattacctcctttagccccgatcgccaaggaggaacgttattatccattctaagtaaagctaccggcattggtaatccatactgcataagtattaacagatgtaagaaccagtgatatcgaaagaaacataacaatagaagtcacacactcatactaacctgtttgaaattgctccaaacattacaatctggaccacgtccatcacgcactactctgatatcgatatctgcaccctaatacaacaactcttttatcagttcgagattcagaaaccacaaaaggaaatcaataaactaagggaaaggttgcaaaccattgtcattgcgccaaagcgtgcagcagaaacaagaatgctcccagtaccaacaaaaggatcatacacaagttttcccgaagtagctttcgcttgattagccattaagaaagccatttcagcatccatagcagttggaccaaggtaagtacgagatttcaactgaaatgtaggtaaaagcttcctatcagcaaaaccaacctccctcccaaaaaatatccttctctgtagaataggttgaagtccattgttctcttcagattcaatcatttccattagaaaaaagttatgatctgggttcttcaagttaacacgaccctgcaacaaccaaatcaccaaagaatcaaaacaatgaagataaacaccaaaagagattgaaacaagaaagtggaatcagacctcaaatggtatataagtaaacgactggattcgatctttctgctcgtcaaaagttaaagcctttccaaaagtttcaacagagattctaaaagttgaatcagaagtgagaaatggaagctttcgagaatcagggtagctttgaatcgagtctttaagctcttcataacaagttccttcaccccaaagctcatacattcctttcaccaatatgcttcgtttagcaatgttacgagcgatttcttcagatgaaagttgaacgaaatggaatggagtatcgttatggtgattttcaggtagacgccattggagagactcattctctgcaatctcttctccgaagagttcagctaaagcttccacttctggctttctgaagtctaatagcctgtgatagaagacacacagaaaccacatctctctctctctctctttcccctgaaacgaaaaccctaatttgacaacagaactgagaaagaagacgaagacggagaaggaagaaacgaagaacgacggcgactaaaaccttttcttcaaaacccttatacatgggcccaataaagcccatttattcaggcccacttgtacttaaatgacgaaattaccccgttagctgtcgaatacgagatatatcgcgtcgtttgctttcacttgtgtcttgtgtgttctgccaaagtttctctgcagcttctcctcttctcagaaattagggttccgtctcaaattacgagcagatctcgtactctctggtaatgatttctcgtttcttatactttgtttataccgaagtatcgattcgcttgcatgtctcgtcatctttgtaccgattctgatttgaagtttctagggtttaccatcgcgcaattacgatttgtagatatgttgtttgcgagtagagatcaattgaaattaccttcgtggatttgtctcgtaagcgcgaaccatgtttagagaaacgagttcagatttgcttcacgcttaattattgtgttgtagctgtgtatatcttctggatctgctgcgtgtgtttggtttttctgggagtcaagtcatattaacgttgttcaaaaacacttttggctgtttgttttagaagatgtctgaagatccggagtaccgttgcttcattggtgggcttgcttggacaacgtctgatcgtggtctcagagatgcctttgagaagtatggtcacctcgttgaggccaaggtaaattttttatctctctttcctcagtggctctctgttcttctggttactgaaacttagaagctttgttctgtttcgccttcagattcaaacactgaagctttgatatgttttgtaatttgtttgctttctgcaactctgtttatggtgaggcgtgtctgtttagtaactgacttcttttagtggctatcagctcttctgattgctgagacattgaagctttgagtgatttgttcattttcttgctctttgcaaatctgtttgtagtgttgtctgtttgataattttatttgaaatttatcttactaccttatttttattgccataactattatgagagataaaccttatctattgatacacaggtggttcttgacaagttttctggtcgctcccgtggttttggattcatcactttcgatgagaaaaaagctatggatgaagctattgcagcaatgaatggaatggatttggatgggcgaactatcactgttgataaagctcagcctcatcagggtggtgcaggcagagataatgatggtgaccgtggtcgagaccgtggatatgatcgtgatcgcagtcgtccctctggtgggcgaggtggtggagattgctttaaatgtggcaagcctggacattttgcaagagagtgtccttctgaaagtagtagagatggtggtggaaggttcagctcaaaggatgataggtacagttcgaaggacgataggtatggtgcaaaagatgataggtatggtgcaaaggaggataggtatggtgcaaaggatgataggtacagctccaaggatgataggtacagctccaaggatgataggtatggtagtagggatggtggaggtagtcgctatggacctgatcgcagtggtgaacgcgctggaggacgcagccgggatggtggcagccgtggagctccaggaggtgagaggcacagtcgtgctccatatgaccgccccagagctggtggtttccactagaattctactccaaagggtatgtatgcattctgttattttaactttttctattgtatcccttcaaagttaagttctggtaagacttttgttgaagtcgctttatatcttcttttgcagttaaagaagttgaaggtttctgctttcagctcgtgtcaagtcaaagttacgcttgatggtctattttcttcaatgtatttggatagctcgagaaagaagatgtgttctctattttggccctaaactcaagagtcgactatgttcctaaagtgctctctctccttttgatatgttgatccctatggaaaccttgtgcttggttggtttgagacaatttgagatgtgctactttatgcttatcgtaatgaatgcgtgggttatcccccaacaccaaatatgcaaaagcctcaggtacgtgattgatctccacggaatatccgaggtcgacatttggtaaaattcaaatgttgttatatatggggatatgccgtttattgattctggtaaacaatgatgcaggatggtctgatactcgggtttagccgtgaaaattaaagactgatctataaaacttgtgatgggattgggaaatatacattgctgattgatacttggctactggaactcaaacatcccttcatgagcaacaaattgtcattttcaggaaaaagattgactttgtgcaattttagatcttggcaagtcaaatccaatagttttcttcaactagggaaatttctacagccaaatggtctctggttggctcgtctagtatagctcactgggtttatcttcgatctattctttgtgggttcttcgtgcctcttcgtctactttgtttcttgctcgtgacctctacctctgcctttgattctcaagctctaaactccaggaattgggaaatggtgttaatgtatatatagttaatatacgcttgaataggtatccttactttgataatttgttgaaattgcatacataaataggtcacacgagttatgtcgggaaaacactgacttgattattttatacaagtgaatagtatatgtatggttagaacttagatgcatgactagttcgttcaccttctttcacaattttgtattgcatacatacatacattgcttaggtgaatatataatcaatttaccataaataaatgactttgtaagtctcataatttaagactttgtttctaacataaagaaagactttgtagaacatatgagttggtgtatagcttaaacgttgactcaattatttgatagaaatcgaatagcatagctattcgacgccactattcggttactcgtacctcgaccacaccaaattaagaacacttaccggaagaagataaaaggagaaaatggaaactaatctcttgttggtaaagtgtgtcttattagcatcatgtctcatacatccccgtgcttgctctccttcttgcaatttcccggcgatattcaacttcggcgactctaactccgacacaggtggcctttctgcctctttcggacaagccccttacccaaatggccaaaccttcttccactccccttccggtcgtttctcagatggtcgactcatcattgacttcataggttcttagttctgaccacacattcataaatttcgattctttacttagttttctcacgacccatttttgaaatcagcggaggagttaggtttaccatacctaaatgctttcttagactccatcggttcaaacttcagccatggtgccaatttcgccaccgctggctccaccgtccggccaccaaacgcaaccatcgctcagagcggtgtgagtccaatctctctcgacgttcaattggtccaattctccgatttcatcacacgatcacaactcattcgcaatcgaggtactttaaaagtttcaaccttttgcaaaagattatcagaacgttttgtaatccgatttggtttacaaataggtggagtgtttaagaaattgcttcccaagaaagagtatttctctcaagcattgtacacattcgacatcggtcagaacgatctcaccgctggactaaaacttaacatgacttcagatcaaatcaaggcttatataccagatgttcatgatcagctctctaacgtcattcgtgtaagcaaagataaagtctttattcactagatagatacaaagctgtgtgatttaactgaattaaccaactgtctttaatgtctctgtagaaggtgtatagtaaaggaggaagaagattttggatacacaacacagctccacttggttgtttaccttatgttttagaccggttcccagtaccggcttctcaaatcgacaatcacggttgtgcaattccgcgtaatgagattgctcgatactataactctgaacttaaaagaagagtgattgagttgagaaaagagctctctgaagctgcgtttacttatgttgatatctactctatcaagcttactctcatcactcaagccaagaaactcggtatacttcaagccttttatcatgttttggttactcgggctcggtttagactggttctaatggtttattatatgttgagtttggtggtttaggttttaggtatcctttggtggcttgttgtggacatggtgggaagtacaatttcaacaagcttattaaatgtggagctaaagttatgatcaaagggaaagagattgtgcttgctaagtcttgtaacgatgtgtcgtttagagttagctgggacggtatacatttcactgaaacgacaaacagttggatctttcagcaaataaacgacggggcgttttcggatcctcctcttcctgtgaagtctgcctgcaccagatagaagaacttagggaatcatatgaccaaagtgtccttgaaaatggggacaaataaaagttctttggaatatttgttttttgtcaagttctaagaaaattctcatgaaagtgaaatcgtaactacctgtcatatttatctgaattttctatttagaatgaagtgaaacgtatttgatgaaactaataataaaaaaatgatagagatattagttttttttttttttttttttgtcgagagatattaggttttttcattaatttgagacagttggaaattaaaatagtttattccttctatttttttgtttgttttgacatattttctataacagccaaaataagtgttaaccatattgctaaaacacttaatactttaaaattacccattgcatattcacacactctttctttcgtattattgtatcaaccacatatgctttcgtcctctccacttcacctaagactcatctatattcataaagggcaattatgtcattcaagaaaaataatattcttaataccacttaattagccacgaatcaccattcataaaccaccacgtggacaattgagcgcgtggactacaccgtcttccagtctggctgcttcgtgagagtcaccctccttccacgagcctcttaaaagtcaactcctcacgtaatcccgtgcaccgcgtcacacctgattacaggttctcttcttaattattttctcttaatcgtttttattattaaacccgcgaagaactaaaacatatctcagaccaataaaactaaggaaaatcaaattctcagacaacttttttcgaagaagacgacgaattttaaagattttgttttctatattctcttctggtaatctttttgtttgtttcttttttttgtcatccatatttgatctttctttgttgctgattatcaacttttcttttactagctgatttttcctttttcaaaactaagcaagtttgtgttcacgtcttcatcaatgacataattgcccttagtttattccacatagttgtcatacaaattactttcgtttctatgtgttttatattcacaatcatagatgaagttcataacttagatgttaaagaaaaaaacagagttcataacttgtgattttgtgctttgtcttatttgttagattacgggtacgtaatttcttacgaaagaaggctctctttaataagataaattcatttttctctcatcttttgagttaatacttcttgacctgatttgagtttggtcgttaggtttttcttgatttcggttcaagttttctcttagctctgaattatatgtaccgtgtaagaaagtgaattatatgtaccgtgtaagaaagtgaaattttcggttcaagaagtgaaattttctttaagttgtgttttttttttcacttatgaagtcatatgataatttgatatgaatcttaaaaagcttttttttttatgacatgatgcagatagtgaagtctcggagactgaatgatattgtttctggtcaacttaaccaatttcagaacatggcaaacagagcagacaactcaatgcgttggtttgtgacttttacaagattattgaatccttgagttcattgtgaaagagatgatgattactgattcctagtgttctgtttttatttttgtgcagttcaaatagtaagaaaccgaatgacggtatgatgctcgtaatatcgattttcgcgggaatagttatcggatttttattaggcatatctttccctacattgtcactaactaaggtaacacttttaaaattttactttttttcaagaaataatgttttggtgtgattttgtaaaagatgtgtttatatattttcagatgaattttccatcaagcattcttccttctgttgctactgtctacatagaaaatgagaaaccggagaaatcatctaagacgagttcacaaaacgaaagtgatgcatcacatcatcataaggcatgtttttgtttctcccttgtgaacattactcatctttagtgaatttagttacaagatttgtttggatattctgcagatttgggttccatcgaatcctcgaggtgcagagatgttacctccaagttttgttgcagccgaatcggatttttacttacgaagattgtggggattgcctaaagatgtaataacatctctaggtttttgttaatgatctttcaaacatcttaatcattgacttgatctctaaatcatgttttttttctttaggatttaccagtggtgaagcctaagtatcttgttgcttttactgtttcttatgaacaaagaaaaaacatcgatgcttgtgtcaaaaaagtatgtctctagtttttgttctctttcccctttgcttctaatctttcactcttattaaactaatatcttttactctctcaatagttctcagataacttcaccattgttctgtttcattacgatggaaaaacctcggagtatgatgaatttgaatggtctaaacgggcgatacacgtcagtgtacctaagcaaaccaagtggtaacaaaacaaacactttttttttatctctcagtttccattgatctaaagctttaaataaaacgttttgaatatgtttctattgaaggtggtatgctaaaaggtttctgcatcctgatatcatagcaccatatgaatatatattcatttgggatgaagatcttggcgttgaaaacttcgacgcagaagagtaagtactctgcttcttttgataatataatcagaaactgttatgaaatgttttctacattattgcaggtacatcaagattgtgaataagcatggtctagaaatatcgcaacccgctgtggaatcaagaaaatcaatcacatggaagataacaaagagaatacccggaatcgaagttcacaagtaaaacaattaactcttgatataaactgtacaatgccatggtttaagtaaagtaaagatagtgattctttttcaaattctttgatcagagaagtcgaagagaaaccaggccgctgcaatgaccctcacctacctccttgtgcagggtatggatctcatttgtcaaaaccaatacaataagtattcatactctcttgatccattaagttttgcacggttccttatcaggtttatagagattatggctccagttttctctagagaggcatggcgttgtgtgtggcatatgattcagaatgacttggttcacggttggggtcttgactttgcgctaagaaaatgcgtcgaggttaacatacaaatacaacttattcacaaacgcgtataattttacaaaacgttttcgaaactaagaagaaacactttttaatgattcaataaacagcctgcacatgagaagattggtgttgtggattctcaatggatcattcatcaaaagattccttctttaggcagccaggttattaaatgatcaaactttatcttcctatactcaactacattatttactagcttctttgttcatagttttaactatgagatgatctctcaaatacattgatcagggaaccgcgcaggaagggaaaaccgcgttccaaggggtaaaacaactcaaccgcggctattgtcttgtgttatatacttagaaggttcttgaacttagcgggttctagaccgagtatattgttaattactgaattatatacatgttttgatcaggtaagagagagatgtaaacgggaatggacaatgtttcagaaaagaatgacccgatcagagcagaagtatctgaaagaaattgcatctgcctcttcaaactctacacgtacttaaaccaaaagagtagaggaactgaataacaacctttagtgttcagatagcactttcagtaagaaaaaaagagaaatagaatgttgatatgataagcacataagcaagcatacacacacaagacacattctttgaaaagagcaatatagctctgttctagaaacagttatactgtagtaacaaaacagttaataaagttcttaataaactcttcatttctataatatacaattgtcaatactaatctgtgttcatttcagattgtggcaaaataatttgagaaattgtagtatgctctcattacaatacattatgtttcttggttcaaagaaatgaccaaacctcactcttatcataatgagtaatgactataagctttcatcttgaatataaactcgttgatacgccgtgcaatgccatcctgcatcagccaagatatcatcagatagatagtgggtaatgagcataacgtgttttacccatctgaaacctgtgcacggaagctctccagctcttgttatcaagaaggaactcaaacgaataaagactgttcttgagccgtagatgagggatctgcgtaatctcattgcaccatctcaaaaggtttacagtatgtctactcgggatctcatcaacatcagacattatcaacaaatcagcaaggacaaatgtcggaacaatcactaacaagaacacataagactccatatctacaccacgtagaacacaacaaagcctatagatactgaaaactgtaccagaatcctacaaaagtcctaaaaccctaaacagaagctaggaacttgctcttgaatcgagcttagcttctcaaaattcgagtgaaagattaaaactttaaagaagggtacacgaaaacaagcagatcggagaatcaaaccctggccggatatatcatccatcagtcttcttaaaacactagtgagtagtgtccgtcgtcttcttccttcaacagttcatccaccacatttccgtaaaccagataatttgggcttgacttatataaggcccattaaccgccaagtcaaagactccaacgacgatgaccatggcttcatgggcttgtttatgcaatgaaagattgacatcaatcagatagcacagggcaagacaaccgttacaaaaaaaaaactacgattcaaacatgaacaaactcatgaatcgctggttgagttttaatatatatatatgcttaacaaataaaaaatcaggaaaatgaaaatttgatgtagatgttcgattacaagtttatttcaatggaacttatttattactttttcaaaaataatactttgtcttttctgttatgtctaggacctccgtaatatacaatattattgacatgtatatctgaatatatatttattttttttgttaataaatattttattgcatcatttcaaacatataataattttatgaagtaatagtgaaacaacatatctaacaaaatcctaaaagttaaaatttattatatatacaagaaaaaattatataaaattaaacagtttggattctctttcgattttaatctttgatccaattatctttttttatttaattatagagaatcttaacatacagcctaaatcaaaagatttcaaaaaaattaaatcatttttttcagtttcaaatattttataggtggaacgtatttttatacgaaataaacgtaaatttaaataaaacgaaaactttagttacatattttcttgtatacaaacatatatgatatctcatataataattttatacataataatttatttcaatcattttatcccgcacattatacaggttcttatctagtctattatatataaatgaaaacaatttaataaatatataggatgatggtgatggtggttgtgatgatggtggtggttgtgatattgattaagctttaaggacgtggtcctccatatcaataaccatactcttgaggagttgcatgtagctgcttggttcggggaaatcatcgttgcgcttctcccatatcatagtgattttgcagacgcaatcttcttcagagttgggaataaattggaagtcaatctcatacaccttgaactgctccatcacgtgaccttccaatcctacaaccttcactatcttattgtcatcgtctatctctctcctctccttgaatacctcctcctttccatctttacatacatgtaaatcattatttttttctttttttttgttaaagcgtgtaaattaaattattgtcatatttatataagactatctacaatggcttattgaaaaaatttattcaatagttgaatgcttacagtggggtattgaataaagaaatgaatcatatgtagattaaatggtgttgaatcgattcaacaatgttgaatctttaaaaatggaccctttattaccacttgttattaaataattggagacagaaattgtgggggagagttaaataaagataggacatgttcttttatttgctactgaaatttcttatattttcttttcctctgaattattggaggtcaattatcttataaaatatttatttgttttaaattatttttacactaaaattcatcattttttaaactctataaatagagatttgtttcatttgatttgaacatagaaaaaaatacatctattttcactaaaaaattttcattagccgctaaactcgtatctatatctttttttgctttttccagtgaaatggatcccaataataactcatttaacccctaaaatttcattacttatccatttaaaacataaaagaaaagaaaaataatgaaataaaaatttgtggggtagggtgttgaattttattaaacaaaccattgtagagtataaaatttgagtaggtattgaattattatgtgaaagagagagaaaatgatgtggaagggaaagaagcttatgtggagggtgttgaatggaaaaaccattgttgatagcctaagtaaatgatgcaataaatttccaacatgtcaatagttagacttctcaggccacctccatgggctaggttctaaagaaaatctcacctatttagaaaaaagaaaaagagaggagagaaacacataaaaagaaaagatctcaacaagaaacttgtagaatttgatgagaaaaggtatggatacatgtccttcacttaatgatagattttttgtttaaagtaaaattttaaatacatacctaaattgattgaccataaaaaaaaatacagacctaaattatgtttaaaatattactaagaaatccaaattggtatcttaacactgatggagatggcctcataaggatgaatatgcatgatattatgatcacatatatatttttttgcaaattaatgttgggtatcaacccatgccccatactcaaagtttagataattgtctaatatataaagaaaggtatacctccgagtgtgtagttccaaatcttgatgcctccttgagtgtcccattcgccatcgtgaacagtaacactttggatgtggtggccgatagtgtcagggaagagatagttctcgttcctgtacctcttgaagtgtttctccaccgttccttttaacggcacctgcgtcacgtatgttcccgacgtcgccatttctctctctcttttttaattttgtttaaaagcttccactcgtgtttcttcttttgttttgttttggttgatgaaataacacttgttgccttggtttatatagagaagatgacgcttaagaatactgtttcttttaatcatgctagaaacttctcttcttcatttttcaacctaaagtatttagtgagcattaattttacaaattataaaataaaatattagagcattacattattgggtcatagaaatttattttctttatttgataaaataattccggaccacgttattaatgtgtacagttggtccatcatccttctagttcagaaaaattaagtttttttttttttttggtatgaatgtaaaattatattttaccccaaaaaacagttttacaataaatacgacatgaaaataaaagaatttgagaagttttgttatatattacaaatatttcagttcccttcaattggtaagctttagatcatcttgaaaccgtaaaatttagtctccaagtgtatcttgaatggaaaagatgtcaacatctaaaggtatatgctacagaaagtaactccacaagacccattttcttatatattgatttaagaaaccacatggtacgtatatagtattccgaaaggaaacacactttattatatataattgaaaatatagcattccgaaaggaaacacactttattagatataattgaaaacaacttaataaacatatagggatgatggtgatgttgattaagctttaaggacgtggtcctccatatcaataaccatgctcttgaggagttgcatgtagctgcttggttcggggaaatcatcgttgcgcttctcccatatcatagtgattttgcagatgcaatcttcttcagacttgggaataaattggaaatcgatctcatacaccttgagctgctccatcacgtgaccttccagtcctacaaccttcattgtgttattctcatcgtccatctctctcctctccttgaattcctcttgctttccatctttacattcatgtgtacgtatcagtcaaattatatttgggtcatattcatatgtaatgatgcaaataatttccaacgtataataaaggtatatacctcccaatgtgtagttccaaatcttgatgcttccgtgagtgtcccattcgccgtcgtgaacagaaacaccttggatgtggtggccaacagcgtcagggaagagatggttctcgttcctccacctctggaagtgtttctctgctgttccttttaacggtacctccgtcacgtatgttcccgacgtcgccatttcgctctctccctctcttgtttaaaagtttccactcgtgtttttgttttggttgctgaaataacacttgttggtttatatagatcagaagctgacgctttcaaatatggtttctaccgtttcttttaatcattaaaataaaatataagagcattagtggatcatagaaatgtattttcttgatttggtaaacgaatccgcgaccacgttattaatgtgtatagttggtccatcatcctttacaagataatcaatcatacgcgaaacacactaatcgtgaggacaattatcgcgtatatgtttactaaattttatccaatcattaatcgcaactgcgacttgtagtcggtactgaattgtgatgttgtgtcatatttgtatagtgattgataaatattaatatataatcgtcgtgtcataagtaacctgaatccatagatttgatagtgtgactgtgcttgcgtgtggaagttatacttatacatgaaaatatgtataaattaaaatcacatatttttattaatttagagatttgaggtagaacgaaaagattaatttatttttgcattttatggatcgatattaaaagttttgaatggtaagtcagatttttggtagtccaaaatgtgtgacagataaactgtttttaatttttaataagcaaaaaaataaaaatcaggcggctaactgcatacaatttttgttttattgcttttttagtaataaaagtagattaactgcgtacagttctttctcatacgttaatgtgagtggtccaacggcagtccataattttgtaataaataaaaaaaacaaaaggtaaaataaaatattaaccttttattctataaaagcacaattctttttttgtattttgtaccatcacacacactacaaaaaatgtaaatatctctctcatttttttttaacgttgctttttaagcttattatccaatattctgatattgccttaaagagcaggattgaaaaatatatgataagttttcgtcgttttataatttgtttatatttaatagtatacaactggtattgtaattcattgacgttaattttgcttaagtttttgaactttttagaatctataacaatatggtcatgtttatgtttttgcttaagttttaaagaaaaaaagtaaaaaataaaaaggaatctataagatttgcttgtaaccacaaactcagcagtaatatgtacatacaccaatcaaacgatttaatatgatcatattacgtcagtgtatatgtcagtaatttgactctaagaaaccttaattaaaaatttgtaaacaagacaatatgccaaaataaaatatacgtctaccttctcattaatttccttgtttcttcttcattgaactcttgaacaaatattatatggagatgtcacttgtcacttcgagttgctaggaaacttccaccggtgaattcctcctctatacagattaattagttcatatccccttgtctctcagctctctatctccacactttttctctttaacatatcctttactaaatggccgtcactgattatttcgccggtgagatagcgacggagcttttgaagcagctctttctgatatctgcgagagcaggccggtacaaaaacacagccgacaacctcagcaccttgatcgagaacattcaaccgacgatcaaagagatccagtacagtggagttgagctgcctgctcaccgccaggctcaaatccgtatactctttgagtctctagagaagggcaagaaactcatggacaaattcttaacatgcaatcgttggaatatgattcgacagttatatctcatgaagaaaatggagaagctagagaagaccctctctgatttctttagggcttccattttgacacacatccttgccgatcttcatcttctccgggccaattctgatgaacgttcccatgaggtctatctatctttgttttcttctctctcccttgtgatttcttgttcaccaagtttgaaggccatctctataatactcgtttcttttgcagcacgtcacatcaaccaaagggtgtgactacgacggacttggctcaattcagtaccagcacatccagcctaacctagacatggatatgcgggtcaccattttggaggctgaattccgcaccttctccaacaacgtcatcaacaacatgcttgcgatgaagcgagcgcaagatgtcttactacgagccaacggctttgaccccgagaccctcctaccgatgatgtctcctcctgcagcctccatgaatcctcctgcttgaccacatacgacttaggatacttgcaacccactcaaccttgcggactacgatctttaaaacacaaattgctttcgatttatgtttttcaatttgttaaattatgtttcagtcacaattttaaatataatttatcgtccactactctgttttagcttcttctttttccatacgttacaattgaccttacttttttacgtattaaagagagaattggtttatacacctcaaatcagcaggttctacatgatgaatgaagcccttttaatatcaaaacaacccttttagtagctgaaggaatcagattgtatctctaacaaaaaggctaccaacaaaatgatgttatccaagttgggttccaaaatatggggtctctcaagagctatgtctttcaggttgtctatctgctctctcacacacctctttctgcatccgggaactgaagaacgaagcgcacaagtcggggaaaggcgggaaattgagtgttgatccacaaaacattgtttcccaaggtttctctgacatcaatgctttcttcctagatctcttcttctttttgcttattgctgcaagaaaaacttcataatctatggcgctagtctcgagtttttcatcgctataaggatcaaatagaacatattcatggctcctgtttacatacgcgagaagcggctgagactttttaccatcttccacaaatgaaagtgttcctcctctggcctgcaataaacattgtaatcaagtctcttaacggcaatgagagaactttgattaatccttccttagagtatataccttcattacagtccaaatagctactggtttagggcctgacccatcaaacaagaggatagcaccatctttcccgcggaatatctgttcgttagattttaccaacctatcagattctggaagccatgttaaaactgcaaagtatggtgagtccacttcagtagcaatggctgcaaataaacaggaaaaatgaaatatacttagacaaccaaaaaaatcaagatttcatgatcaaaaagataaataataaaccttctatgtataatctatatgaccatgataagcagaacgtcatcagatcccagacagataagtgcggtgtggaaccatgggatgcagcaataaggaagcctcctccagtgaatgagagttccataattggctgaaacatttacatatcatttaagatttcaacaatgactgtaactaatgaacatggaattgcttttgtgtgttatacaagtcttaccgcatttgcctttccaactacatacaggagttcgttctttaacgggtgccagatcgtaataactgttttagccgcaagagccagacaagaaccatccccggaaaaaacagcagctgttattggcgttctcctgaaaaatattacatcaatttcatttgacatcacaacgactaagtaatgagagatgttaaaaggttcctaatcttttacttataagagccaactccatgacaaatccagtttgagtcctcaggtgtcagattcttgtcgctactgcaaacccaaatcttgacagacataaagtcatatcagtaacacaaaaggtcaaacgatattccaaggaaatgatccatttttcactactctgtaatcctaccttgaagtccccagcagaagatatactaacagccatggaacgggcggggttaagggcaatggctgtaattgcagcttccctgtgagaatacagaaggatcaaaagttacactcacgatgagaatcaaggagtttaaaagtttataagaacattgaagtaaaaacctgtgaggttgatttatgactgtcgataagctgaaagttttgctgtccggtacaaatacccaaaacttgagagaaactatgccttcactgaaattgcttgcagcaaatctggcctcagctgtagtcattactgagccattccgagagagagcaaccgcagtcacgagaacctattttccataattcttcaaattattacaaaacagaaagagagcggatcttttactagtaacaactatgtcatcttacagagaagaaacaaaatgtactaacccggacttgatcatcatcgtctggatgatgatcgcaaatttgaacctgcatatgttaggtttgttaaatagtaaaatcatacaactatcagatacaaaactcaataagccttttgggaagctaacctctgaaatgtcatggtcacttaaaaggttgtagagttgaacacgatgattcgctgtgcagaaagcagctataccggaagaacgatcaatggatacagttctggtgaggcatatatcccgcgttttgacgtagcatataaacccgtgacgctctggtgtcggaggctattacatagtaaagaacacaatatgcatgtgaagttaactccaacagaaacggtatacaatatgagcatgcttaaaccaacaataacaaggaaaaatttcggatgatagtaagaacgaaccttgattccagatatcgttctcaatatctccatggaaggcattttaagaagatgaatttgattatctgcacaaatcacctgaaaattcttgatcttagtagagttaatgaaacacttcatttgctttctacggttgttgtaaacggaaaaactcttacagaagaaagagttgaatctgaagagaagatgaaatacaacaagggagatccaatctttggcaaaagttgcttcttccctgtacctagctcccaaacaacaaaatcacctgcctttacccctaaaagagtcacaagcaaaggaaatatagcataagaactcaatatatatatatataagaaacatgaattccttatcaacacacagagatacagtcactatgatgaaaaaataactcagactcaccagaatacaaaagtgctccatctgaagagaaattaaggacggttacttcagcgctgtgccagttgaaagtagtgcaagattcagtatcatcttcagttttcactgaagtaaattctccaataccattatccttccaaattaacactcttcctgttacatcaccggctgctaatattctctgattgggatggaaagcaaaaacagtaatcaactctgtatgatgtaatgtcgtctcctttggcatgaggtgctctgatgccacattccatatatgtatactgcagttatgacagacgccgaaaaactctccagagggacttaaaacaataggttttggttcttccatctgcacattaacaaaaatgattatagaatcaaacatgaggctaatcgaaaaatggttaatccacaaatctgacctctttcaaagtgtctccactatgaagagggtcttgagtgagatcatatctccggatttgtccaaacaaatctttggacacacttgaatagtcctcaaccgaaacataagcaatcacggaatgtgacacttgagctggaatcatcacctacaaagtcccaacagacacttagaaaagggcaattgaaagttatcaaatttttgtttataagctgcaaagtatggaactttaacagaccagagagtgaattggaaggtgggtatcaaatatcttcaaaagcttcggcgcagagaactcccaaatccgaattttcccatcgagcgacgaagtccaacagtaactgacggtttcgtcggaagacggatcaacaatcacagacgtcacaggcgctgtatgatcctcgagtgaagtaatcttaaaaacacacacacgcatacgctaatgagagaagaagattagagggaaaccctaaaaggaaggatgctcgagtcgagagataaaacctttaagccagtggcgacgctgtaaacagagacggtgttggctgtgcataaaagaagcttctttgcgtctttcgaaaacgccggagcggaagtaatgttgtttcttccgccgcgaatcattttccttcaactcacggagattctgagaagacgcaaacatcttactcggcgattaaaaattagattttgcgacgtttttccgacgaaatattacaatgtacccagttttcgaggaaattatgtctgtgaccaaattgcgactagtacttagtactatatgcttgtacttgtagtttcactttcttcgtaacacctggctctgtgatgactcctctcattctcttcctccatgtttgggtttcgcttcttggactaggccttgaccttgttgggcctcggcctgtttgtttattttttctgttttatctttaataaaatgagacggcaagaaaataacttacataatttttcaagatcttaagtattttgtattttcttaatttatgtgaaaaaccctgtggataaacaaaatataatgtatagtccaataattggaaattttgtagttaacaaactcacttcgttttaacaaaatatggatggatgattcagaggcatagtatgcgacattaactgtattacaatggtcgacaatgactttgatttttgaggtcgtccaataaatactaaaatgtatgggtatgattttaggttgaccaataaacttcgatatccatcgttaattccatgaatgttttaaaaaactgaagttgcttctattatatataagttaatctattttataattttattttatgacagtttagctataatttcttttcaaaaacatttatgttcttaatttatcaatctatcactttcctcgtcaacatattactttttttataaatcttttgcatatgactagcttatcggaaaatcgttcatatagatagcgacataactaaaataaaattagaaagatgatattgttttgatatagtgtttgtttgtcttgtttcaaaagactatgcaatcaactagttgtgcgtcttgtggatctaacagttttaaaaatgtttagggtcaatagtttaatcagacttggaacggtagtttatacctttagatacaatattatctaaggttaatttatgtcatggaaaagttatatatagacaaaatgttcaaaaaatttaggatttattgtgaaaaaacgagaaatggtagatgattcatatacatatcaacttattccaaagtaaaaagtttaagaaataagaaaaataaaaattgtagcgtaacaaacattgacatatggctcgttggaaacaaactaaatgtaataattatagttgttcatcaaactattcgcatacaaccatcatgaacgatgactaaaaatgggagacaaagtgggacttttgtaaatcctacgtttaatgaattagaatgttgaattattttttcagatttttatacatatgaattgttgctttcagtgttctcttaaccaatgaaagtaaagatgctcaaaggctaaatataaagaagataaatttcatttctcttgattattctctttagggtttaagattacatcatgtttcctttcataggcattataatcttagtgacactagggttttcactgacacatgtcaggtctctattgatcctagacagtcaaaacagttttgtaaaaccactccttcttttccagcacagctccttgtttttgtcctttgatccaatcttgatgtacttttggttttgtcttcttttgcaggagatgaccgttggagctgagagttgtttagggtctgcgcttgggcctgttgtttattgggcttgaggtttgctgcattctcaatttggcccaatctcagaaccttcttgataatgtcatctgaagaatttacctttacagattcctctgcttcgtgtccgatcacagctctgatctggttcttctcttcaccaatccgagttgttgtctcaacacaagatgcattctctctaatagccccccgcaaactcggcgtaggtggaacatcgacgcctagtttgtaacgaagatcgcagaacggcttgatggggagagatttggtgaagatgtccgcgatctgttgatgaccaggtatgtgcttcacaatcagagctccaagtgctactctctctcgaacataatgatagtgtagctgaaagtgtttacttcttttgtggaaagctggattcgcagagagatacacggaggagagattgtcgcaatagatttctggagtgtcaagtagaggaatgcccaattccttgagaacagatcctaaccaggttacctccgaggcagtgtcagacagagttcgatattcagcttcggttgagcttttggagactgaatcttgcttttgtgaggaccatgagatgatatttgtaccaaggaaggtacagtaacctccaatggatcttcgtgagtctatgcaatttccataatcactatcacagtaagctctcaatctgcaatatgtgttcttattaaaggagatccccattgttatagttcccttgatgtacctcagaattcgtttgagcagattgaagtcagacactgttggagcatgcatcttctggcaaacaaagttaacagcaaactgtatatcaggtcttgttaaggtaagatattgaagtttacctgcaagacttctgaaatatgttggattgtcaaagatttcatcttgtgcaggtatagcagtcaactgaagtggcagatgagtaggcattggagcacaatcactcatcacagccacagcaagaagatcttctgcatacttctgttgggagagaaacattccttctgaatgaaactgcacttgaatccccaaaaagtaatgtagtcttcccatatctttcattctgaattcagtattcaagctgtctaatagctttgacatcgcatctgaactgtttcctgttattatcatgtcatcaacgtaaagcagcagcaggatgatactcttgttcttgatgtatacaaacaaggatggatccggcttgctacattcaaagccaaactcaatcagataagtgctaaatttatcaaaccaagcacgtgggaattgttttaatccgtagatagacttatgcaaaagacagacatgatctggctttgatttctctacaaaacctgcaggctgcatcatgtacactgtctctgtgagatcaccatggaggaaggcattcttcacatccatctgctttatgtcccactgcatgatggttgctaggtgaagaactgatctaactgtcggagttctcaccactaggctataagtttccaggtaatcaatgccttcttcttgattaaatccctttgcaaccagtctggctttcagcttgtcaagggacccatcagcattgagtttagttctgaaaacccacttgctgcctaatacatgcatatttggtgtatagggcaccaaggaccaggttttagcttcagagcaattgtccatttcttcgtgcattgcatcagtccagccttcatcttttaaagcagctgtcactgttttaggttccgggtaagatactctttgagtgtgtaaaccatacctcggatttggttttctgattccatcttttaatcttgttgtcatagggtgggtagactgagatggctgagctgtttggacctgagatgactcactgttggaagatgcactctgagaagattgattctgagtagactgttctgtagttgatggcagcggttgaatgataggagagtcttctgaggtagtgatttgctgagtagaagaagaagagctgttgcctataggaacatgatcaaagcctgccgtacacccagtactctcctcttctctcaacaaaaccctaccagaaggtactgaattttgatcattgtgatcttgattttctgttgaagtaccagtctgattctgttcttgtactgagcaaccctttaaccaagcagacatcaatggtgtaacatttgcaggttgcaagtgaatgtaagccatagatgaaaaaggaaagagtgactcatcaaagatgacatgacggctgatatacacacgccctgtggttggaagtaagcatctgtagcccttatacttgtcattgtatcctaggaacacacacttgagtgatctagggtcgaactttgtggttgcataatctcttagggtaggatagcaggcacacccaaagacacgtagtgatgtgtaatttggaggctttcccattagaacttcatagggactgcatttcttctccaatactgaacttggtagtagattgataagaaaatttgcagtgtagaacgcctcaacccaatacttctgtggcatactactttggaatatcattgagagtcctaattcaataatgtgtctgtgttttctttctgctaaaccgttttgttgaggtgtgtgtggacatgacatcagttgttgaatgccatgtttttgtagatgagctatgaagtctttgcttataaactcacccccaccatcacattgaaaggttccaattttctattgaaactgattctcaaccattgcttgaaacacaggaaatatcaaagcaaagtctgatttcaacttgaggggataaaaccagctgaagcgtgagtaattgtcaatgagaacagcatagtatcgaaaaccttgtactgacattattggtgaaggaccccaaagatcacaatgtattctttgcaaaggtctagaggctacaaacgaagaagcagaaaaaggtaacttaagactcttcccaagctgacaggcttcacataccatcttggtgtttttgttgactgaaatagctttagttgttgacaggtgctgaagaatctgagcattaggatgaccgagtcttctatgccaaacagcatcacttgcagcttgctgtcttgaggaatagtagacttcaagaggtgagtgattcttcaacatgtacaaccccttattgtgatgccccattgttaacaacctctttgttgccttatcagtaatacgcacagtgtcacagtcaaattcaacacaacagggatagtctgatgtgagcttagaaacagatatcaaggatttattaatatcaggacaaactagaacatcagttaaaggaagattacctgaggttgactgaagactagttgatccagtgtgagttatggggagaaactcaccattaccaaccattactgcatcagatcctgagtaaggctgagactgctgaagcctattagttgagtttgtgacatgagctgttgcagccgaatcagtaaaccaatcatgaccagcagtctctgtaacatctgtaatccttaacgcagctagagcacttggcagttcctcgtgttggtagctgttgttgaagcggtgccagcatttcagagcaggatgtccaggtttgccacatatctgacatattattctgtcacctcctgaagaacctgatgagatttgctggtgaaagcctcttccttttgttgtaaaatttaatctccctttgttgttgtttccaggttttccatttccacgaccttggctactatagtaatgggaaccattagttgtggtaatgttgaatgccaagtggggagacacctcatttccagcattgtaaccagccattctatcagcaaaaccagtcaacctaggaatcacagactcgaaagtaggtggaggatgtaagtccatagatccttctatagaagtcttgattggttcataatctcttcctaggtcatgtaatgcagcaaaaatcttcattttctgactaaccggattaccaatagatgcaagttgttcacagattctcttgatctctctaacatagtcttccatagatttatctaacttttctatggtttgcagttttctttgcagcttaaagagacgggatgaagataccttattgaagtgctgagctaaagctgtccaaacctcttgtgctgtgatggtatgaacaacctctctgagaatatcttctgatagagatcccagaagccatgctcgaacaacttgatcagatctctgccatgcttgatagtcaggattttggacttctgtggtgagaccattgatctgtgtgagagtgttgacagctggaggaggcttgatagcaccattgacaaaccctagaaggttttgtccagagagaaaggactcaaactgagtcttccagagaagatagtttctctcagtaagttgaaccgtaacgtagttggaaatgtgaatgacaggatgcgagtagagctggatttgagaatccatggctctgataccatgaaagtaaagatgctcaaaggctaaatatgaagaagataagtttcatttctcttgattattctccttagggtttaaggttacatcatgtttccttttataggcattacaatcttagtgacactagggttttcactgacacatgtcaggtctctattgatcctagacagtcaaaacggttttgtaaaaccactccttcttttccagcacagctccttgtttttgtcctttgatccaatcttgatgtgcttttggttttgtcttcttttgcagtagatgaccgttggagctgagagttgtttagggtctgcgcttgggcctgttgtttattgggcttgaggtttgctgcattctcaatttggcccaatctcagaaccttcttgataatgtcatctgaagagtttacctttacagcttcctctgcttcgtgtccgatcacagctctgatctggttcttctcttcaccaatccgagctgttgtctcaacacaagatgcattctctctaataaccaactcatccagtttatttcttcttaatgttttctttaattacggattttgcacaatatataccttatcactgatgtgtttgtaacaacttacaacagtccgaagaagaagaaaaaagaatctcaattaggcaggattcaaacgttcttagctccctacagttttcaaataacaatatacattcgatatggcgggagcgtaatggaaggaagcatgatgagcagctgattcctgcaactaaactcgtcaattggatggaaaagcaaatttaaaataaactctcggtcattcgaaaggaaagcgacatacggtattactattactcttaaacatggtttacgcccttaacaaattcatgcatcttcaaattcaggaaaaaaagaagcaacttttgcattttgatgacctaccctttattttttcttgaatttaatttaatattatattcagaaaataaaaagactcaaaatgtaacatattaatgtatgagctgcttaacaaaacaaaaacaaattatgaggagctaatagtaaaaagttttataattatggacccttatatggggcactcgagatacccattgaaagctttggaaaacgaccgatccgagacagacaaaagttgtgtactctgttgtttgattttgttgccaacacattttaaatactgggaactaagaatcacagatttttaaactggaaacattatccaaatatgttcaaattctgaactgatatgtttagaaattaatttattaataatttgtaccaaaggatattcactatatgtaagaaaatgagtgactcctatattcatgattaaaaaatccaaagcataaatacactgatgttacatctacatgggatatgtgattagtgtattagaacaagtaaacatataatctaatgatttcaataggtacggttcttctaatattgttactatgaagaaatgaacttggccctagctagacctaaaaaacaaatgtccctagagtgcgtcgcgacttggttaaagcaaaatcaagctgatcttctgtaaagacataaaccacctcatacaagtacctctgataaaataaaaaatcaatgacaacatagttcattcaaagatgaaaaattggattcgaaagtggatagattgcaccaatgttatcacagttgataatcagagattttcttatgtgatgccaattttaccgggaagataaaaaatccattgtatcccgaatctgtttatttgataattcgcatccgaggaagcatgaacggccactggatgtgagagagatctaattccacacaagtagcacaaaattattttggaggccaaccattaatgctcttcttttattgatggattggttaggataattttgttgatagcaaggtagttatcatatatttttggattaaaggatctagaactcataaagagtttccatgaagttgaagtgcgagagaactcgattccatgaaaatattgtcaattatctagatccttaattataaaggagaaacgagcatatgggatccataaatcatgaacttgttgaaaaaaatatccttgataacgttatcatcgacataaaccaaaagataaagcgtgacataaactctaaagagaatgaaagatatatatctgctacagagttgagaaaatccttgagaacaagcgtatgatgccgataaccaaaatataatattaaataaattttgcattttacaaaagatatatactatatatatatttttcttaatagttactctataaaagatgttatatcaattttgtattttagatattaatttttttttaaacgacattaattatattattggatttttttttgtcatatgctgattagatatgcagatattttgatttctatatcaataaaaaggaacaaagaaatccaactaaaaattcaactaaatgcaagttgcaggaaaaagatagaaaatgaaatgaaatagtatgaaaataaattggaaaattgggtccaaaattaattgaaacaaagacaaagtgtgttttgtggtggcgatggtatggtcccattgggatgatgattcctctcttgtagacaaaccttagacaaaaaccattatggtaatttatcttcatttagcaatgaccaaaaacaaatcttgtgtcttccttgtcccgcgttttttgtcatcggtttgcgtaagtgtaactcaaaaccctaattttggagacaatgaacgccatttttcaaatgtatgttgtatttagttgcatgggtacatcagacgtcccaagtctctatattttcaaagatagatagtaacactacttgtttccattaaaaaaaaaaaccacaaattgttgacagaaagaaaaactaaccaaattattctatgttactacaatcatttaactatacaatttctagataaacaaaattgataataattgttataatcaaaactgatttagttggaatttggaaacactagctaactattagatgtaaaaatgaattgatacaacggtttatctaaaccggtaaattgtaattggttcactgtctaaaccggtaaatatatgcatatataagatgtaaaaccttttgtctttttctacgttctttattttttttagatgctgtttagccaaattaataatgtcaaagttcataaacacacatccaaattaaatgcaataagaaataaatgaattaactcatatctttgtattatattaggtctcaatgtctcatcatatctcatatgcgatttctaatatgtctcatcgaaatgaatattttgaaccattcatttcgacagaatctcactatatatatgattggtttcaaaattagtcaatttttcgggttctccattgggttgttttgtgaaaattaatcagaaattagtagatgaattttgatttcttatatatcactttaatatatcaaagtagcaaatttacgctaggaaaaagaaacaaaagagtaattgcatgttattagctaaccatcacgtttcattcgttaatttgacaggctgatgttgcaaaacgcttggataatattggttatactactatagtcttgaagataagacaatctattagaacgaaatgacaaaagtagaatcctaaggtgattacaactgtggggagcatgaaagggacaccaaatagggaaatccctattgattagctttctcaaccaaaagtacacctatttgagtgtgacttatacctgattatgtaatcaactattatatgttttaattttgctgttttcattgatttagttggaaaaaattgccatataacaaaattcacaatttgcttcacttcaaaccattaaaaagtttttaatctcactttgagtgtgattaatatttgatataacgagtccgggtggtaacactaaacaatacaagattttaatgggtagaatatggtacgaattataaaaaaatcgtattaaaaagtaatacaaaatagcgtataaaacacttgagaatatcatttttggtaatgcttttatgattggtaatacaatcaaagtggtgcatcccatatcacagcgggattaccacttaccaatcaaacctttcatgtagactgtagacaatgttatattagctttgtgtttacttgtttccccttataccacttttgtatattcttcatcatttcaatcttgttttattaaagcaatatcaactcatttatgaacttataataaactaatacttgacaaagtaattattatatttggagtacaaaaatacttgaaaaaagtgttggatcatttttataagttttgaaaagtattaataaactaattaaaacaagcggcgtcgaatttgcaatgatcggaagacgatggacaacaattcacatggcgctttcccttttgcagtcacgaaaatacaatctaataaaagatttttccaattattggtattattgtctctcttttttttagatttgaaaatccaagctgtcaaaacaaagaaaaaaaaacaggtgctaacttttgaaatgtagttttaattgttttttttattaaacttttcaaatgtagtttgatcttgataacccaacatttatctaattcgttgaaataaatgcacttagttttgttgtcttttgagcaatatatatagtgcagtaatatgttttagtattgtgttaccagatgtgttcaacagtttctaattattattattttatcgtcaagtttataatgcttattatttattggcaaaagaatatatgttatttgttattattatccgttatagtactgtactattttttatgtaattcatgcattgtattatatcatttataggtctgaaataatacgatatgtaaggttattggtgaacataatatatctacatcaatcttgtacaaaagaggagttcccttaaaatgaaattccatgaaaatgtaaaagttatctacacaccacatgtcatgctttgacatccaataaaaatggtaaatgcttttaattctattaaataacatatcatacttttcaatgttttcatcatttgagaaacaatcatcagctttaaaattattaatatcccgagttcgttccaatgcctatgactacgaaaaagagagtaataataaaaggaaaagaaaaatggttttattagatggggtcactgatgataaatacataagctattaataatatattgtaaaaagagaaatacaaaacctattcgatccatataatattggtagaaaataataaataaattccacgatatagtaggaaaaagttcaaggcaatcatgctaaatgctgagttaaatagacagacagtaaaggaggggttggcaaaaaaaatgtagatagtaaaatgatgagaaacttaaagaaagtatctttcaattttcttatagttttttattttcttctaaaagtaccataattttagaaaattaccaaacatactgaaagttgggtaaagaggcataattttatatttcttgacgccgagaaatttgtaataaaaaaagttttcagatgatatagttaacaagagttgggagaatgatttttctcgtgccaacccgtataagatagtgaccacctcttagcatacagttatctagcatcactttatattatggtcgttacgctttgttgatctactgtttttcttggcaaaagaatcactaagacaatcccgatagcgaaatgaagtctaaagaggtatttctccaaataactaaattaattgaaaaaattatggtttttgaaaataccacaaatttacatattaactgaaataatattttttctaaaacatcacaaatttatatataatgttttgaaattatctcccttatttatttttttaatctaatgttacattatattcaaagaaaacatagcgtttgtacaattagtgcatcggagtttgaatataatagaaagagttagagagagataaaatttagatcgaaattgaattaggaacgacattggagccaaacttggaagcaagcctcatatcgactgtcctttaaccgtttgatgattgtgatcttattcctaatttgtgcatcaatccacttgattaactagccatgatacttgggtatttcgtcgtgccgtcggccatttctttcatgccaaatggtgtaggcagtgacttagaaaatgtatttgatcaagaagccttctattcggttttggtggtgagacgaggcatggaggaggatctgtgaccaggagctggtgtagtgtgctttgtaaactcctttcccgagcgcattccacacctctgaagcataagggcaagcgaaaaagagatggtcccaagtttctatgcagttggtgcacataacgcagtctcccgaggctcttctgttccacttaattatacgatctcctgtggctaagcgattgtgggctgcgagctataaacaaaaaggagtacttcggcttaacatgggtgaaccaaactgctttgtgccaagctaccacatttgatgtaggtcggataagattccaggtatcttccttattatacactcaacaaaattattatatcattatcgactattatcactttagcttttcctttcagctgtaaatttttctaataaacattataatatacacttttgtgctttctgctaaatttgattacacgaaatttctcaggtggtgtgacaaaaaagccaatgatttcatttctcaaggtaatcccctaaaccttaaaaaaattacatctgagaaaagaaaataaactatttttattacaacaaccactcgtatatatgtttctctataacagatcctgctacacactccacaatcgaaactttcagacaaagaactgcttttttttccttcaatcaaactcttttctcacgaaacttcacatcgatcctggtcgaaccaattgacgaaattaccatcgttaagctctctctaccgtcgccggcgccacaccggcatctttctggcgaacttgacggaggctgaattcaaactgtacaacgtaatttccccggagaccatcaattcccgatttcgactaaaacccagaatttgtttttttcccggcgaaccggatacgaattctccggctaaccggagatgaagttcatggaattagggtttcgacctgacacattctacactgtggaatcagtaaggtagaagacagaaccaatcgtctctctcaaaatttcgaatcctctgttttcaatcaatctcagatcttttgactctgttttgttttaaaattcccaggtctgtgtcttctgatttattgaatgatcttgtaatccaagtcaaatccacaaaataccttcttcacaaggtttttttttcttgttttgtgttgtttcttataacatttcatgttttgattctgatttttttgtgtttcttggcaatgcaatttacagtttccgatgttatccaaatgcttacgtttaaagaacttagtctcttcacaagaaacagaaacctctcaagaacagcaagtcattcaacttgttgattttcccggtgaaacagaagcttttgagctttgtgctaagttctgttacggcatcacaatcactctctgtgctcacaatgtagtcgcggtacgttgcgcagcagagtatctagggatgacggaagaagtggagctcggagagacggagaatcttgttcagagacttgaacttttcttgactacttgtgtgttcaagagttggagagattcttatgttactcttcagactacaaaggttttgcctttatggtctgaagatcttgggatcacaaaccgatgcatcgaggcgattgctaacggtgtaactgtatcccccggagaggatttttcgacacaattggagacgggtttgttgagaaaccgatcaaggataagaagagatgaaatcttgtgtaatggtggaggaggaagtaaggcagagagtttgaggtggtggggtgaagatttagctgaattgggtttagatctttaccggagaacaatggtggcgataaaatcatcacaccggaagatatctccgcggttaatcggaaatgctcttaggatatatgcatctaaatggctaccaagcatccaagaaagctctgcggattcaaatcttgttttggaatcggttatttcacttctaccagaggaaaaatcctctgttccttgcagtttcttgcttcagctactgaaaatggctaatgttatgaacgtttcgcattcttcgaagatggaactcgcgataaaagccgggaatcaactggataaggcaaccgttagcgagctgttgatacccttatcggataagtctggtatgttatacgatgtggatgttgtgaagatgatggtgaagcagtttttgtcacatattagtcctgagataaggccaacaagaacaagaacagaacatagaaggtctcgttctgaagaaaacatcaatttggaagagatacaggaggttagaggatctttgtctacttcttcttctcctcctccattgttgagtaaagtagcaaagcttgttgattcttatcttcaagaaattgctagagatgtgaacttaacagtgtcgaagtttgttgaattggctgaaacaataccggacacttcaaggatttgtcacgacgatttatacaacgcgattgatgtctatcttcaggtaaaagcaaacaagaagctagtatacattttaagagaaacatctaacactctcgttacgtattgcaggtacataagaagattgaaaagtgtgagagaaagaggttgtgcagaatcttggactgcaagaaactatcagtagaggcaagcaagaaagctgcacaaaacgagctgcttccattgagagtgatcgtgcaaatcctcttcgttgagcaagcacgggccacactagctacaacaagaaacaatatcaccactaatgaaacagcagttttgaagagaagctttacaacgagaagagaggaaggaggacaagaagaagaagaaagagatgaaactaaaccaagtggagggtttcttcagagcacaccttcgaggtttatggcgttgtgtgcgatcccgagacagcctaaaaagctgctgtgcaagttgttgtcgatcagtaggagtttaagtcaacgaatttaagaagaattgatggtatgagtattatgatttttttcctactggtttcttgtggcccaagtcaaattgtctgcgtcgtccttgtgaagcttatttggttctaaaaattcatttgtcacatgacattgtataacccaacaataaaggaaatatatataatctttctttgatagattttgtggagtttagtgtggtggttcaatgataaattgattctttgtaatttcatcttctgtttattgtagttatttcttgatttgttccagtcaaataataaaccaaaactgattggaaaaccaaacgataatccagttatacaaaaaaaaaaaaaaaaaaaaaccctggaaccaacaaaataataatcgattgaatttaaaaaaaaaaacttggtcgatcggaacatctagaatttcttatgacttgaatcatgcttagggattttggaaggcagcaacgcaattcaaaaaaatacgatttgttcaacttaagttttgaaaagctattttcagcagatgaaaccaaaatcggaatcgtcaatggtatttgataagcggctcataagtttggataacaatttcaactgttttaagaaaatctaataccctaattgtttgataacagattttgacaccttaattgtttaataaccttcgcttacccaaatttctcttgtaacacatttattatattaagtaatggtttggtttttaaattaattaattaagtccatggggctatgtcaatgaattgtggaagcccaatatttacattctattattaatatatttgcttggggcatcaaacatatttatataactctgttaaagagtaaatctgtaatatatgccccaaaatgtttttccataatttgatgccccaagcaaatgtttcttttttcataagtgaggcacggccttattggttacgtggttaatattatagaacaagtcctttaaaatgtaaacaataaggtctatttatcttaataacaaaaaagtgtctatttagtatttatcttatccaacattctacaacaatattgttacactaactaacgccgtagcctccggctcgttcttcttcttgaatttgaaccaaatggccagaaggaacatgagggtggtcaagagggcagcagtcagttccaggagttttgatagtactgttggtcccaaaaggcttcctctagtttcatttttctttcttgtgcttggttaattatttgtgttttcacaaagctttggtttt

SEQ ID NO: 70 - DNA, 82646 bp, Arabidopsis thaliana
gatcttttaatctctaggaatatatctttgtctgcttatctatctctttccatcactaccggcaatgttgactctacaaaaaaaaataattgtgatattttgaaaaaaacgaagttgatacttgagagttgagatgaaactgcttcttcttctgtttattgttttgtcatttcttgatatgtccagtcaaaagtaaaccaaaactgattagaaaaccgaatcaacaataaatcagttatcaaaaaagaaagtaaacaacaaggtctattactattggagtttgagtctatgatcaaatcggctaaaaggaaaagaaaaaacagtgagaagaaatgaagaaaagaaaagaagcaaaagctaagcaaaagctaagcaaaaactaagcaaaatgagaagaattcttatgattaatataagcgttatattgcgtattatttttaacttcgtatgatcaatccatattttctggagatgcagggtaaaattgtaaaaaattagcgagttgaaagatttttatggttaggaacttgacgaaccaaaattttaagaaaaaattctaaaccctgatatttctagtatcagttgaaccaaaacaaatagatactatataatatgcaatagagttttgtcctaattcgtgagaaaacgtctagaggaaaaaaaaaaacatatttttatgttacaaaatctacgcaacgcaatggtaaacaaggagtgataagttcacaagaaagtcactccaaatttttgtatacaaaagtgtagattacaagataatttagcagaagtcagatttggtgataaaagtacgagtctcccggtttcttatctccaccatcgctagttgctcctccaaatccaatggtatgggtcactccagaaacaagattagtaaccatggaggttccccaatagacccacccgttttcatctccatgtcgctcagcctcaacgccaatcctctgttgctgctctgccatgatatcaccccatctcttcctcataaactctctaacaacttcagctccttgagtagccacttcttgagatgggatctcaagcgggttttggtccaagttcagtttctctagcttcctcagcctataaaatgagtctggtatagcttggatttggttgttgcttagatcaagctccctcaggttagttagatcagtgatagtgtcagggacacccatcaagttgttgaaattgctgcttaggtttagaacctcaagtttcgttagtctcccgatcgagtttggtatcccgtggatctcgttcatgtgtgcgtcaagatactttagattatacatttcacttatcgaacctggaaagtaacggagtttgttcagctggatcgataatctctcgaggttttgtaatccgtatccaatgtttgtaggtaatgaagtcaagttgttgtagcttgcatctaactcaactagtgacctaatttatgaaaatcattgaaacctcaggacaaaagtagaaacaatatacagaacatttacaagaatagacaagaacatgaacctgcaatgcgcgatgctctcagggagtgcggttagattgttcgcattcacattaaggattctaaggttaagcaacatccctatagagtcaggaagagattccaaagaatttgaagatacatcgagctcttctagcttcttgagtttcgagattgcatccggtataaactgtaaaatgtttaaattacaaaatcagtttcacacattacatgaagcatttaaaaaacaatgataattccttgcatcacaagaagcatcaaaaacagatacagttacttgtagtccaagtttctaacaaaactatatcagtcaagtgtctttttcgatataattcatgagattctgtaagctatgttcgagattaatattatcgagctatcattagagatagttcaaaattttgggatcttagtattaccgtcaagtcattgccagagagattcaagtatactaagccaactactttccaaaaagcttcagggataagcttaagttcttggctggagagatcaatcctctcaacggttccgccggattccgcctccttgagcaccgcaagaaccttctcgttcacttcttcaccgcttctcaacatcgattccacctccgtagaataaaccctagaaagctcctcctctgtatccttcaacttcttctcgtaactatcgtgcacttcatccaaccgcacaaccccggcataaatctccgactccttcgctgcttcctccggcgagagcgaatccataatttgagcgatcttgaatcgagcagaggaaaccgctaagggatcaggtcgagagccgagagagttgaagacgaaaagcgtctgtgtgatcgttgtggggatggattgagtcaacatagacatgatttctggattggagagaagaggaaaagaaggaaggagagtttcttgcgcggccatagacggcggcgcgtggagattggagtcatgttgatgaaggacgtaagagagtaaagggaatttgtcgagatcgtgatccatggtttttgtgattattagtcaaaggtaattggagattaagagaggttttagtaaaggtatgttcatggttgaacaagtcagaaacattgaagttgatgttgccatgtttgtgagcacaagtctagttgggttgaaaagtgtcgaagttgaccgaggaaattaataagattccaatgataaagtcaatcgagccatcttttttgaataatcgaatcaaagaccaatcctgtccagttaatgtaataggatatatggcattaacaacgagattatgatatcttataagttaggggaattgtccgcataggaaaaaaacaaccgttaatcgtttgaacattgatctaaaagacttggtccgtgaaaccaatgtggtttttgagctacattcttcaattacacttgatcgtttctaatatttttgggttcaactcggaagcacttctatcttacatcatatgtgtttcatattttctttgctaaaacttcatatgcaagtacttctttgaaaaatgtaatggttttaataattgcaacggttggacgaataaatccatttgttgatttgaccgctttttatttaccattcatgtatagtcctataatgtgtttagtttattccacccattcatatctttgtgtatgtttccaaagtcaaatctccggttgttcgacccacatcttccggaactacaaataaagaagattaattcagctcatgttgctagtatgaccctcttgcttttaccatcagatttcagtttagttgtgaattgaacaagctaacaaaatccaaacgtaagtcaatgaactatagaatcataatcccatctttccaaattaccaagagaaagaaaaagaaaaaaacttaaagatggctatcacgtcattgttagatcattaagataagcgaccaatcctaagagatgcttgatggcctaaaatgcctactttcgtcgtgtttataccgcctaattcctcttatgaattgccaatagtccctaactccctactaatacgtccaccacctaatttatgagcttaaaatatccgaaaattcagaactcacgtcgctttttaaggtcattaaagtttccattttccacagtccaagacctcaattttgttattggatataaacttgtacttggtgtcttctcctcccccacccaaactctctataaattcatttccgatagtcttaaaaacttgtattattatttgtacttctccacaccagctgtatttcgggacccgttttaaattaaaatcgaatcttatcatcatcactatcacttcttctccttcttcttttatccccaacattcttaatccatttcttattttttttgtcttcctcttctatttctccaagcttatcccgtttcgaatttcgtctaccataaaagttaatcagaaaagtatatatagtgatattcaaaaaactggaccacataccataaacgagaaaaatcgatcacgccattgctcgaattttacaaggatagattaaattacctgcaaacgacaaaaaaaatgattatggaagttagctcaacagaaattgtcaaactgaatttaacctaaactaacacacaaacggtgataataacacgcaagcaaaacagaacaatgtaacagaaaaaaagataaggtagggcaaacacgtggtggaccggtccggttaaacgttgacggggaaaatgcaacggacatagacggagttacacgatatcaacggaaaaaaaaaggaattaaagtcactcacccaattcatcatcatcaccaacaaacagagaataaaaagcttttgggatgatttcattaatggcgatggttagatcacgtacacccttctattataatctctcgctcttttttacattagaaaaaaaaaacgaagattctttttttttttaatcgtatattcgaagattcttcacgttattgccagtgattgccgttgtgaacaaggtagatatttctggaattacggtgaacataacaaccataacacggattcttcgtaaccgtcgttattctcggtggagacggaggtagcggtggttttgatagagacggagatctaggacttgatgaagtagaggaagttgtggaagatgatgacgtggtggttgatgacggtaacgctaacggaggaggagattttttagatccggcggcggattttggtggatttaagaagactctgattttcatcggagatgaagaggaaacgagatcgtactcttcgattagattcactagatcttcatcggaagtaattgaaacgagcgcgtcgagatcttccgtcggaagctgacatcggatcgttacggttatagatccgccgacgccgccgcacatctccgccatcttcgacgctaactctgttaaaacgcaccacacgtgtggccttaatttctctttccacaaaaccgatttcgtttttttttttgtgaaattcaaaattgacaatgagatcgagagcgtgaaactaaccggaaaatgagacggagcgaggaacggcgaggacgcgagtgtgaccaccgttgtaacggagtttaccgtcgggataacgaggtaggattttgccgccatagctacagagaaatttgattgttgagttcgtcggagatgtaaccatatctggagaagtgagagagagttgaagaaggaaggagaagaatctagaaggttggtttgttctgtgcaagccaagtgacgagtaacgtttagagcgtatttatagcggttcatggaattgagtaaacaaagagagattgtgaagggtaggatcgtcatttggaggaactattcagatacgtaagctatagttttgtactgttcttatttatttttattttactttaatgaaaacacccgtaaaagataataagatttaatgataagtttttttttaaaaaagctttttgtatggagtactatgaatgaatactatatattagcattttttatggtgcacatttcaatttttttatttatataattggcgtatttctttttaaaaatctttgatagacttattattattataagattattattattattattataagatacactagaaacgagtttttctctgcaattttatgtatctcatgacaaatctctttctcgtcctaaattgagcctccctcttgctttacctcgtcctgcaacgaacctttctcttgctcaacctcgtgcagcaaccaacttttcttctccacgtcctccatggaggaacactccccttaacaactcttcggtctgcattattttgcttttggatggctaatcaacgaatccatatataaccaagttgcattgtctctggtggtaaactcaattctctacctcagtagagtttcgattttttgtgagtgttcgagccttggtaataacccgcttgatggcgcttgtgaataatactagtagtaattttgaagtaagaaaatatatagtagtagtgcctttttttttaattgttaacaacatcaaatatataaacttgaaccttaatgaaatgataatacgtcgattacattagcaactattagtttttaatcatgatattatctgttagctcttagtagtgattagaaaaagattattttttgttgatatttttagatcgataagattccatccataaataatttttattatacgcgctaatacaatttaatgcaatcaaattttggaagaaaaaacggaatcaaataaatttaaccacttaataaaatgcacattttaaatcaagtattatgtttttttcataactttcaagtattatggttttgaatgatgaacaaaattaaagtattatattttgtatagctttcatttctatcaatcataaaagttttattaaaagtgttacaaatatttttactctcaactttattatacagctttcgcatacaacttttttatacagttttgcactattttcaaaaaacttataactccaactaaccgctaataattttgtacagctttgtgttaccaatcggatcatgtatcttagattaaatgtcactttaactagtggacattgttcccaactgttgtgaacaaatttgacaataataataaagagaactgtgatgtaaaagaaaagaagagaataacgggacccattatcacgtgggccacacatggagatggtccataggactttgcatggcccgtaatgcaatgacgcattcaaggcattttgtgatagcccataaattgttttttattttcgtcagccgataaagttttaaacaccaaataaataattttgttttgaaacttaagactttaattaagaacgtaaataaattttcgaaaatacttataattatgttaaaaagaaaaattaagttgttataatgaaacagtgtttaaatttttctatagataatgctatgctaatcttcaactagcaagagatatataaagataatattaaaggtggataataaaagaaaagagataaacataaaagtgaaagaacaaattcaaggttacatcaacattatccaatgaagtcatgtatacacagacgcatcaaaaaaatatgaaaaatgtaaaacaatcgaatattcttttggaaatatgcctttgtatgtcctcctatatatgtatgtatatatattatatatatagatgaaagaattggaaatgataatgtttttttttttcacactgaaggaaatgataaatgattatctttgtgtatacgtgtgtatcagtatctcccgatctctacgtccaattattttaaatggtcctactctttgcaacgaaattataaacatatatatatataccaatatctttagtttaatatattatatagaaattttataaattgtaagatatcgtgtggtatagtgtataccaatgaattatcaccaattaattaacgaggttaatgttgataagaatataaaaagtaagttggtcataaacataagaagaaaaaaaagaaaaaaaagtaagaaaatgcaattgtgtggagtcttcttgagtaattattttatttaattaaccataaaacgtagaattaaaaataaaatgggtattggtatttttacataaaaaaattgtattattttagtaaaccataatattttagtgttaatctagttatttttctctaaatttgggttaaactaggtaaatttcagtaaaacctaaacaattttttttttgacatgttctttattaaattcaacttgaaattacaaatatattaatgaacttataagtgaaagctctataatccatataccaataagtataacaaaattatagaaaaataaaattacacattgcctttttctcggtaaaccttacaaatctgtttttttttttaattgttttcgtcttcagtctaatttgatattttctgactataaatttcttttttatgaaactccaatacttttcttaaaaatcaaaaggttgtgatctatcgattatattgcaaactatacaatcattgacatctcatgtgttaggtgatggcattggtttttgttgtaaatatctcccataatagatctataatctcaattcccttgttttcttcaatgatcagagttgagaagtccttataattacttcatataactattctggcgggttatcttccatgagtagaaagaatatgaaaacccgaatgtgaaaatgtcacacacatttcgggacacaagcccctaaaactttcaatcttcaatgtgattggccattgatcgtagaatcataaaatccacgtcagagataacagatctgtgactgatgtagaagaaacatcttaccacgactgttgttgcatttggcaaattgttttataaaaaaaaactacaaagaaggaaatgtatttatttacaatttaacttttgttttgccaatttctccatagttcaaagtgtgcttctcacgtcactaatatcttgaacatgcaacgataacattaaaattataataatagtctttgcctttttctttatgcaacgaatacgaatagataattgcagtatttttaattcacaagctcgcgtgacaaagcttcaaagcaataccgatacattatacaaaatcttttttttattcgtacgaacgacttgaaatagttctgtgatatatttagtgttaattgtcaaaccgcttaaaacgacaataaactctttttaaaaaatatatatatacactacaaatagggtttaaacacatcttgatttcatccaaatttcaaaaaataagaacacacagacatacatcttaatttattttctttagctactcaaaggttaaaacctaatatattttatcagaatgatcatgttacagtagtataataaataatggggagattttaaagcatcaaatctagaaaaattattattttccaaatcttatataaaaattaaatattttgttatttaaaacgtctagaattactaataataattcgaaaatataataaaaagcacgatatttgacatataatcaggttacctaaacatgaatctgacatatgttcttaaattaataaaactatccaaaatgtcaaatgtaactcattaaaaaaaattaatgtagattttgatggaaatttaagttaatatatttaaaagttttatcaatgataataattatttatttgcgtgatttcttacaaaagttgactaatctttttatcaaattataacgctaactaataaaaatttaatgaaaattttggttttcaatatcaaagtattgataatttagtgaaacacacaataattaaaacattgaaaaacctttaaaaaatactaactaaatgatgtaactaatattcctcacttttctcaagtttttctcaaattttccttgagttatcctcaatttttcatttggcaaatgactaaatgatatgggggaaaaaaaacaattccataactttctctcaaaaattcctcaagttaagcagttagactcaatcatgtccaaacaaatattatatattttaataatatataattcaaaatgatgttattctttcaagttttccaaattattcattaatggtctggtttaatttggtttgttagttttgagaagaaaatcgatactatttctttaatttcatttttaaaggcacaagaaaatagacatattaaatacgtccaacatttatgatgagatggcttattatcctcttctatgggagaaggcgagaagcaatgggcactttgcgtgtctgccgcagaaataacaactcgtccatttcctctaattcataccatacgtgtcgatttgtccttttgtcaaatcctctccaattaatttgcaaaaattaatatgtttattttaaaaaattaaaaataaataataaatacattacatttattaacagatagataagacaataaaaacaattaattatatattttgcgactagaatctaattttacaatttttgaataataaatataaatgtttactcgattaggataatttatagtttgtttctatttgtattttcattctaaaatttactattattaatattttttgctatagtaacagtcatagatttgacaacttttgtaattaattaaattattacaaatattttaaatttatagtcagagcttttacaattaaatttttacagcaaaaaacttatagtaaaaatctataatcatcatcttaattaatagacttcacagttcattagacatagttatcatcaatttcaaaataaacaatcctaaaaaaataataaataaataaaataaaccattttaaggctggagttgttaaaaccaattaataataactttttactgtataatcattattcataagttgaaaattcttactaacttttgttacctagaatatccatccattgacaaaaaaaaaaaagtattacccaaatactgtatccaatttttaaaacatatcatatgcctagtcatacaaagtattggtggattgagaacgtctaaatgtgggtcgcattgggacccaaaaaggtgattaggataacgagagaggccattgagttgatcaagttggatcgactttgcaaaatacaaggcaagtgtccatttggcttagcacgactgacacgtgtatcctacgaggcattccctaatttaggtgtcttttattggtccatactattttggtaaaaatgtaatcccaacttcttttgtattccggttatgacttatgtgtgtgggaatctttggatcagttttagataaaagtacatattcttgttggctgtttgcttctgccgtttagaaaaaaaaagaaaaaaaggagaaggatcactttttttttcttttgagaaggatcaattttataaatttaggatatggtaaaaaatatgaataagaagaaggtgacttttgacaattaaaactacactgatataacagaagataacgaacattggtgatgatgataaggtatatacgtagttctataactaatattttaatgcacaaaatgaacattattaaaataaatattggaatctagcaagaaagcattactaatgtaaaatatgaatttatgatacattatatttaaggcattttgtatcgtatgagaaacattcaacggttccactatgacccggtgcattgccaaggattaagcccatactatttttttgttttttttgtgggtagtcccatccaaccaatatatttctttttttgttatgaattagttacagattatttacgtaacaagttgagggaaattgtcactactgtgttgaattgagtagtaaatttgttgtaagacttcacaaattttagtataataaaagtaatgttgaaaatttcataataaactttggagaatgatgcataactgacaagtatttttgtgggttttcttattaagaaggttcgttagggaacagcccacctcgaacattgcccattactagttgggtcatgagatttctgaagagtggttgtagagaaatttctcttgtatgaggactaagtcatatgactataaatgggcttacaaaaaactgcgttagcccaaatttgactatttatagttcgtagcataccagattaaaattctacaaattaagcttataccatgcaagatttttgatgttcccatcccaatcacttgtttacatttttttttatcaaccaaaaatttattaaaattaactccgtaattgattgtataatcgaaatggaaagcgtttacaaaagtaacttaaaaacaaaaatctagaggatctagttcagtaatccgccttagaatttcatagttgacgaatatatgttaaaattggctaacaattatatagttcatgtttgttattaattttgttttgtaagtttgggttgataaatataggcgatcacagttgtggttgaaaaagaccacatataaatagttggggttgattttgggcgttttcccgtaacttagattatctctaatttaatttttataaatacaattttgacaaaaaaacaaaaattacaaatgcaatatgaatgatctataatgcttttacgttccctatttatagaggcgttggaacataaagcaaaaccctagtcctaatcgttaaaggaaataataaaccgtcaatgcaacctaaaacacctaatcgaagctgtaacttaatgggcaagtaaacaccaaaacatggcccattaaggatcgatgctacgctgcatcaatttgtagtgtgtttgatggtttttatttttattagaaacttacaccaaaactgaaaaagtcatatgtataacacaaaagatgaacaaaatagtcatattcattttattttacttttaaaggaaagaaaaaagaaagaattggccctttttctaaattgtcacgttatggtgtagggcctaacttcctaagaaattaaatgtagaaaatcctgaaaaatgattacgtttattgggtagaagagacagagagacgtggacgtagttggtcggagaatgacgagagaacgtgaacgtaccgaccaaacttaaatatgtgatctctatgaattataattttgaactcttacttgctccaaaccgaccaagccataacaacctttcaattttcaaaaagactaaatatggccctttaaatatgatcatatatatatatatgaggaaatgagagagacattatcttataatctgtagcaaactagcaatgaaaaattacactgtaacaaatattgaagtgttttactaagaaaaaaaaaaaaaatatatatatatatatatataagagtgtatttgtaactatgtggtatacatgcatggcatggagaaaaatccgttcttctatggcaagattaaatatagcaacataatttgatatcgtatgtaatcatattccgtatgttcagggattcgaatctcgtaattatcgttggtgattaatatctcacatatctttgtatttaattgatgagatacatctccttgtatataaaagttgtgtaatcgcgctctatgatgatatatataaagaaatatttcttcatctttcctgtcttcttcctttgttcctttacaacatgatgtttatttcatacgtgataagtgatttaagtaaaactattctgtgtttgaatctagtccagttgggaggattttttcttgatttttattttttttttgtcaacagcttgaattaaattagcttaaaaaggtattaactaaagctgttgacaaaaaaaaaaataaagtcctccaaactggactagattgtgaccactacaataatttgtcataattttgatgttcgctaattgcaaattaacagttacttttaaaggtttcaaaatcatttgcattcatcctaccaaaaagaacaaagtcgtttgaattcaagactgtatagtagataaagatctcaaaattagtttgaattttagtgtggactatatgtgtaaacaggggtaggtccaatccaacatatcaccagagttcagtatttgagacttgtaatttcattgtctgaaacaaatatgaagtaataagacaaaacataattggctggtatgcatgcacccaaataaatatcagccatgtgccactgatgaacttcttatatttcagaatagctctcagtcaataagtgtaagtgtactccatagttttttaccgaaccaaatgttttattttactatcatttttttaccttataatgcaaatgttttgtccactaatatcaagaaaaccaaaattagaagaatttaagtataaggttagagataactgatttcaaggtttcttatagatgttaggtttgcatgtgttggtttttgtgtttatctaagaatttatcgacatcaatctctctctttttcttttaatgccgtcaatgggaagacatatggattagtgtgtggcaggatatggaaaagatttatatagaaagaacaaaaaggaaggtaggaacaattaagtaatggtgcggtgtacgaatggtccaacgttgcacatggtaattgcatagatcgtatatatgaactgcattattgtctttgattctttgttcgtggtttggtaagcctagagttagctagttttgttagttctaatctatcttagcaaactttacgtccaaactatcaaaaatcaagctggtttattagaagaacaaaaaaatgatcaatgtattagaccaccatccacaattccacatgcatgcgtcgcttttaatccaactttttagttttaaacattcaatcgcttgtattgttttgggttggttttttggtattttttatgtttacccgaacgattaaaaattttggatctacgatttacgataactgatactttggttctggcatagtccctaataaattaggctcatatgtgtttggaagagtttcttaattttttttgtttttagcagaactattgattttttgtttttagcagaactcttgatcatgaatcatgttatactgttatggcctgtggggttggttatagaggtagatggttcgtatactgtccagacgtttcacgaactttattatccattaaccccacaaagattttagcgaatctattcccatccatctattgctattcacgttttgaaaccaaacaaaatgaaatccgaatgacgaaaatctccctacagattcccgccgaaatgttggaagaagactcacaaagaaggaaataataatgctgtgattggaacgatatagaaatgaaacgcatacattgcaacccaaagtaatttgaaccttagctcatgagtcatgacttgtgtttgtaaagttatttgcgaattgctagtattatttttacacatggaagtcgaacccctcctaagtgtaacactcgatgatttttcaacgcttaatatacaattttagcctggacataaatcatgtgtaaatatgtactactgtagtgtgttgatataaaatataaaaaacggaaatgaaaaccaaaaatatcaatcacaatgtttattattcattaaaatttccatgtctcgtaaattatgatctaaattagttagggctctttaagtaaaataaacaataacaaaaaaattcattttcataattcacattccctggttttctcaattatagttattaaaccgtacaatacaattgcacaaaagccttccagagatattacaactccaacaacaaacccaaagacacataaatgatcaatcaatagacaaagattcatctaaaaatgatccaacggccagaaacccattacgatgcaaattaaaaaagcaaatcacgaaaaattcatcagattaacaacgttgaatttgacgtcttcagtaatcggtggtaggcaattgctcgtgggcattttcatcgatgaagacaaagtcgtagataattccggcgagtccaccaccaataagaggaccagcccagtaaacccagtggttggtccacgtccagcttacgacggctggtccgaaagcaacggctgggttcatggaagctccgctgaaagctccaccggcgaggatgttagctccaacgatgaaacctatggcgattggtgcgattgttccgagactaccgttcttggggtcaacggctgtggcgtagacggtgtagacgagcccgaaggtcatcacgatctcgaagacgagagcgtttaatgatccgactccggcagagagaccgaacgctggaattggctgaaaaaacaatcatttgcaaaaaggtttatttacttgccggagaagttaggtcaaacgggttattttagttggaatattcaattgaatttagttttaaaccaaaccacaaaatagagaaacagagaatcgaaaatactactaaaatctaattaggtgtaagtgacgttacctcgccaccggtggcaaagctaaggaggaaacaagcggcgacggagccaagaagctgagcaatccagtagagaataccacggaggagagtgatgttaccaccgagtaagacaccgaaggtaacggcagggttaacgtggccaccggaaatgttagcgccaacagagacagcgacaaagagaccgaaagcatgagctaaggcagcggcgacgaggccggaaggagtggttgctccattgtcagtgatcttgttgaaagcaattccggagcctgagccggcgaagacgaagatcaaagtcgagataaactcagcgagcgccgccctaagtgcgttggggtgatagacctcttcttggactccaccaatggcgatgtttctggtcggcatgatcggagaaagatttaacggctgaggttaaaagctttttgattagagagagtgaagtgattggtttgtttttcttatgtgttgtacgtatatatatagccgagtgttttcttcttcttgatagttatagataaaatccatttctttgtcacataaacaaattattttgcatttttttaagggttaatttactgaatgaccaaatttgacatccttattaagagaatgaccttctcccagaaaagttgggtatataacgtttttttaccatgcgaaatatccgatatagcctctacggatgggcggcaaaaccatattcccgacagcagacttgtagatgtaggggagctagagattgtagggcaatgattacaacgtatcaaaaaaaaaaagcatgcattacttatgcagttactactaaataaagcatgaactatttatgagtgtagatctcaatttagagctttcattactacaactttctaagtttgtactgaacgtttcataaaatacatgcaatttacaactgcagcagcatgtactatgaaaggatttatttcattttttttttaaaaaaataatcattaaaaaacaaaaaaattagtattgaaatggagtatataccacgatattgggctggtaactttttcgggtgagtattgtactggattgattattcaacaaggtgaatgggcttttaccttgaatctatgaccagcagaagtactacgatttggtaaacagcacaagtactacggaaacaacatgtgatgttttaaaatcacaataatcatatcggagcaacttggaaagaaaacataagagaaaattattagaaaaattcccggatgtgacaataaaaagcgcgagcaaagagagatggagatacgtatcagacgcatttaatgcggcgtcagaggatatacagcttccaacgtaatatattgttgtatgtgtaaacccttttctttagtgtagcactttttaacacaaggtttgtgtgcttatgctatacgctacaaaatggcaggtcgataagttgacacgttggtcaatgacgtcaagattacgaataggcaagtgggggcagaagatatactgaatctatacctcggttcacggaaatgtgtaaagcaaagactaagtaaatcacatggttattttgacgataacatgcaatacaaataaagaacacttaacacttcgatttgacattggttaattgtgtaaagcaaggtttgtgtgcttatgctatacgctacagaatggcaggtcgttaagttgacacgttggtcaatgacgtcaagattacgaataggcaagtgggggcagaagatatactacctcggttcacgaaaatgtgtaaagcaaagactaagtaaatcacctggttattttgacgataacatgcaatacaaataaagaacacttaacacttcgatttgacattggttaattgtgtaaagcaaggtttgtgtgcttatgctatacgctacagaatggcaggtcgttaagttgacacgttggtcaatgacgtcaagattacgaataggcaagtgggggcagaagatatactacctcggttcacgaaaatgtgtaaagcaaagactaagtaaatcacctggttattttgacgataacatgcaatacaaataaagaacgcttaccacttcgatttgacattcgtgaattgtcgcttcacgcctccctcgggtgttgggagggaaatcataccgttttgaaattcgcgtggctgcaaatggttaagcaactgttactagaaatatctttagttactgtagccctaaaaaacaaagttaaccttttctataaaagaagaaagatggcaagatatcatctctcacacctctacttcttcctataaagcacacactacgtatccaacaacatcgaagaactcgatcatttctgttttggtatgcaattaatgaatgttcttttggtcgggtttgttgctatttttaaaaaactcatggttgatttatctctatttaatgcaactctattaatgtgtaggtaccgatggtggttataaccgaaataaccgacgatcgttatgtcaggacggtgagtggctcctgggcaatcggagctgatggaacatggttattcatatccaatcacaataatgcagtgaggaggttgagcattggggaaggggagaagttagcatctgtgcgccagcttgttagagaagcgtacggacaggaatacgttgaaggcccactacacctgacttaccaatggcctgattggatggacatggaaactacctttggtgggcgcacgaagccagtaagcataacttcagaggagacaatgggagtgtttctagctatgcgttttgagttggaggacttgagtttgtttgtctccaagcaaacggtggatgatggttccgaagatggtggaacaagtcagacttcaagttacggatttgcagataaaggcaaatcacctttatacgtcaacgctgaacgatcacctaactacgagtccgttgtgtggaaaaggcttatggatgacgaggcggtcctccgctggatgcgttcaacggaaacagaaggtcaaaacgttggagactcttctaccaacgtacaacaacaccctgtgagaccagctgttgaggcagcttccccgatgttaacgactgaaagtatggacacagcgactgaagatggagatcaggtaaaatattctgcgtttattaaattcagccactcgaatataccattacagtactaagacatctatttacgcaggaagaagactcaactgttgttgaggcagatttacttaaaaatctggggttaccgtcaattaatttagccactgaatcttacgactctctcagtgaaggggaagcgtacaacgacgaaaacgactatcccgggggcgagacaattaaggagtgcaatttttttgggccttccgcaactaacttggtggaacctctaggtgtacacttggatctcgcggtacctctgcatgaggctcttgaagacatgtgccttaacttcgcatctttcaacagggatgcagcgccaaccctagacgaacaaggggaagaaggtaccaattacatagcatgttgtttttaagaacaacacatattgcaagagtgttctaataataaccgtcatatagagtaacatgttattcgtataaataccatgcaataaaaatttaatttcgctgaattcctgattagtcgtacgaatacaatcttaatatccacatcatatttgtttagtttaaataacaaattgtatttaatatcatgtaatataatgatatgcttacaaaccaacacatggtttcaatttacgttgatatccctgagatatccctaatcaaaatatagagtaacatgctttaatattgaacatcatgggatatagatattatgttggtcaaagtgttactatttagtcatacaaatacatgctttctacattcacaacatgtgtacagtgtaaataacacacgaactttattgttgtgtaggccgcgtcggaatggaattagcaattcgggatgtggtctacgaaggtgatgaactgtttgttggccgggtattcaaaaataaacaggattgcaatgtcaaattagcagttcacgcacttaatagacggttccatttccgtcgtgatcgttcctgcaagaaactaatgactttaacctgcatttctgaaacatgcccttggcgtgtatacatcgtcaagctggaggattctgacaattaccaaattcgaagtgctaatctcgagcacacttgcactgtagaagaaaggagtaattaccacagagcagcaacaacgcgggtcataggcagcataattcagtctaaatatgcgggcaacagtcgggggccaagggctattgaccttcaacgcatcctattgaccgattactcagttagaatttcctattggaaggcatggaaatcaagagaaattgcgatggatagtgcacaaggatcagctgcgaatagtttcactctgttgccagcctacctacatgtgctgcgcgaggctaatccaggttcaattgttgatctaaagacagaggttgatggaaagggtaatcaccggtttaagtacatgttcttagcattcgccgcatcgattcaaggtttctcttgcatgaaacgagtcattgttattgacggtgcccacctgaaaggcaaatacggtggatgcctcctaaccgccagcggccaagacgctaatttccaggtttttcccatagcgtttggcgtggtcgatagcgaaaacgatgacgcatgggaatggtttttccgtgttttgagcaccgctataccggatggagataacctgaccttcgtctcagacagacattcctccatttataccggtcttcgaagggtaatccttaaaattgataattttaaatgttacatgttatatacagcatatggctcttatttattttagaacacatgctatctaccaatatgccctgctatatacgtataacacatgttaacatgcaggtctacccaaaggctaagcacggggcatgtattgttcatctgcaacgaaacatagcgacctcatataagaagaaacacttgctgttccacgtgtcaagagctgcgagggctttccggatctgtgaatttcatacatatttcaatgaggtgataagactagatccggcttgcgcacgatacttggaatctgttggtttttgccattggacacgcgcttatttccttggggaaagatacaacgtcatgactagcaatgtggcggagtctttgaacgcagtcttgaaagaagcccgtgaactaccaatcatttccttgttagagttcattcggaccacattaatttcctggtttgctatgaggcgtgaggcagctagaaccgaagcatcgcctctaccaccaaagatgagagaagttgttcatcgtaactttgaaaaatcagtccgatttgcggttcatcgccttgacaggtacgattacgagataagggaggaaggcgcaagtgtctaccacgtgaagcttatggaacgcacatgctcctgtagagcatttgatttgcttcacttgccttgcccccacgcaatagcggctgcagtggctgaaggcgttccaatacaaggactgatggcgccggaatattctgttgaaagctggagaatgtcttacctaggtaccataaaacctgtacccgaggttggtgacgttttcgctttacctgaaccaatagcctctctccgcctcttcccgccagccacgcgccgtccatcgggacggccgaaaaagaaaagaattacttcaaggggggaattcacggtaaacgttatacatttggaatttactgtaacacccttagtgttttaaattcctaacaattgctcaatcttcatctcagtgtccccagcgacaagtaacacgttgttctcgttgcacaggcgccggccataatcgcgccacgtgcaaaatgcccatataaaggtacaatgttattttataccgtatcatgctatagatagaaacaacgttcatacaatttttataatatcatctgcagggggtgttgtgtctcgcgtcttcttcatgagttatatgttgtgttatataagcaaggggaagtccatcacatatggatattatgtaaaaggaagggtcacttggtataatgtacatattagcaattagatgtggcaattagggtggcaactaaaagctacgttgagaatgcaatcaagggaccccaattccagtaagtgccgtatagaagaccaccttctacggacaaaggataatgttctgttttttggcttttgtgtagaaaaaaactttatgttcccccttttgtaaacagactcatgatattaagtaaagacgcgagtgtttaattattaatacgtggtgtaatgtaaaattcagatccacagacaaggggttaaatgaggaaatatatgaaacaaatataacgaatagatatagcaccattactggcaaattaaagtccataaaaatgttcagccatcatgaactgacattttatgtcaaggattccaacaagatgaaatcattccaaccataaatcaaaataagatgctattcgagaaaaccacatgtgatgtttagcaattgcgtgaggtaaaaccgggcaccgagagttgaacagttccacataggattccttatgccacttcgactattttctcagaacccaataagtgcttctgcaccacacatttcaccccccaactacgccacataaatgagtgaatatatacactaacaatattggactatatatacatattggctatcaacatctccgtcaataataaaacgtccttcggcctacttacacatgcttgcaagggtagaaatgagacagtatcgtcagaatccagtactcatgcgggtgggtgggctgttcagaaaacaatttgacgacgcattggaggcaaataacccggaagcacattatcttgaagggctaaggtatgcttgttgggagaaagatttagtcatggcaaaaaaacacatttttaaagctgtaaacaaggtagatgaggcgctgtttgttatggctatgttgtctatttgtggtggtgagaaggagctaggtgaatttttcactgaacaactgtttgccctaccttgggccgaagtattagctatgggtgattctttattttcagctcttgaacgaatggctgtgcgccatggtacagcttacaagcttacatggaatggggcccatcctccatgtgtatcaatccacaacatatataatagatgcgaagagtgctacattttcttttgttcaaaagaattctgtcggcgatgttagatggtacaagctgcacccaacgtggaaatctcgtaaccagaagggaagcatcctttaaaataatatgctgttattttatattaacccgcgtagcatctataaatcacattctgtttgtaaaaagtacatgttttatgtctaatgtgttagtcgttatgataatggtgtcaaataacgatattacattaaaatggcgtgatatgtacctatattacatgttttatattgactttttgatcatgttaatctgtctaaggtgtataatccaaaatatttttaaacgggtcattattattgcaaagtttacaaccgggtaagtcctaaatatcaactaagccacagttagaatgcatctatatttaaacgaatcatgaggtaaatataaaacgcacggtacatattagaattgcagtgacatatgtttactacacaaaacaggtgcatagaaagaacattaggtactcaactgttaggtgtctaatatattacagagtcaggtaatagaaggtaaacacactagaacatttgggtcagacaatcccattagctaattcaaaaccggcaatgaaatatttgttagcagcagtcaccacatcagcatgcttcacttctttgcaagcctgaatcccaccattggcatgggcttcaattaaacgagctgccatgactccagaatattttacagaatctgcctgtggaatatcattttctctgtgaaccgcaagagatttcaaacgaagtttcttttccccagccattttaatagcaaatcgaaatagatatggtaacatttcagcaaggggcaaaagcactttcttcaattttgtttcacgccataatcctgtatagcagtcgaggacgctaatgatccttgcactcatatcaacacaaagccctacccaatgctgtaaatcaatgagaaatggaatgtagaccacagcagaacctgtaggggtacattcaagtaggtcgtgatcaaacccatacattcccttatcagcagacttgacgaattttgggtaatgcttggataattcaaccacaaatgttgaatcaatgaatgaaacggcttggtgcttttcaatgatattatttgcacaccagttaatccttatgctattaatgaagatgtccataacctgtaaatagagtagaacgcatattaggtgtttaaggcaaaccctatgtttatagagcactatgtaatcttttttacccacatgatatttatcataccattttgggtacaacggtcttgaactcaacaatctcacgcaactcaatggcggaaagtgttcgacaagccccaaaatcaatgtccctaataacagccatatgcataagttttaagtaatatgagtcaaacaaaataaaatagcataaggttggaattaatacccagacatgccatataagcgatttatcttgttcttacggctaacatcatgcccaaaagtaacagacctaccgcttgtggaagaggctattacggattcatgttggagctgtgagcaacgtaaacgtgattagaaaatcagatgttatcttaataatcaggaaattagagtttgcataatcctaaacattctgtgttaaacttaatggcatgtaatttgttctaaaaccttgatgtttgtacgggcaaaacacttacaatatgacaaaactttttaaatatttttttgttatattaggtaaaaccctgaaccatgctgaaaatacatgatgtatcgcaaaatataaccgtgtgcatattaaaccagtgttttgtttttaaaaaccatgaataagtaaacttgacctaccacaaaactacgaaatccatatttaacaatatcttaaccattcatgcacccaaactagacctaacacaaaactatgaaatccatatttaacactagctaaacgcatttatgcaaccttgccatcagggtccacaatatcatttgttggggctggcagggacggttcagatatcatcggcatttggcttaaattggcctaaaataagaaacagttgcatgtaattagtttgttagtggtaacgagagtaaaaaataatgaattatatgatctaacattatcggctgtagcaggtgggtcagcaagtccttctccatctttatctgaagcaccgtcatcaaccattggcccgggggttgacttacattgggcagtcaaatcagactctatctgcaaggcaaacaacagacgttagagccaatacacggaaaaaaaaaaacataaaaactatatgagaaggtttgaactcactatgcatgggatggtgtactgcaactctggctgacctacattgtatgcaacaccatccatgtcaacaagcaccacatatggatcagggaggctgggctcagattcaaagaactcattgacgtctgtgggaggaggaagcaaacactgagtatgactcgctgcagctggaataggtttatcagggctagtttggatatcatcaaggccctctccacctatcccatcaccgggggcatcaaccaagatattatcttgatgggatacagttttatcaccagaaacagacttttccgcaaacatatcgtctaattctttagccggcagagtggaagagccaatgtcatgaatcccatctctagctgactcatcctcagtggtatcagtcaccacccctccaactttgttgatattgacagcttcaggggatacatgtttatcagcagaaacagacttttcagctgaactgttgtctactgctggcgtcaggatggtggctgctgttgggccattgttgcctctcttccgtttctgtttgttatgaaaacaatacttgaattaggaagaactctcataaaatacagaatatttacaaaactgttaaacgtataccagagaactacgcaatccaggcctagtcggtggggataagcgacctatgggggttgtagtctgtgtaggttctgcgtcgttaatatcatgcatcacttcacctaagacttgatcaataaatccagaaccactgttctccttcgactgggctaccctgccattatccaaaacaacaagggaggatcccttcttcccacctaatccctcacccacatctcttgacttaggaccactgtgacgcttattcttcctgccatggctttccctcaacaagctgctcaatctagcctctgaatcagctatagccttcaacatacgcgactccatacgcttgtctttcatgtcaatgtaatttttaatcgaatctggtatgtgaacctgccctttagttttacggggtttagaagagccaggcaaggaagcatcaggttgtatggtatcctcatcaacacaatcataagtgctacatacatcactgttgtcattcctttcatcgggtagcgaatcagggacaacaccacctgaaaacatggaccccttgaatatgtgctcctcttttattagttgcaacatgtagtcaacagatagatcttcttcgtcctcgacccaacctgacttgaaagcgtcaccagtcggtgttccactccaaatagaaacgactttaatctgaaaaacaaagagttagactttagccacatgatattatgttttattacatgtactaaaagtatttatactgttactaacagtgaaatatagattatgtacccatgtgctccttaaaaacaacatgttatttcatcatataaccagatgttgtaatgcataccgccatacgtgacttactaaggtaacagggtatggttattaaaaagaactgtgatcatatttaaaaccatgcagtttttgcataaatcatgatataaataataaatagtaaatcagcacatattaaaaaaaaacttaaccacatgctacacatttacagccatgttatgattattctaaagaaactgtgatcagatttaaaaccatacaatttatacagaaatcatgatataaataacaaatagtaaatcaacacatattaaaaacctaagccacatgctacacgtttacacagaatgatatgaatctataattgtatgtttttgataggaaaagaagaggttttcatgataaaaacgagcatatgaaaattaatttacgagagcagagatgcattgctcacctgagactgccggtcgactttccaaacaagatccaacttcaaactccataagcgctcaatttccgtatctgtttcctccatttctgagtcactatcttcaacggcttcagggaattgcaattctctgattcgaggaacactttgcagtagcaaaagttggagtgcgtgtgggaaaccttgaacggtgatagatttccgcataagtttatcagctccccttgcagtaacactcttcaacgtcattaggaatgacatagtcccccaaggaaaatttagaaacatgtctaaattttctgccatgtccgcatggaccggagagattttacttctacccgaggttgggcataaaacgccatcaatcaaggccagcacagcgtaacgtaaacgaattccttgatcttgaaccactcgcttcttcagcctgccaacaacccactcaacagatacatcactgcggtcaaataggctgtaccaatacttgccaggcgccaattttcgtttccctttcctctctttcatacgaggcggtttgtcgcagttcaaaccggtaacattttgaaactcagaaatggaaaaccgaacaggggatccagagaaaattacccaaatttcttgtttcttcctaacaacaagctgcctcgttagcaaaaagtgaataagcttcccagaatacgcggcgctttcggagaaatcaaataatttcccaaactgagattcccggagaattttcatgtcctccgcatctaacgcgttagcgatgtcatctatcaaagacagttcactgtaggactgcactctctcaccgttgggctcggatccagacctaaacaatcgacggggtaaagagttgttcatcatctacaagtcgaacccttttctgcacaaaatagaagtttataaatcagaaacagtatgtacctaagatttcagttaatcggaatatagattggagaaataaagaagttgatggcgatcgagaacgttgaatagcttaaaccgcatatatttgtgaaattacctgtagcccgatggaattgattgcctaactgcgagattgaatctaaagaaacgatatgtatgagaaacaatatagatttgaaatagatattcggagagtttgcagaatctatgggtagagaacggaagacgtttcctctcggaaaaccagcaaatgaagcggcgctaggtttttttttggagctcctgatatttcaaaaaattcgataataaatcgatttctcgaaattaaaatctatatcgtttgcgtccacatacagcattgctcttaccaaggttttcaaaattcaaatttctgcaatcatacgcctatacacctatatgtcccctaaccaagaacacagttatagggggttgcgggtaatttcagatacgtctccgacagacactatagactcatagttagtttctatattattattgatttcatggtcatctagtgcatataccctttttttaatcggctttattaaggtcctgaatgaatgctcattttttatttagtttttgaatttagattttagtttatagattttagattttagttttagatttttgttattatatttttgtttaaaaaactccaaaattttggtttttgatttttgagaaaaataatgttgattgagtaaaaactagattttttaaattttaggagaactaaaaaactaaaatcatgaaaagaaaattacaacaaaatagtttttataaattgtagggaaaccaaaattttaaaatcttgattagtatgaaaacaagtttttgaaaaacaaaaaccaaaaactcttacaaaatctacaaaacattcaaggcctaaattgttttttatttggagaacaccaatattacattcgttgcaatttgaattgtaacaaaaaaagattttggactttacagatatttgaaagtaatttttgggaaatgttaacatactaaatatatatgttgaattgtttatcatagttacatgtttaccagttgtagtagattgccaattctaaaatggtcggatatatcttttgtatagtatacagtaccaattatgtaatagatgaaagggattgtatttttgttccttataccagttttattctctttgatactgataagaaaactaaataatgttgctatctattacatcattgatcatatcctatgaacttgtccaaaaaaaaagaaaaaaagaaagatcatatcctatgaaccaaatgatcattttaaattaattttaattagatttctattaataaaaaataaaaagaaaaaaaaaatatggatatgactttagaaatagtcatttatgttcccagttttcacaataatggatccgattggtaaaacatgactgtacaaactttttagttgttagttgaaactatgagttttttcgaaatactgtaaagctgtaaaaaaatgaagtgtacgagaatactgtacaataaaatggagagtaaaattttttgtaatgattttaataaagtttttgtaaatgataactttcaaaactgtaaactgtataaattgtaacggtttgataatgggttaccattcaaagccaataatttaaaatggattagtggtccattaattgcataatttaaatcaaagatgcaaaatgttagttttttaattcgtaatctttaacggtaatatatgtactatctcaatggttactatttctaaaaacaatagtttgaaaaaacaagaataatggaaaaggaattcaaaataaataaataactacatgtcacaattcagaccattataacatcgaaccagaccaatatacaaaccggtttggttcaaaccgcgacgattagggacagttaatgaaggagatgccacatgatgtaggatccactttgatcacgtgtcggtcgagataaggtcagtgaatggattacagctggatttgtcactgaccaatcacaagtgccagcctgtccttaccccttccacttttatgaccttaacctttccttaatttcccccatgtttttttttctggtctatttttgttttctatctaatttttgtagatttgttttttcttaattaagagattcctaagtttaaaatttatactgattcctaaaaatccataaaatatttttactattattattagtgatcaaccattattggcattgcagtagaatacctcgatttttggtgtttcataaaaaaaaaactatatatgtctttcttttgtttctctcaatcttcttatatataaaataatgtttttgaataagtataagttttaagaaatatagtttggtttaattagtcatggtagattataaattcgattgtgattataagttatgtgtcatctactcatcttggtatcactctttgataatgataaccttatttgtcaccaaatggttttttttttcggctatcatctaaccagtaattattattttttttaattattttttaaaaaacaaggaagtttggcattagataaatattgttttgaaaccaaaacattattattgaacattgtcaaatcaaactaattattaaacaagaacgcaataatgtggacgggcctgtggagctttttctccattatcgccggcctgacaccatggccggtggggattttggacctctcaagttctcagacattgacattgatataatttatcaaatcaaatatagtgaaattcgaatatagcctttaaagttgtttacaccatgcataaaatatggtgatcgttttcttttattataaaaaatatggtgatcttagaactgacattaacgttgcggaaaatatggtttgtgttgaacgaactgtttgtgtgaaagcgaacgagattaaaatgttgtagataatactatcaaatattaaaatttttgataatttttttgatatttaagtacgttcctttattgaatgttttcgagctaagaaagctatcgctttgtaccccatcatagttgttgtgtaataaaaacaaactacagtacatatttttctcttgatgatttgaaaaatatcttccaataatggtatagtatatgtgttttttttttaaatgtgaattttgatgtagtaaacactattcacttttctgaatctcaacgatactgtaatgtggatcctaaaatggaacatcaattattttaatttaccaaaaatatatattgtcatatttctatatgctttattagttacaaggctccataaattattgtcatgttgcaacgactacatcattttaatatatgaactggactaataattgtgtcagcagcttaagttcggtttatatattagctaaggcattgttagaaagaaataaacataggtacacagagacaaacaaaaaacttgactgaatgatcagaaaaagaattttgattaatttagaccgcttaacgccaaaaataatgctgaccacttcgttacaaaattgagatgaagaatatgcttttaggatatgaggctaacaaaacttatgctttcattatgcatcataactaacatattagttccaaatataaaaaataatgagagcatttaatcattttatgaacttctaatacgttcttaagctaataaacaagaaaacaaaaggtcacggtcacgtatacgtgcaccacgtgtaagtgtacatttttggctctttaaagtttagatagggcttagaaaaactagagttgtttattttatgggtatgttggcaaagtagtcacttttctgaacttaattatgaaatagggcaggttactatttataattagggaaacaggtaactcacttttcctatctaatagaagagcgtgtaatagcttgtgtggtagggtagtgtgggagttttgaaaattaccaaaggatccttttggttgaggagagaaagaaagagaaagagatatagcgtgtgagaaagagatgtgggtcaggtttttctttttaattttctttttctttctttattatatttctttccctcaaagtttagtaattcaaatgctcatttgtaaattttatttttctaaaatgatttatataaataaaaatctatgtttctttctctatcatttgatatgcattttgtttaatgatttttaaattttatattactgagcactatacgaataatatctacacagatatagactgctgtacagatataaactgctgtacagatataaatcactgtacagaagaatatttattcggaaacttatacttcttaaaaaaattttagatataaattactgtatatatagagactaatgtatatatatgattactgtactcatatagaccactatacagatataaaccactgtacagattgatgcatctgttaaacgaaatcataatttactattaaacaaacaagtatcttctgtacagatgcatcatttgtacagtggtctatatctgtacaatggtttatatttgtacactagtttatatctgtacaatagtctatatttttgtacagtgccctataatataaaatttaaaaatattaaacaaaatgcatatcaaatgatagagaataaaacataaattttatttatatgattaattttagaaaaataaaatttattaaaaagaattttaattattaaactttgtgggaatatggaataaagaaagaaaaagatatttttttaaaaatcataactcactaaggccccacacatttctctcccacccaaaactaccgaagaatatggatccaaacacagtggcatgttggtaaatataattgtttctatagagtataatagatgttttgattagtggggtaagaggagagtgactaattcaccaattatgaatagtgaactgcctattttgtcaattatgttttaaaaagtgactagttcacaacttattccttattttatttatatagaagacacgagaaatgctgtagaagtggtcttgtcttatgggttattaacttattaaaaatatcactcactttttttgtccaacacaaaagtttatatatgtgatttccttatcaatcattgattcgagaaatttcaacaaatctctataatacagtacatgttgagtctactttataagatgttaaattatttctaatgaatataataatgtagaagacggtttttgttttggaaccaaagttacttttcttcatatgaattaaatgtttaaattattttatgattgtttcttgtagtttgatgggtgtgtgttttcaccgtaattgtttggtttagaaatcttaaaatatgtcagtattatgcaattacatctaaaacatattgaaacgatcgatatacacatgtggaggtgcaaatgattgttagtgaaatatttgttctatactattattaaggttatataatgttatgttctaacgatactagaaatttatattttacattttatcacaactcaaatttaaattttatttaacgtatattgttgacgaagaataatattccctatttttttcttttatcatttatattttagaacatattgaaacaatatcatatatatcatgctatatatatgattattggtgataaaaaaaatacttactatcattcagattgttatgttccaacagtactagaaatttatattaaaactgctatatattttattacgagttggatttaaatttgattaaatatattttgctgacgtaaaatactaatttgtttcctttttttatcaaatatattttagatgaaattaaaggaaggcgaaaaaaataatagtaatcaccaaacagataacgttttatacttctatgtatacgtggtggacagcaaatgatattagaatactaagaatgacttggtatatggatccataatagtaggatcgacaataataggtacaataaacagcattagtccaaaagaaatggttagtatgtaattgtcacttaatattaatgtcacgataacggcgatgactagtctatattattattctttcatttttaatatgcatatttgttattttatataatgatcaatcaaattgtaatagcggatgattagataaattaaacagaacaaatatagtttatgggtaacgaacagatcaaataaaacaaacgatccagaacaaccatctccaaccatatatcacattctttttttcatttttgtgtagtgacgggtaaatatcatcttattatgactaccgtgtgagaacaaagatagtattgataaatgaaaattggaatgatccaaaagtataactttagatatatttataataaaaataggtgagcttaaaatcattcatatgaatttgagtaaatatattttgatattgatatcattcatgaatagcggcatctaaaacaaaaccaatcaaagagaattgttttttttttttttttttggtttctagaactagaacgagcatgcatgtaagtggaactaaatacaactaaaatatgaatatcctcgagaatagatttttcgaaagaaaaaaaaacttcgaaattgtccagttttgcaagtttaccatccaggaccaaaaactacaaaataatcatataatacgcaatatatgattattaaaataatacgcaatatagtcttttatatatatattttaaagtttttacgatcacatacatatatttttaaaaattctgaagatataatggaactcctcgtttcaagagctttaatttatcaaaaaatttaaatttgacaataacgaaaaagagttatattgtgaattgttttaaactttataagattgttttgcagtttttggacacggaaaataaaattccaaaaatgaatgagtttttttttttgcataaaaccctcaaaaatacgattgaaagtactaatttatacaataaagaaaagaaaaaaaaacatttgtattgatgaaaatattctaacaacataaaaccttatattaaaaaataaataaaaagaaaagaataaaaatcaactcttgtaattcattctgaggtacaatggagttttttttttgttttttttttctttcacatggagttaaaagtcgaattaatcaaaaccatcaacgttaaatagttttgattaaaatcacctaatttgtatatttggatactttattgaaaaggtttctgcattggcttaatggcttatatagaaataaaatgtcactttaacacttgtataggacatcagattattggtcttctgattcgttttgatgaagatacatcatcgtctcagggcttgcttgtaatacatcagacctctttaattgtcaaagactgaaaatacaaacagagattacagaaagaagtgatgatatatctgataaactggtcacagaaatgcgaaaacttgagatcaaacttcatttatacatgcaatgcatgagagtgaataactctaccttgtggacttcattttaatggaagctgaatcattcaaagcttgtagctgttttcttcacggaacggcaaaagaacttggtttgacatttctactaactgatcacagaatttcgagaaacagagacaacttatacctcaacagctacactgattccaatttaggaatacaacttgacaatgatatgaaacacagtggaaacagcttaatacttcacctaaaatctgtaatttcattccaaactaaggtagtgcagttttgagtctaactaatcaaaaccatatcaacgttcaatatgttttagacaaaaatcaaacaagtttttacatttggatactgaatcgaaaatgttttttttaacaaaagtaggacatctttttcgtctcaggacttgcttgtatacatctgacctctttgaatgtcaaagactgaaaatacaaacagatattacacaaagtaatggtgataaattggcaacagaaatgcgaaaacttgagatcaaacttcattaaaacacttgaaagcataccatatccgacccttcaaactttcaatgcgaaagactcgcgctcggttttggcgaaccacgacgctggtactttttcggggtaaagctagatccgtttaccagatatattactaccatattcaaccaagacccattaactttagatcgagacacaaacagttcatctctgttacactttgatcaggaatatcaatgtccatggaggccacgatataagacctgcactcaaccatgaatattgaataccattactcaatagaacaagaacagcatgaaacacaaagagcactcgtatcgctaaatgaaacatttaaagaacattatgtaaccacatatactactaattcaacacggcattgaaatgccacaattaaaccattgatatagcttagaaggctaatagctcacagcttgattcattgtccctatattaaatcatagtcacacaatgatgaatttgttaagttttagttgtaaacttcttagagtagaacaaccaaatcgtgatcagttatcagatatgtcccagctccaagctacaatgcatagcctctatatacatgagagtgaataactttaccttatggactccattttgatggaagctatatcgtaagcttggagcttggacatatctgataactgaatcacgaaaacaaaaaatgtgatcaatgtatacaaagtcaaatagacagaactgcaattgtaaaagaagagttaagaatttgtgattaccttccgaagaaaataaaatgatttggagagtcaggagatacaaatgatgtctctctattttattcacgtcctgtttcaaccgcttcattcccgttgctcttcctggtcttcgaaagacaacggattttgtctgcaatccttctaaatgcataagctccgatatgactgcaggagacaatttctttgttttaagtcattcatggtggctgaaggtaatgatcattcataagccgtttagcagcccatgctcctaactttgaccagcggtatctttggcaagcatcatttatccttgtcaacatttgcataggtggatcaaaaggcatcaagaggagaaattcttcaagctgatgcaagcatccatacttgcagtagagttcaatcatacaatcataatgctcaacctgtggtgatatatgatatttggtgctcatagaactgaaatactgaaaaccgagttcgacatgaccttcacgtatgcaagcttgtaagattcccaaaaaggtgacatggtcaggcttaactccttcattttccaaaagcatgaacaactcaaagacctccttgcttcttccattacgacaacatccacggataatagagttccatagaatcaagtcccgtgtagctgcctctttgaatacttcgatagcatagtcgaaacatcggcatttggaatacatgtcaaccattgcaccccgtataacaacatcaattttatagccatctctgatcaggaatccgtggattgctttgcctaaatttaaagcaggaatgttcgcacaacctgctaagagcgttgccagtgtgtatttgcttggtttggcctccacttgcatcccttcaaagaaagataaggcttgttcactcctgccaactcgagctacaccagtcaataaagcattccatgaaacctcatcccttagttcactcatttggcggaaccaaatattggcactctgcaaggtcccgcattttccatacatatcaagaagtgcattggctacaattacattcgtatcatatccatgtcggtagataaaaccatgagcttgcttccccatttgaacatctgatataccagagcagacatttaggatccacacaagagtgacattatcaatattttcaatctcctggcgcatcaaagtgagaaaatccagtgcctcatcccattcatgggcatgtacatatccgcccaacattgcgttccatgagactatattccgttcaggcatcaaatcaaagagctcccttgcctctctagttaaaccactcattgcatatcccgacatcgccgaagtccaagatttcaaatctttagatctagtttggtcaaatactctgcgagcactctccaatctgtcacattttacatacatatcaaatacagaagtagaaacaactgtatctgccacaacactaagtttcacagcaatggcatggattacctttcccacctcaagggccaaggatctcgaacaagctaacattacactagaaaccgtgtgattcaaaggtcgaacattcaactccagcatcttgaaaaacatcaccactgcctcatcattaaaccccatctcaagataccgccgcacaatcacattccaagatacatcactagggtttacaatctcatcaaacactcttctcgcatcactcatcacccgacacttcccataaacatcaacaatcgaagtctccaaatctacattccccgaatacccatacttcaccacagcacaatgcagctgcctcaataatctcaagtccaagattaaaccacatgactttaaaacaccagcaaaagaagtctccgtagctcgtacgccatctctattcattctacgaaacatacgaaacacctcatcagagacaccgttttgcgcacaagcagtaatcacagcgttccaagacccaccatctcgttcaggcatttcctcgaacagctctcgtgcatcatcaacacacccacatttaccataagcctcaatggctctgttcaagaggaaaatcggaggcaacggagagaaagttactaagtgagattggactttacgggcttgcacaacaagagctttcgaggaacaagaacggaaaagacgctcgtatagccaataactaactggctctggagaagcaaagagaacagagacggctttcgagacattaccgccttcgagatgctcaagaatctgacgggtcactgtaagtttggttccggtgccgataacacgcttgtgggttttatcttgtttgaaaagacggccaaaagcagaagaaactccggtcactgccatggttcatgacctcaaaggttgagactttaacagatcagaaactaaacccatcaacatttcttctactatgggtttagggtttaaaacgaataggctcttcaatttctgtttaaaatcaatatgggcttttagtgtcggcccattaagtatgtgtttttttaaaacgaatagactcttcaattgctgttttactaagaccgatcatatgcttaaccaaatttcaagttatcgtatttgtttcttgtaaaactatatattaaaatagattacagaaaatgaaaaaaacaaaaacaaagttacatctcataatgaaaattacgacagtaacaaaagtgaaatatcaatatacttcacattaactccaattctacgatagaggaaaaaggattacttgttggatgctcaaacactgtgtcgccatatccaatacactcccaagaacaaaagattgtgttgtagcctttgaaaactattgggaatagacaacggcgcatacatccggtgcatattggtcgggagagcgaactgttgagaaagactcgaacatctgtccattgcgtaccttcaattcctagtgagtgcttagaaatgtaatcttttacactattaccaggtttcatgtacatgtctctcccaagtaaacattcaacatgaagagtcgtgcaacagtcattgcatttataaaatcgcatttctcgtcttttgtcccacggagactctctttcttttacttcttctattttgccttcgcaaacctcacaccagtctggttcatcacttgcctttttcccatcgcgaattctaagaaaatgactgtcgtgcttgtaccttaccttgtatgggaaggtagcgcaacgaaaacatataatataatcgcattccatgcaatttaatttcgaatagcttttccctttgcatatttgacatcgtacctttttctctagctccgaagctatgcataagggatgtttgtggcattgatattcaaatggttcacgaatcgaggcacatctcaagtctagccggaatcttctttcgcctatatgatgttcatagaagaagccagtaccatcacgaccacaaacattacaatggtatacgccttcgttattaccaagctcctttgtggcaacatttagagtaagtggatgtggatgtaagggatgtcgtttcatgcgtggagcatttgcacaactttcatggaggatgaagtcacattccatgcatgaatagaactggccttcgtagattgggaaagaacaccctcgacaatacttattttcatcataaactttgctgatctcaagtcgtagatggtgactgtgatatggatggagtattactccatcagatatcctctcaaatggctcaccatcatctattatatcatcttcttctgatacaccttcgagttcttttccatcccacacatttctatgaaatgcacattttgaatgaacaaaataagcatcacatttaccacaagaatatgctccataattgttgtcaacacgttgatgacaaaccccacaagacaaatttccatatggtagagaagaggcaaaagagatccggtgttggtgacgagatattctaatgacatgtgggtaacccatacaatctttatggatgacgaagacacattggatacaaatgtatgtgggatcaagcatcttaacaaggccacaaatattgcaagccaaagtagcttgtgtagggaaaaaggtaatagggtggggatggcttttaggatggtctacaacaaagggtattggttccatagcacaaatcgggtccatactcaaatcgcatgtcacacaatgataaaacatgttagacacaagtcttccacaacaaatgcacaccatatgtgttggatgactataaagtcgaagagaatgaaaagggtgtgaagggtgtttgatctcaagtggagactctacacattgcttgtgaaacttgtttccacattcaagacaagcataatagcttctgctagtctttgactcttcacatccaccacactcgaattcattactatcaggggttttattgttgcaccaaaacagagggactacagggaacttacagatgttatggtgatcataatcaagtaaagattcgccttgttgataactggttcttgttcttggaaagtgagggtaagaattgaatggatgaaagttgaaaaagttaacaccatcatagttcttctctactttgaacttatgagatctgatacgtgcatagggacaagaaaaaagaggttggagaggaaggtcatcaccactagactccacggcggaagaggttgggtgttttgtttgtgttaatgtgtatactaaatatgacttctcatccatttccaccttatcaaatacacccacagaactcatggttgcaacaatggggatttggatttttgtaatactctttttctccttctcttcttttgcatatatattacataagcaataattagttgatcttgaatataaaacttgggaatacagctaagattggtctttttatattatatcttatggaagagttggtaaataattgacttcgagtgacaggcaaatgaaaagaataatctgtttttttggatgagttcgaatcgcggtacagtcttcaatgtcccattgatgggtaattattaaccaatcttaggttagtttattaacgaagtggtaacttagacgtggccgtatcttccggatcttgtccctaaagtttagttttatatactattagtaagcaaacttaggttcatataattgaggtcttttcttttcttttatgcaatagtagtctagtaggtaaaagaagagtaaaccacaataccttttgttcattaaaaccttcggttgggagcctaaagtaattgttttgatcagctatagggaatatgatgcaaatgaaaattttgtgtatccaagttctacggctctttggatagataggaggggccgtaacttccagcattagaggggattttactttcttagctgtagatcttccttaagtttaattctcctggagatgaaggatccaaccaaaaccggcgtcgtgcaactgagtgtcgaatccaagatctgctttttcaggtgatccaagcgacatcggtccgatgaattagtgttctgggctagaaaccaggccgataaaggattcattacaattcaactgctctagtaccatatccaataactagtcacagaaatgccaaaactcacatatgagtgaataaacatatacctaaatgtcctagatagatttataatcaatttggagtagcactaggaaagatgaattttcatacatgtcaagaaaaacgatgatgcagctgtaatctatggctcatccatcacttctgttagcttttagctttcaatacataaaaacaggagtacatttgaagacggcaaaaccaacataaggaagaagaatagatttaccgaaaggaaaagtctctcaagcacgccttttgctgagacgccatgagttaggctcgtggtaacggtcatacaacggctcaatccgttcttggcgcttacgcttgctcatttttgttgggtcagacactttgaagaaccttggagctaactcaacaagccactttgggtcaatcacagtcacttccctcatgtactctttcgtagtcatcacaagatcatgatatataacccagtctggttgtctctggaacagcgcgctgctcgggtgtatatacaccggttgattctccaccagcgtcctgtaaccttcctgtggatcttttcttgctccatggaagaagaatcctgccgtgattgctttccttatcttcgtgaaattctttccagcagttacgacgtctagtttatacctgtaaaatcaaatcacacgttaataaacagaacttggattgtcacacatcattacaagctataaaactcaatactagtttagctacttacttgtccataatgctgagaagttgtttcctcacatcttgagcacgtcgtaacgatcttgactgtatgaagttttcgaaacaccatggacctgagaagtttttagccttccaagcttcatacacagctagcaatgtcaagtgatcaccttcgggctggaaaaactttgcccgtttttggtctgcctgtgcttgcttctcccttggtctataaaatatgttacccgtctggatcatagcaatcatcgttaaaatctcatcgctgcacccgagatccacactagctagcaacattttagagagcggcggttcaagaggaaactcagccatttttctacctagctttgtcaacaatccttcctcatccaaagctcccaggctgtacaactgttccattgcagaaatcaatgcttgaggttggggtggatccatgaagtcaaacgataacaggtcattgatgcccattgctttcatggtcaaggttgtcattccaaggttgattctttggatttcagggattgatgtaggaggcatttcattacgatatgcgctctctgtgtagagacgataacatttccctggcccagtacgaccagcacgtccagccctttgcttcgctgatgcctgtgaaattggagtaatgactagcgattccagcccttgctttggattgtacacgttctgcttagcaaacccaggatcaacaacatagtatatcccatctattgttaaagaagcttctgcaatatttgtagctacaaccactttccgtttaccaggagggggaggatcaaaaattctagactgcatttcactaggaagcgcactgtaaactggaagtatgatgagttcgggaacatttttacctagacctttcatcctctcgtacagagactggcaggcagaatcgatttcttcctgtcccgtcaaaaagaccagaatatcaccctcaggttcagtcaagtgaatctgaaggactgtgatcagagcggcatccaagtaatctgtttctggctgtttggtatatagtatctcaacaggaaatgttcttccaggaatggtaaaaatgttgcagttaaagaagtacccagagaacttctctgcatccaatgtggcagacgtgactatcagacgaaggtcgagtctacgtttcatcagcttctttagaagaccaaacagcacatcagtgtggattgtccgctcgtgagcttcatcaagcatgattacagagtactgagagaggttttcatctatcagaatttccctgagaagcataccatcagtcatgtacttgatcactgtatccggtccagtacaatcttcaaaccgaatcgcataccctacctcctctcctaaacgacaaccaaactcctcagctactctcttggcaacagacattgcagcaaccctacgaggctgggtacacccaatctttccttttgttgtataacctgcttctgcaaggtactgagtcacctgtgttgtctttccagatccagtctcaccaataaccaccaaaacttgattatcgtgcacagcctgtatcagctcctttttcaacttgtatatcggaaggctctccctttgctcttgaatagaaagctttgatctctgtccaaaagtgggagttttaccaaaggcatccttcttccactcaggcatgtcataagctgataacccaacacccctaagctcttgagcaagatgcctttcaccagtttcaggcatagggtcttcccatggccgattcagatccttggggattgagtcaagcattgttctctgctgttgttccctcatttctctcctctccttagtgagagcggactgaagtgcagctgcacgactcaaagaaccttctggatttttgaagatcttaaccggagacatgtcaacagagtacctagtctgcccttgtaagaaagcaggttcgtcttcattcatctcaatctcaagttcttcttcagcaccttcctcttgataaagcatcccatctccatcctcatcatacattggaaactcatctactctcaaaacaccagaggcaatcaactgcttggcttcccatctctcaggagagctcatcttcttcaacggtctacgtgaaggcgcaacatcattctcctccacaatcctgatccctgaaatcccagtcttagtcacttgcccatccttagttctatacgacggattactcctggatgaatcatcttcatctgaaggcttcctcaaaggaatcaaatctctacctgtattctgatcaacatccctcatagaaagactatacttatcactcgaaatcgatataactttcacataaacctccatatctctcttcacaaactccttagccttatcaacccttctagtagccatctgagaaacatgaactaaaccttcttttcctctaaacttatcaaactgaacaaaacaacctgcatccataaccctagtaactctccctttatatacctgatacaactccggctcattcgcaccgcctttatcttcctccacatactcatccttcgcacgcctatctctacgcctatcttccccttcaccaccatcaccacgtcctctttctctatgcctcctatcacttcttctatcttcaccttcttcatctccacgattcctctctctatccctatgtcgatcccttctatcatcacgatcacgatttctatctctgtctctatccctaccggattctctccgatctctatctctatttcgatcctcttctctccgtcgctcctcagcttctctctcaatctctttctcgagctccttaactttatccttagtatccttaatcgctaagcctttgaatttctgatcatcaccttcctctttcttcttctccgacttaggcttcggaggataaataccgtggattgtagttaacaacgaccggacgaagtaatccggcatctctgcacctgcttccttaagattcttatcgaattcatcgactgtctcagagtgacgacctagatcgataatgaactcagccaaaactttttctgcagatcctagatgcgtttccaattcgttgcagacattggagacgagagagagatgattcaatttgttgagctcttctttttccattgaagaaaccaaaggaagtaacaacaaaaagagaagaagacactgtttctggataatcgacttctttctagggttttttcttatagacgctcgcagagttctgattttgctaatcctatttttttctgaaatagctgactcttaaaacgctgcgttttaatttttaaacatatgtaactttttctttaggatttatatttgggccgatgcaaaacaacttaaagttaatgggctttcgcagttaccttttttgtttttttcctcaatatagctaaccttcaatttgtataattgaaaaacatcagaacggccacgtcgtcgtctctcatcctcctcaaaaactctctcaagagagacaactttctcaataatacatgattttgatttatttttaatcatctttttccagaaaaacagctgagagaacccaatttagtcaccattgaagatgctcttacattgtttagaaaaacagggagataaacaatttatcttttctgaaagaataaacaaattgttgaatttttaatttaaaagaaaagtttaaaaggtttttcaatctaaaaataacgcaacatcatcttaaaaaaagaaatgagtacataatatggtagtgaactccgcatttttagttttctaatgctagtaacatgaaagagtactcagagtagaggtgcgtttatcatttataactctaaaactcaaaacaacttgaatatcttatagagaaataaacagattgttatccccaatacatacacattaatcacaaggtttcttgatcaactaaagatcatatctaactatatccaaatagtattgcaacataaaaataaaatcgttgaaaatcgcaaataagtataccacttattcaaataatactttgttactcttcttaccaatatttttcctaaatatacggaagaagctatcatatgtattggactacttggtaggaaatctttatcaacgttgaatttttattattttgtttatagaataaagatttataaagaagaaaagaactaaaattgtataaaaagttgataataccaataagaaattttcttcagtcatatccacacacaaaaaaaaatcattgaattttaaaaaaggagaaaaattaatcatcatgatgaatgtctttcggttgatatttgatcgtgtacataattcgtcccaacattaacactatgtcaaacgaaaaaataagttttttattgttttattgttggctacaaataggatgctaaattatcaaaactaattgaatcgaaggtgaaatctatgaaaaccaagttaataaatgacatatagttaactaaacactatgccctcaaactaacacttgaattactataatttataattgatgtgaatgagtatgtttattttctcgagcgtatatgcagttatatttgtgtattaggggtcttccaaaaaaaaatttaccacaaaattatatattaaaatatccatgatgggaaatgattgaattaaaatgatctcctctcttactcaagaaaattatgggccgaaaactcaaaatatcttggtaaaaccgaaagaaaatccacctctggttttattttgtgtagttatatcatgatgattttcaaaatacaagttctaaataagtctttttttttttttttctgaaatacaaatttaaactgaagttgttgatcaatatatgatctcccaggtaaataaaaaactatatacatatatgtctatatgatcggatcatcccaatcttccacaatcgatcttatcatgatgcatatcgaccaaattggtccaaagatcatatcttagaaatgttttgaactatttttaatgcatgtcgaccaaacattttttaatcgaaacacacaaattttatactaaccaaactgaatgaaactaaacatattcgaatatttgaaaaccaagctggataaatctattaaatgtttgatggaaaatgtattaaagtttttttgacataaaaggaaaacaaaagccataatggtaagagaagatggtgtccatcacctaactaaccagcctcacctacctcataaaccacatgatgaaatcgagttaccccacgaacacactcagctccatgtttttttaagaactaaaatgtttgatttgatttgtaatatttagtattactgttgacaatttgtatatgtaataaaaattgaagattgatttactttaacataagagataatgccattttgttaaatcattattaaaattgaagaaaaatttaaacagtgcatctaattctcttctttgactacatccaaacaaagaacaaaattcccaaatcatttttattcttcttttttacaagtgggcatttgtgaggttgtgaggcccaaccaaaagagcctctcactacattccacaagaaccacacaaattcaaaagtctcactcctaacacaaagaagcatccaaacgcaatcctctcacctccacctcacattcccctgtgccaccatcacttaccctttctcgcctctcctgaaatcaaaatcccattatgcaaatccattttcatcatcatcaatatcatcaccaacttcattctcatcatccatggcccatttctcatctatgtagattctcatctctctacctcctcctcattttctcctcttgattcactaattcttcttcttcttcttcttttcagacatgactcttccttatcgtttctcttccgttagaaaccactcacttctacttaagacttctcatctctgcacacccagatcagctcttggttgttgtttctctcccaaggaatcccctttcttcaggaagaacactgcccaattcctttctcctcagaaacacacttctcttcctctgaaacttgtctgccctttagctagtttctcttcttatgcggattctgagggagaagagcaacaccatgctgatcaaccgatacagaaccctcacgaatcttctaccgtttcaaacgaatcagatgggaaaggtaatgcagaagctactggagacttttctggaatggctcaagcctttcacatttcttccacaacagcaagggcaatctctatagtcatcgccttctctgctctcacccttccaatcttcatgaagtccctgggacaaggactggctctcaagaccaagcttctctcttacgcaacactactctttggtttctacatggcctggaacatcggagctaatgatgtcgcaaatgccatggggacttctgttggatctggagccttgacaatccggcaagctgtgatgacagctgcagttctcgaattctcaggtgctcttttgatgggaactcacgtgactagcacgatgcagaaaggaattctcatggctaatgtgttccaagggaaagatatgttgctctttgctggtctcctctcttccttagctgcagctggaacttggttacaggttccatcttatcttttgcttcttcatcactaggttcaagacaggatttagtaaagttaataccttttaaagatggcattcacaaatgatacaagtagagaacgtaattgtgaacttgtgaatataacaggtagcttcttactatggatggccagtatcaacaactcactgtatcgtcggatcaatggttgggtttgggcttgtatatggaggagctggtgccgttttctggagttccctagctaaagtagcttcatcttgggtcatctctcctatactgggagctcttgtctccttcctagtctacaaatgcatcaggagagtaagtaaaacaaaccaagaaactaactttctaattctgaaagatcactaaagtcatactcaagcttctgctacattttcacactcttctttcgttctgtgcagtttgtttacagtgcaccaaacccaggacaagcagcggctgctgccgctcccgtcgctgtatttgtaggtgtggccagtatctcctcagccgcattgcctctaagtaagatctttccaatagctctatcacaagccttagcctgtggagtagcaggagccatagtattcgacagaatcatccgcaaacagctcggtcacctcctagctaaaacaaaatcaccagaaacatctcaaaaccaacccaaaaccattggtttcctctccgatatcgcaggaccaacaggtacacaactcgaaatagtctacggaatctttggctatatgcaagtcctctccgcttgcttcatgtcattcgctcacggaggcaacgacgtctccaacgcaatcggaccattagccgccgcattaagcattctccaaaacggagcagctgcaggaggagccgagatcgttatcccaatggatgttctcgcttggggaggattcggaatcgttgctggtctcacaatgtggggatacagagtcatcgcaacgatagggaagaagatcactgagctaacaccaacaagaggattcgctgcggaattcgccgccgcgtcggttgttttgtttgcttcgaaattagggcttccgatttctgcgactcatacacttgttggtgctgtgatgggtgttggtttcgctagagggcttaatagtgtgagagctgagactgtgagagagatcgttgcttcgtggcttgtcaccattcccgttggtgctacactcgccgttatctacacttggattttcaccaagatcttatcttttgtattgtgagtttctgtttcttttggttttgttatacgaagaacatgaaattgatcttcttcttctatgttcgtttgaatgattcgagtttgaaaaaaccctaaagttatcatctttcgattttttcacccatcggtgaagtatgatcaaagcttgtacctttcttgttcagtgtttcgtctcgtcgtccagtaaaatcgaattagagtgggtgacgtttggttacttctaaaacgtcttgttgtttgtttcctaatcgtaaaaacgtcataactttttaaacgacatcgtttttttttcgagtaaacgtgagacgcgcgtatctcttgcttttcgtacacgcgtctcgaacaaagactgacatgattatcttggctaaagacggaaatagccttacacgtttccccatttcagcgataaaattgagggtatttgagtcaaataaagaaatagaaatatctctcttcttctatcttttgattctctggttctacttgttcctctgttttggattgtggtggctctctaatggcggcggttattggaaacgtggcgttgttacttgacgttaactctcaccgtacggtggtaactgatcggagaattcgtttaacggtggtcgacgtcgttttgaatttacaaaagagagattcgcacagtcacgtttctcattacgctgctctctcttccaataagcctcttgaatctgacggcgaagctcgggttcgccggtttttaactcgcggaaaagcgaattccagagctaacgccgtcgatttcgacgacgcgggatccagcgacgaagaaagtagtgacggaggcggtggtggtggtgacgaggaggaggaggaggaatatttcgatgtggagaaggagaggaagaggagagctaaggaatttcatgatacgaaggagcttgagaggaaagcagaggagttacagtataagattgatgaagaaggagacgattcagaggagaagaagaggatgagagtgaagagagaactccaaaaggtgagtttttgagggctctttctctagttaggttttttttttggccttagcaatctctatttgtgtgtaaagaacactcttagattactttagcttagcttggtgaacactcttaggttgtctacgaaagtgtaagttattggtgaggttataagagtttgatgtgcttatgaaagagattggtgagagcaggtagctcaggagcaagcagagaggagaaaaactgcagaattgatgtttgaactaggtcaaaaggcttatggtaaaggaatgtatggacgagcgatagagtttcttgaaggagctcttacgattatcccaaggccaacactctttggtggtgaggttggttgataacaccagagtttaggtactgtttttttggttttggaattggtatgattgctaatgttctgtgggggaattgatttggccagatacaaatttggttagctatggcatatgaggccaataatcgccacgctgattgcattgatctttatcagcaattagagaagaaacatcccagtcctggtattcgtcgtcaagcttctgagcttcggtatatcttgcaagctcctaagcttaagatatctcaggaggaaatggttactattcccatgatcggttcaagttacgacaggtataacaaaaggtttccaaatcatggctaatgcatatgtcgacatcacttgaaatggactctttgtggtgtgtgcgcagctatgcagtgacatggagtgataaggaaagggataaggagcggcgaatgaatgcatcgactacgaatcagctcaactcgagtgatgattttctaggaaagctcttggtttggcgaccggtggtcggtatggagaagaaccgagtcttttggcttgctttgacactgtggtttggtttggttggagcagcactcatcttacaaagataagtagaagacatgcaaaatatttttccatcgctttaaattatggtttggtactactgtttcttctacttgtcttgaaattatatttgatttcatgtataaatgtgtaagcaaatgaattcgtcgttgtatataaagtatttgatggaaatatatataactttgtttatttgattatgtgtaatctttttatagttgaatttatctttttttattgcgtataactcctcaaagtgacaaactaattccatcatagtgacaatatagcaacctttttggtcgttttatcatcgttgaacagagtcatacttgaaaacaacaggtaaatctcaatctacctaattaggaaactttcatgttcgatcccctcagaagttcaaaacctgtcctctatgactgaccagtgaccacaccatgaaatatattaaggcgccaaagtgatggaaacaatcttaagctaagcttaaaaaaaaaaaatgtgtaaatggcattggccagacactggttggtttcttcatatatctaataccaaaaaaaaaatgtagaaagaattatcaaaggataacacaatttctagattaacaagtgctaactagattaattgatgaatacaattaacaaatccagtgagctgataagttttttttttttcaatctgttaaatttattcaaaaaaaaagaaaaaaattacatatgaatgcaaacttttttgaaaaaactacattgagattcgattaataatgttgtctcgatgcaaacaaaacttgtagaccctctaagaatgtttcagctcctcttattgtggttagcccttttcgaagatttttatctaataaacttaacgagcttctctgttgtagatggttcgtctccatgtcttctcccatttctcgccaaatggagtgaatcatgttctgaaatacttacatgagaatgagctgaattgagagggatcacaaaccattcacaacaatagaacatgtttgaacttgtttttgtcgtcacagttaatgagaaaataaatacccgtatgtgttagatagaaaatagaggtgtacctaattcaggctcaataaaacgaagatcagtacgacaacgatttgtttttttcagctgctttcatgtctctatcgagtactcattgaataactaataaattgtttacaaaatattttgatgatgaaaaatagttttgatatgtttattgaaactagcaaacaaaataaagctttactagtagtatgtttttgatataatagttttggctttaaatttattgaaactacgtaatgtttttgaactactgcagataatttgtctgcaaaaggtataatctttgataaaatttaaatctacaaaattcctctttttttttatttaattaaaattgcatcaaaatgtttgttttcttgagccgaattattctattaagcgcattaaaaaagaaaaaaaaaaaagaaataggagctaatgtaatttagagaaactctatcaaagacttataataaccaaaacgaagacctattgtgaccaaatacaaagggtggggcagatcgtttctttgaatactatgatgtcttttagtttatgagttgctttatttctgatacttctcctccccattctcttatcctatcctcagccattgaagcctacacgacaacacatttcagctaattatattaaaacatggaatgctcaagtttagacaaaatattcattgatttttaatatatatttttttctcacctctgtgtcccaatttgttttgcagatcatccatgttaaaactattgtctgaaccacggtccccgtcaacattccacaccagattccctagcacatgaaagattttcgaattatcggtcttttagttaatggttcttttatattttcaaagatttcaaatgatgaagatttgagattcattaccattacaccatagttaagcttgtaccccaataatagaccaaatgggattccaaacacgtaatagcaggcgatgttaacgtaggccaccactgcttgccatccagctcccacagccacacctaatattccagtttattaccatagccaacgtcttaatattgaagttttagtaacaaaattatatttagttaaaccctaccaaatcaaaccaaaagactaattcacatagaagtaggtataaaaccgaaataaatcaaactgactataatctaagactaatcaaaacgagttgaaatagatttggttattgagataaatagattgattacctgataagacaggttggacattgttgatgacaatggaaagtgcaagtattggtgtgagttctttaacaagaatgatgactttttcgtctttcacaaaaagtgatggatattgatctctaaagatgagtagaatcattgatacaatgaatccgattagcgtcgatgttatcactgccacaagtagtgagaatttcgcggttcttggatggttagctcctaattcattagacactctcacactgcaccattttgagattatgttataatataacactaaagagaggttttggacaaaaaaagagtattgacttttgcacgtgtttaccttacggctgtgttcatcccaatagcaatcatagcagtccatcccaaaatattcatgcttcatgttccatattgtttacaagaccccaaaaaaaagattagagttagtggtggatccaaaaattcataatatcaaatttttaattaaaaagtagctactatgataatatgtgttgaatctaaagtgtagtggggtcaaaataaggacaaactatcaacaactacaacatttttatacattacaaaatttattacggtcgaaccgctgtcaaatttgtactcccaaaaggaccaatataaagttagtatcaactgtcaattgtgtccttcttgtttcatcataattatttcatgggagtatacatatatatatatatatatatatatatatatatttacctttcttatattacaactaaagaaaacaaacaatgatgaacaaaaaaacacatttgacagtcgatttttagcattattttgtttcttttgggtgtataggtttgtataactacaagtctaaaattaaaatgtagcagaaaaaaggaataaaacaaaaagaatcagcactaatacatcaaattatttaacttaatcagtagccactagctatgggtttcactgcccaagaaacaaacgaataatttagttgacaatgatgaacgattaagtctactacgcacgacgaattagtgctaattcctagagattcttgatgataacttttaaaataaagaaactgaaccaatcaaataacgaatcttagaaaccttaaatgactacaataaaatgaatatgaacatgtaaaaaaatactttaaaacataaatttaccagatggagagggcagctacagagatttcagcattcttcaaatatccagcaaataatatgattgccataaaataccaaacctccaaactgatccatagtaagaaattaatcaaaatagcaaaaatattattaatactatataaaaaaaacaaaatcatcaagtcaggtttggtttggttatataaactcaccagagcataacagcagaagccaaagataatctaacgaaactccacaaattatgaaaagcctcccacgagaaaccagaccaagcctcaccacacgtaccactaaatatgtacacaagctgagccatgtcaatgaagcaccacgacgcgttaagcactacggctagacctggcataccccactggagcttcacaatgacaaaccacgtgagaggcacgtgtataacaagtgcaacagccgatatcacggccatgaccattatcttgctttgcgattgcaaaaatttagcggttggaaaattgatggcgtaggcaaagatttgagggatcatgtagatggaaaatattccggccgcgctagagattgccgccgtttgaccaatggacgcgaggataggggcggcgaaaatgtaaaggagagagaggataagagcagtcacgtttagtatcacccatgatcgttgcaagtaaacgccaagcattgacaattttcctgctccaaacgcttgtccacatagcgtttctaacgcacttcccattccaagctagttgcggacgttcataatcacattcattacaatgatcaaaacaaaacttcttaaatcttacaaaaaaaaataaagtgaaacttttacaaaaggcaaaaaatatattaatttttaaacttgagaaaatggtccatttgataaataaattgtactttgactagtgactacaaattgataatcatgaattcatttcttcaatttttttgggcgtttgaatttacatttttaatgtatatatgttaaattattttttttaatttaatggtcttttgatataaattaaaatatagaaaattgtttatagaaatgtagacaaaaacattttgaatgatttggacatctcccaacttttggatctttgtgtgttttaagttaataatgaaacttagtcaaagaaagaaaaaaaacgcattttggataataaatgcaaaccacaaaataaaaggcgtggatataatttaccatgatgccgaatgagaagccggcaacgacggagttttcgacggagacagcggcaagagcgatggtgctgatgtgaccggcgaagacctgagtaatagcgccgagagaatattggttcacggatgtgaaaatggcgggaccggccaagtaccatagctttttggtttccacgttgaattccctaacgaagccaccgacggtggtgatcggaggaatatcgtcgacggataagaaaggaagatcagaacgttcttccgccgcagtgagaagcgtctccgttatatctttgtcttttgccatcttaagagaaagagatggagagattaaaggaggtcgaagactaaggaccaacgagtgaggatcttgggtttaatcattcatgaattatataggaaaaaaaatgttaatacgtgcgaccaaaaaaattgtttttatgatattaaggaaaaaatagctaatatagcaactagcatttaataaaatggctaaatgtagacaaaatcattgttgtattaatcaaattatggtatatattatggatggattcacatgtgttttgttttggtagtattattaaatgatatgtgtcagtattgaattttggttaaaactctagtcaaattataatataggattctattactagcaatcaattttctaatatttttttgggtattgatttgatttttttttgttaaaaacttttaaaaaaagtttttgttttgggtgaataaaatcttaaccattttgaaaaagaaaatctgatgctgtttttatagatgagaagaaaataaattaatgaaatttgaagacatacacttgtatttgaattgacatggtgatggttaatctattatatcaaaatacactaactttttagaggctgctatgtgttaattatttaatttagagactttgaggtaaaaaaaaccctacaagtgttaagagaaagccaatcaacgactttttccttttaaccaactgcaaaattaactaagctttttcatgtgtaaaacgaagaaaacttatgtttcatcattcaaaaaaaactataatatattaatccatcaatcaatgtctttcactctcaacttaacttgttctgttacaagactctcccttatataaaaagggttacatgtggtttagacttaaccataagattagtaggacaacaagttgttaccagtaaaattatttaatttgcagcaccttttgagatatttagtaggaaatcaatctgtgggttgaaaattgaaggtttagagatttttatgtcaatggttgacgataagtttttaaattgaaatccttatatatgtagtttttcttttccattcgaatctatagaattttatatataaccaaaacaccacatcgtagagtaatacaacaatactagattttaacccgcggtatatcgcgagacgatttattttttaaaggtaatagatattaaaacttgcaaattttatttttataaaatagttatattttacagtgtataattgttattaagtaacagtataccacgaatccatgagacaattgttaaaaaactgaagttttaacccttattaaaacaacatattaataatattttaaaattttataaatattgattcaaatacatccaccatataacccaattccaaaataaaactcgttcggtaatttctttacccgtcccgtgattttttttaagtagtaatttttaaaatttaagaattatttattatatataaaagttttgcaaattgtatcattctctaatacatttatattttatagtttaattttatatatagtaacattatacataccacataacatttttggttttatataacattttctaaattaagatgatttgatatgtttaatattagtggtcttaaaaaaaaattcaagatgtaacccgtattgaaacggtggattaattttattttacttttttattaatgttgattcaaaaacccgtccctccaaatccgtcttgcgaaaaagccatttattttattaatattaattttacttatgatatgactctgaattataatctaaacattttatctaataacataggagtgcaccatatttatttaataggggaatgtaccatatgactcgaatgcacttttacccaaatccaccaaaacagtcttgcaaaaatgctatagagataagaaacgatagtcggttttgataaatataagattaacaaatatattagttaaagaatgcaaattgaaaaggtatattacactttattcgaatatagtatcaaaacttatataacacagaaatttgataattttttaattgttgaatattttttttgtgctaatttttatgtgattaagatttaattgatttcgtataaaaaatattaaattattttacgaacttatttgtttataatttggtaacagatagatatttgaatattcggtatattttgcttcagtttaggaaatctttaatgatccgtctttagatccactaagccctataattaagaaatgaatattgtcgttaaataattttggtaaccttaacgtcattaaaggatttgttttttattaaatttttttaatggcattgtcatgtaattaattacaaaaattaaggttacatttaaaatgtaattcccaaataatatagtaggatctataatcgaattatgatggagaaagccgcaaaaaatagttttgtttttctgcatcctcttattattaaaaaggaagtacaaattaaaattttgtctaatttggccttaattttgatttcaattttggattttgttctttgctattcaaaatcattaaggataatttagtcttaacaatctcctaaactttatatgatccgattcaatttaaaccgttcaataaaattaattttcttaaatctaaaccgttcaacaaaaataagtaaataacaaccaaacaaaaatttaaacacattttaacacattcctcttatcactaaataacaacccaaaaaaaatctcaattattatttagttatgtttgattaaaaaatttatatttataagtttaggatatcaaatttattcaaatatttagtataagaatcaaataaactgattaacctgcgataaaccgcaggttaaatcatagttatattcaaaaaggatataagagtatggggataaactaaaatgcctactacaagcaaaactaacccgggaagatagatttttgtttccttaaggattaagcccacgaaatgtattgaaattcctacatgtgtaaagcctattcgaaaatctaggatcaaattatgggaaataaaagatagtcacaagcaataccacacgcaacttgatatcaatgatataacatacacacgttattccccattgtttttgcattgtatgcaacataaaattatttgacaaaaaaacacacacataaaattacctcaataacatatatttcctgaatatgataagaatgtaacttcttctttttgggtcaaaaatgataagaatgtttgttacatctcggacttaagaccctaattaactaagggatgaagtttcatgaattgttttaatggctggtgtagctcgtgattgcgggagtaacaaggcttctcattctttgaagggatgcaagtggacgccaatcctagcaaatacaccaaatatttatattactgcatgttgaggattatgattgtatggtaactctactgcgtgtcgatgcatgcatcagcttgaagaatttctcttcttgataccttttgatccaagtatgcaaacgatgaaaaggatatgacgcttgccaaaattacggctggtcaaaattaggagcatgggctaacgactttatgaacgatcataatatgggctgaataaatgcccactactagcaaaactaagcccacaaaataggttttttgtttccttaaggactaagcccactaaatgcatactgaaattccactgtgtaggactattcgaaaatctaggaatcaaaagtcatgtcaactaaaaaacactcacaagcaaatgccacacgcaacttgatagcaatgatatatatatatatatatattttttttccgactgaatgattccattatattaggcgaaagtggaatgcatttttgaaatacaacaacgataagagtcgaaactctgtcagaaattaagtcggagaaagacaacaatatcttctgaaacctaagcccaaaagagagaaacaaactgtaagcaaaaagttacaaaaaagtaagcataaaaataacctaaaagctaaatctgaaactcaaaacatcataacctgcaatcaatcccatagtaacgattagcgtcgagctgaaaccaagaaacatgagccccaagaagaaccaactcagcggacaaactccaaaagaaaggaaatcccgaaaaagaacgaatataaaggctcaacaagcaacaacccaatagaacagataacaatgatatataacacgatattctagatttctagattttttttgcattagtgcgcaacataatattaaacctaatcaacaaaaatatgccaaattcctaaaaatgataagaatgtctcttaaatctcgaagttaagaccctaattaacttcattaacgcttcttaatctataaatatatagttcttcaaaaatctttcaacgcattaattattcaaaaagtaaacacatggaagccgtgtagttcacgcgccggtcaaatcgaaaccgtagaaaaaagcaaagaaaagaagacaaaaacggacttgacttatagagaaagacttaaacaatggcgaagacgaagacgatgagcaacaacaacaacaacacactagtaacaacagtagcatcagcttgaaagagagaactaaaacctagaaatcgagagagattggtggaagatttttcaccagatttcatgggagaagaagagagtcgaattggagacgagctttcgattttggttctcacggcggagcgactccgtgtagctgtggatgaagctgaatcattcaaaacagagtgtggcgaggttggtaaacaagtagatcggcttgctcaaatgcttagaacacttgttcgattcgtctctagttcttctcaacaagtttatgatcggccgattcgtagagttatcgtcgatgttaagaagaatctcgagcgtggttttgctcttgttcgtaagtgtaggagacacaatataatccgacgagtttgtactatcatcaacgctgctgattttcgtaaggtgattaatcttctggaatcttctaatggtgatgtgaaatggattctgagtgtgtttgattccgacggagatggaagttttggtggtggaatcgtgatttcgcttcctccgattgctacgaatgatccgattttgccttgggtttggtctttggttgcgtcgatacagatggggaaattggttgataagattgatgcggcgaatcagcttggttctcttgccggagataatgatcggaataagaagattattgttgatgaaggtggtgtttctccgttgttaaggcttttaaaggagagttcatcggcggaggggcaaatcgcggcggctactgcgttagggttgttggcttgtgatgaagataaggttaggtctattgttaatgaacttggtgttccgattattgttcaggttcttggtgattcttctgttagagttcagattaaggtagctacattggttgctagaatggctgaacatgatcctgttgctcaagatgagtttgctaggcagagtgtgattaagccattagttacgttgctttcgcttgatgtgtttgttgatgatattcatttgagtaagcataatagtattcactctcttgttcagatgaacaaagaggttgagaaagatccgtcttcgaagctttataggccgcttaagagttctaagtcgaatgtgtatcgtgacattggtggtagtggaagtagaactgggaatttcaagaaggagagggataatgagaatcctgaggtgaaacatgagcttaaggtcaattgtgcggaagctttgtggatgcttgctcgaggaaatgtagcgaatagtaggaggattacggaaacgaaagggttgctttctttggcgaagattgtggaaaaggaagttggtgaattgcaatataattgtttgatgactctgatggagataaccgctgctgcggagtcgagtgctgaccttagacgggcagcattcaagactaattctcctgctgctaaagctgttattgatcagatgttatggataatcaaagatgtcgatagcccgattttaaaaatcccagcgattcaatctatcgggtcattggcacggacattcccggcaagagaaacgagaatgatcaagccattggttgagaaactcggtagtagcaaccaagaagtggctataacagctgtaatttcattgcagaaattcgtatgtcccgagaacttcctctgcgcagagcactcgaagaacataatcgaatacggagcaatcccgttattgatgaaactaataaggaacgtcgagcagcaaatgcagttacagtgtctagctttactctgctacctttccgtgaatgccagtaaccaccaacagttggaacaggccaaggttttgacggtgctcgaaggtgcagaacgtttggcgggtctgcagaatatggagttgagagaactcgtgtcgaaagctatatatcagctaagtctatacaatgcaggaagtcacagtcaaatgctatcgtatgttggtccttaaagcaagatacagtttatagtgtgttggattcatatcgtacagacaggaatcttcattgttagatttacagagaaagagcaaaaagcagaatctctcattttgtgatcgctgattgatcaaatccttcattgtatatggaacgacacaaagataattaggtggaagggtaataaaactagctttgctctctgtgattcgctaggctatgaagtatgaatgatgattccaaaattcctggttcatgatataaattttgtaacatggtttttgatgcaaatgtgggccttattatatcttaattgagttgtgttgtgtggcccagtggaattttagtgtttaggttcattacaaaatataaaaaacagatgcgtcttgttttagccgtcacaaaatttagcaaaataaaaacttgatttatgtcattagatgattatgtcatctagaataatatataatatttttaagtataattacattatatatcaggaaactaagttaggttttagtattttcatcggtgtaaatcttgaaactcctaaaatagtttgaaattttaatatttcttttgatccgtcaaaacatgtaatgaccataaccccatctttcgtaaatacaatgtattctttgttttgatgataaattcgtatatattatatatatctttgtaactagtacacatagaaattcgtggaactacaaatgtttgtttaaacaatcattcaaagacgttcaatataataaccaccaaactcttagttttcctctaaatgttcatccaagtaatagattttgatatttagaatttgaatgttgaatttcattgtaggttgttgagtaaagagtatgtaagtttacaaactcattccaatacagtgacatgtgtcatcgaatacatctgcattatcaaatagcaagtcatctacttctaatagatgtttaggcatgacgttgataaattcttgaattgagagatatcgatcaagataaaaaatccgtactatatttttgaatttagatttataaattcttgataaattagacttttaccaatttaaagagataattttaaaactttattattgtaaaggatttcacaatgaaaatttagaaaataaaagttaaatcagtgtcacgtaataatattttggatactatcaatcttgtaatctcggtttagaaaaaaaacaaagattaaaaaaagataaacggattgaactcaattgtacaaaatgtgttctagtgaacttacccgacactaaacttatattttatgtaagtgtgagcgattaaatgctacctgagagattatgaagattctagtgatagggttattcttaaaatggtggaggatatgaccgagaaaatgacaagtattggaagagcctgaattagatatggtttcttttagaagtatggatattgttgcatattggaaaaacaatacatcccgttttaaagaattatcatcaatggcgtgtgatattcttagcatttcgttcactatcgttgcatcggaatcagcttttagtatcggaagtcgtgttcttaacaagtatagaagatgcttgttaccaacaaatgtacaagctctcatatgcgcaagaaactgatttcatggatttcaagaagttggtatatattctaataagaattttgtttacataattgatttatagttggccttgcttgattaatagttttgttggaaacttaaatggctttgggattgcatcttttagattaatagctcgattataacagtttaacccacatctgaactcgtttgcatgtggttggatcatttgttttagccttagttattacaatgtctttaaagaagtgtttgaattgcagtgatactagtattcttcctctcatgatcagtatgatatgtataagagctcacaatgattcttttagctaactacatggtttttattattgtaggtgatgaggtctaaattcatgaggagaaagggaacacacattgtgataaagtttcagtttgagtggctcttgggaattgctgctttcatatacaagtaagtaacaatttctttggttggtgtttcatgattgtattatgcgaagttaagctgtgtggtgtcagctcattagaacaacaagacacatgaattaggtataggattgacaccatttacgttcatcataatgtaggtctgtgtgaatattgtgaagaaaatattgacttcttagaccatggataatgggcgaattcttagaccattatccattaaggaccaaccattggaacccataaaaaatagtggtctaaatagacatacccattagaatttggaatgaccaattaacacttctacttatactatccaaatacgtgaaaataatactctagcgactagaaaacttgattagtattacatttattaattttatatttttttggataatataaattacatttttattagattcaagttcataggctcaaacaaattgactaggattcaaactcgatcataatgaactgaatcattttacagtaaatactcataatttataatcactatactaatagttttttctaatccccgagttgaggtattttaataattaatacaattcgataagatacattttaaaaaaaaacattatgtaagtatatggtcatatatatatatatatatatatatatatatcagaaactaaatatatgaatatatataaaaaagtttgatcttaataaagaatgctttaggaatttcttcacgatataattatgatccatgtgtcccacataaacatccatgttgtggcactcaatgtcaattagacagatacataagtagatgcttgatggataaattctattattaatttcctttaaaatctgaagagtattcttttgctaagttcatggatacggtaagtttccacattttcatcatgtgtttagtttggatacgccaattttgttctgtagtgatgatcttcacaaccaaggtttgaaagcgttgctgacaaacaacgtctagctgaaatttgaactatctacaaaatatgtaagattcttataatggacatctgtgttcagaggcagatctatgttgaagcattacatagacaggtgccttacactattactgaaagttttatgtttatagccacaattattagattaaatcatgacaaaattggtcgaattctcatgaggaccttaggtaaaatagattttaactcacttcctatcttctttcttcttattcctttgttttactttttataattaatatttttttactttgtagtttctgaattttttctcctgtatatttctaagtaaaaatagttaaatattcttatcattttataaacaaacttcaaattcaatacaaaattactaaaaattaatatttttcctcaatgctatattagattttatttatacaccgtttataaatattaattaatggtgccccacgtagaaaaatttcgagatctgccattgtatgttgatctaaatttctggggtgtatatgactatatgtaaaggaacaaacttttgttttagtaaagagtacatttcattctctgcatcttgtgtcaacttttgcatgacttcatttgctaagcttgttttggaattagagtatgcaatattagagtaggctaataatattatctaaacctaaaatttagtggtgtattgtcaacttaagtttgtcctaaactcatcactttataaattcaccaaacacccaactttgggttttgtcttcttttggcaaaattaatactatattaaacttttggattgagatataaaaggggacaattattctttgtgtactagataattaattgttactttctattagttcctgtttgtctctccatatataaatagttaactattatttcggaaagtttttgttattttattcataattctttgtatacctaatatactaataccacataaatcatcgactgatccgcagtaacacgaaaccaatggtactggaaactggaaactggagactggaaacagttagattttacatattttcttgacttaaccgtaataacagagtatacatttattttcctatacctacaaggtataaattttcttaaaatgtattgttgtattaaaatttagatttaatacaatgtttccttgactaattaagctaattaagcacatttgaatgagttgaactagcgaagtacattaaagagatttaaataatatttgggaccaatagtactattattaatttttggataaggtctttttacttttataatgtactactagagtgtataacggttgcttatgattgagtaaacattgtaattgctacagatcattccccattaactaatttttattattattactcaacaattcaccaccttttctattattattatccataacataatttatgtcatattattaattatcagctcttggttttctttttactactaatatgtagccaccttttttatataaagaattatcaattaacaatggactgaaagaatgtatttgaattttgaagcctatgaaaaggcgttgaggaaagaatcaagtttctcattggttttgcagctagttttgtatgtaaatgtagagaaacagaatttacactaagatgtgttacattgtacctaagtgtatgtttttttaaaaacaccttcctgtaaatttttaataacaatttgccatggaaacacattatttgcaagatttatgacccgagatcaaggtgtttgacacggagagaggagcttttgttcttcactagtttttttttttttttttggttcttcatactagttaatccacacttttaaagatatgtgcaaatttttctttgtggaggaaagaaattttgttgaccttttcgtagataaatgagtgccatgttatgaggcgtatggtgcggtattagaagtaggagtgcaacaaaataaaactttggttgttgtgagtttgtaattcatatatgtttatggtacacgtaggaaaattatatgagagaatagatgtgaaaactctctagtttataaatggggtttaagcacttaacaagtggttaggacttacttaacataaactatttgttaacttttggagttttgaagggtatttctgaaaataacacaagagaataggtcatttagtaaaactattgctatataataccttgcatgtagccatttcctttcaccatacaccaacaaaaagaaaccccaaaaagaatcaaaaacataacacaaagttataagaaaatatgaagacagtaaagagtttacctattttagctatgctactcggtgtcataattgtagccgccgccatctccaccgtctccgttgagggccgtaaacatcacgtaaagaagattaaacccaaacaccgtcgtcattccaaaaacactcctaccggctctccggcacccgcaccttacccgtccaccaacgagggcgttttcaacattttctcctatggtgccaagggtgatggagtctctgacgactcaaaggtacgtccatatatttttaacatcaacttgatgcttcaaagaaaaagaaatattaatcttttatcaaaaaatatctaaattagtgtctcaattcttaatttacgtttgcgtttgatttttcgtttatatttagagtcaatgtttttttccaagtaaactcattacataaataatcatattaaccaaaactgttttggtaattgtacacgtaattaatcgccaaacacaagtggaagaaaacattcgtatgcatttgccgaatacattctgtccaaataattgatagtttatgaatttgagcttctcatgaaaataaaaacacaatttgtttttgaggcatttgtaattgagtgcgcaggcattggtcggagcgtggaaggcagcttgtaaagtggtcggagggaaagtggagattccggcagggacacagtttttggtgaaggcagtgacactgcaagggccgtgtaaggaggagacggtggttcaaatagaaggaatcttagtggctccagagaagatagggtcatggcctaattcaagcttgtttcaatggcttaacttcaaatgggtcagtcatttgaccatccaaggctcagggactcttaacggtcgtggctataactggtggaacttagacacttatcaaactcaggtacggacttaattcaaaatataatactaaaaatcactatactgaaagtttaagatctttgttataattataattgcaatcaagattttttgtgttatgtactttgaaagattaatgttttgttatatgttcgtttgatattttttcgaaattgtattatgagattttaaaatatttattggtttttctttctttttttcagacgagaaataagtatatcccaccaatgaaaccaacggtaagtctattgttactaatttttttttttttaactacagattcgtaaaatgtttattgattggcttatgtgaattataagtataggcacttcggttttattcaagtaataacgtcacggtccgtgatataagcatcgtgaacagtccattatgtcatttgaagttcgatgattcggatggagtcaaagtcaacaacattacgatctcttcgccggagaatagccctaacaccgacggcatccacctccagaacacacgtaacgtcgagattcaacactccaacatcgcttgtggtaattcatattttcttacaataaattttcatttattttctttattaattaactatatagttccgatccatagatcattaacatttaacactaaaacgcttttcttaggaaaaaagaaagattttaaccagaaattataacaaagaaagaagaatatattattattacatatatacagttacaaaatgaattttgaccgttccattgttctaattatgcgcgactctatcattctgcaatttgaaatacataaattgataactataaattacatgtatataattgaacatagtggttgtcacgttgtagacgccaaagtgaaataaaatgttaggacgaaagataatgtatttttttctttcgtaaaagtagtattatagaataaaggcattaaacaagaaaagacatcattggtttaataaaaaacaccatttaataacggtataactgtcaccaaactaactttttatacagacaataggcaagcatgcagaatgaaaaggctctcttttcttttatttattgttaatcaattaagaaaagttacatggaccagagattctaaatgtttaaatactaaacaaaaatcatattataaacttcaataatcagtaatatgttataaactattcatctattttgggcaggacttaattctaaaatttctatttcaatctttctttaataagcaactttttacgtatatatatatatatatatatatatatatatataggagatgactgtgtatccattcaaaccggctcctccaatgtacatattcaccacatcaattgtggccctggccatggcattaggtatatgtatacataataataaattttcaattaattttcaatctattactttttcaattttttactgattttttttgtttgtttggtgtatatttgctttggtttgtgatcacagcataggtggactagggaaagataagagtgtggcatgtgtttctgatatcattgtagaggatatctctatacaaaacactcttgctggtgttcgaatcaagacttggcaggtacatatatagataccacatcataccttatataaataaatgattttgtgacttctgacccacgtaaatatagagaccacattatatgatattattgaaatatataaaactaaaactaaaagatagaaatgagaccttatatgaatagttgtaatttctgagaaaacttaacacgcaagtctttctacgtataggggcctaatctggctttatgttcaatttttttttgttataatataaactaatcacgtttgtgtatggtttagttcggatttatttttcgatgtccattgtaatttttcttgtgaatcacgtgtatatatgtatccgcagggaggattaggggtcgtcaagaacctaacgttttcgaacattcaagtaaaggacgtgaaggtaccaatagtaatcgaccaatattactgcgacaagtccaagtgtaagaatcagacgcgtgcagtgtcgatttccggcgttaaatacaacaacattgtcggtagtttcacggtgcaaccggtacgtattgcatgcagcaacaacgtgccatgcatggacgtggatcttatggatataaggctacgaccttctggaggaatcagagggttacaaactcatcagcaacaacaagctttgtgttggaactcatatggcaaaacacaagggcctttggttccttctagcattggctattgcttgaggaagagtaatattggtggttattattcacaaaaagtttctcggtcctatgacaagatttgcccttcataaaaccttaaataaaaaactaatatcagtaatgctaccgattctaggtatctatgtttactatatttgctatttaatttgtgtttattttgggatgtcatgatgtatccttttgcttcccctctgcaactttttgtggatgtgagaaggtggtggcttttgtatcagctttttattttgttccatagtgttatgatgtatcaccccaatctcagaagtttaagattactttcacatattgcttgtaacatttatttaatattaatgttattttttagcttcgtttctaattcaccatctaaatttagtccagtggagtttggtatataaattgaagggaactgatttaatgtccaattcttttttaggatttgtaacatgcatcttggttaagcttttttaatcgtttattaatatgctagttgatatctaaaaagaattaacaagactgtaaattgattagtgtgcaagcttttctttttataatagcaagttgatcatttatgaacgaagaaaagaaaactagaaaatgcttcaacaaaaatatgaacgtatgaacttttaatttccttaaaagctacaaacaaaagagagtcttataaataatttcttagtggagttcaaaccaacagctgatactactttgcctttggtggaaaggccacattctctatatgataatgctactaactacgaaacctaacttttaacagtataacaataattatccatcaatcacaatatggattgcgtattagaaaacttataaaatacatacttatgtgtgagcaaattctctccgtgagcaaattcttagtgtcgactattaacaaataaataaataaatagttatatacaaatttaatttgaatgatatttttaatattccgatcgctacaagaaaagagtcatattgcaacataacttcgcgaagttaaaattagacagaatattaaactaagaaaatttatgactatgaatgtaaagctcataactcgactcgaataatggggagataaatatttgagcatttgaaggtggattaaatctacatatttatgattacgaaagtcatgagtattgagtaatgtgagagacatagagtgtcttcaccgtccatttaggctctctctctttaatcaaaatctatgtcgcacgcgtatgtcatatgtatatcttttttttttttttttcttttaaatccaggaagttttgtgccgaagcccgtaatcccctaggtccgaaaccacaatatgcaatattagtttcgttccaaacgtcacgcgaaccggcgatctctaagtttcgcctagggtctttaccaattgagctaacgacacttggtcatatgtatatcttttatcaaaatcaatatctcttttccctattttcctttttcttccctatatattccaaacattattatacatatatacttttctactattaattagttaaagacttgggtacatatagtttataatttaggagttcacttttgaaacgcaacttcttataacatggaggaacatatatgattatttcttctattcataatgaagaacttttttttactttcaacacgtattattgcaaggaaataaaacatgaaagattcttagagcatctccaatagtggctaaattggattctctcaagtggttctctgaaaaaaaatggttcaaaaataaatcaaaataatgtattatcaagagagacagctctcttgagagattttttgagaaggaagagaggcgataacgtggcgcattctgattgatcgagttttagaagaaaaaaaagagagaaaaaaacttgtgaaaaaagtccaaacagttcttctttctccgactcattctctctctctttgccacaacaggcgatggcgatggagatcgattttctccgacgacgattgaggttacaattgagaatcttcttctctgatcgtttagattgattttgaattttgtaacttgttatgtaatttagtttctctttagattttcttcggatcattttttataaagagattcatgaaattagccttgatgccgtttttgttaatctgtctgatcaatgtcttgaattggagtctgattttgcggttgattgactctaatttttgttttcgtttatttccactgaatttgtggttagtgattgactcttagttgtaccttcttatcttttggttttttcttgtatgttaatatagaaagacttgaactttgatcatttgcttgattacaggttgagatcagataatttaattggaagattttaagttatggataacagaggtcagaaacgatggaggttgtggaagagttacatgatgataagagagcttgtaactctcaggatttcaggctaaagacttttgattattgagtacttggacgtttgctgagcaggtacgttatactttccaccaaatgaccttattctttacacctaaagaacgcaagttttgatttcatactaactattgaattttctagtgtttgcaaacacttgagaaaatatcctgacatgagccggtagcctgcttgaatgctggagcaattatggcagtgctttcgtttattgatttcttctcaacaagcatacaagttactcatcccaaataaatagccttgctaagacagatggttttaacatcgcatttgcttcagagagtcgcaatttctactgtggtcaatatatgtaagcagcttttttctgagtctctctcgcctttcatggatgttgttccaatattatgcactcttcttcaatatgaggatagttaggtaaaatgatgctcaactcttttgctgctttttctcactgaactaattttcttcagtaaattattgatagcatatatgtttccatttgcagctggttgagaatgtggctatttgcttgacaaaaatagcagaccaagttagtgagtgaccggcaatgttggatcaattaaggagaatagtagtgttttgaacttggagatattgaatgatttgattgccttgtttgggaaacttggttaatccaataatttttctaaaaaccgcattagagagaacctagcattggactggaaaaaaaacttacaagctttcatttcacaattttacaaaatttatattaaacaattggtgagagcccccatggagttctcaccattggagatgctcttaaaggtccaaacatactctggtttctggtctaaagaaatgatttacagttctaaagtttctggtaatcgaaaaagttatatatacacactataaaagattttgtttttttgtcaaagataaaatatttattttattatttcatcaaatatcaaaaaagttatatatacacactttgataaaatatcaaagataatttatttttttaaatatatatttttgaaacacttagtttgagtctttccaacctatttatctatacttgcttttttttttaaggagtttttcacgtggaatctaagcccatattgtataatgggtttttcacgttgaatctaagtccaaacaatttttttttttttttttttttttgctaagcttgtaaatatcattagaaatgaaagtgaaggaattacagaagcaacacctaaagaagagtaatcttggaaaaaaaaagagtaaaaaacaagattacaataaggctaaagtgagatacaattatctaatccaaaggagcaagagcggacgccaacgcttcttatgacgtcttccggaaatgatgttgcggacttgacgatcaacgagcttgaaggttccagaggcagtgatccaaaggttgttgtgaaggtagttattacgctgatgccaaatatgataagatacggcttgagaaaccaccttgcgaagcagagagggggcggaagaggttgaatggcgagtccaagaaagcagctcggcccaagttagcagctgccgatgagatggcgaaagtcttcgaaaaacctgagtccaaattgacgcagcaaactcgcaagtcaaaagaagatggtcccgtgattccggtagagtagagcaaagacaacaactagcatcagaaataactccccatgaaagcaggcgttgcctagtcgggaggcgattaagagtagtaagccacatgttgaaagcatgttttgggactgcacccttaaaccaaacagagcttgcccaccgtttaatctcctccctaggcctcagcgattcccaagtcttggaagaggaaagatccaaacactcagaatcgtcaacaacccaagcatagttatccttctcaagggttgagcttggaaggttaatagtgatcagatgagagtggaagattagagcattgtctgatcttggaggcgggataatccaacctatatcaccacaagcatcactaacctttgaagcagctgggatacacaaagaggaaggccccgcttttcctaagaacttgattaattgaacacaaggggtccagttgtcgtaccaaaaggaaatcatttgaccattttcaactcttgcctttaggaacctttcaccaagaggtcttaaccgaagcagcgtcctccaggtccaagggtcccgggggctctcctctagttcccaaaacgacttatttttaatatggtgaaatttatgtcaattcgcccaaagcacgtcattatctgcaaataagggccaaataaagcgaagataaaaagttttgttccatggcgtgaacctgcgtaagccaacaccaccttcattctttggtaaacagacacctgaccatgcaatctttgctcccttactagcatcaatgctgccagaccacaaaaatctagaacaaagagactcaatctttttcacgcagccaagaagaagaacaaaagtcgacatccagaagttgacaagacccgtaatgacagaggtgatcagctgaacccgaccagcaaaagaaaggctcttaaccgcccaggatctaaaccttttaacaagctcatactctgaaattttaagtttcctactcatcagcgggagcccaagataacgaattggcaaagtgctgattgggaagccgtagtgcgaaatggcaagagcctcaacctcatcagttccagccagatacaaatttgtcttatctttgttcacatgcagccccgaccaagaggcgaagtcatcaagagcttcactgatcccatgtagagaggagcttcccccatcgaaaaaaaccataacatcatctgcaaacattaggtgagagattgagagatcagcggttttaggatggtagtggatataacccgcatcaaacctagctttcagcaagctagagaacacctccatcgcaagaacaaataagtacggcgataaaggatcaccttgtctcaaccctttgttacttttaaaaaacccactgctagaaccattaaccatgactgaaaaatagggcgttgaaatgcactgattgatccagcaaacaaacttttcagggactgcgagagcacggaaggctgagatgatgaaatcccatctgacgctatcaaacgctttccgaagatccactttaagcataccccgagagctgatatttttagtgttgtaaccatgcacaatttcagtagctaacaagacgttttccgaaagtaaacgaccaggaaggaacgcagactgagacggagaaatcacctcatttaaaagcttctttagcctagaagtcagcagcttagctatcactttatacaaagtgtttaagcaagagattggcctaaagtcagtcatctttgaagagtttgtgatttttggaataaggaccaaagttgttgcgttccactgcttcaataactgacctgaacgaaaaaattcttggactgcttcagtcacctctggacccacaacaaaccaaacacctttaaagaactcagaggaatagccgtcagggccgctagctttgttcctgggcaaagagaagaaagcctcttgaatatcaagatccgagaaactcctttccaagtcattaatctgatccacagaacatctgaaagaaagaagcagattcatatcactctgtgccaaagagttctcgccctctacaccacataggagggattcaaaaaaattacagctatgctcctttatgccctcctttatgccctgctgggtctcaatcctttcaccaaaatcatcaatcaagaaatttattgtattaatcgatttacgcatgtcagccatcttatgaaagtaagcagtattattatcaccctcatataaccaagagatacttgacttctggcagaaaaaactctcctcagccttagcaagaatttgccattttctggtggcctccaactcaagtgtagcatgaacaacagaagggttggtaagagtaatcctttgacggtggagcacaatagcatgggcctcagagacccttttctcaatatcagagtagttctctctactaaaacaacaaatagggagcttaaggtgcttaagctttttggagaccctgtacatcgcagaaccagagacattgcaagagtaccaattctcacgaatcagctgcaagaaatccgggttatgtaagaaatagttgaagaaccgaaaaggtcgctttgctttcaagaccgctggatctaacaccacctcacaagagctgtggtcagagaaatctggctcaccgaagttcgcgtaagcggatgggaagagagtgttccaatgatcattgaccaaaattctatctatcttttttgccaaaggtctagagctgcacttattccaccaagtgtaagaactacctttgtagacgaggtcatacaaatcagaatcaagcaagcaacttctgaacgcacgaatcttcctgccaatatttgcattgatagcactttccggatttaagatttgattaaagtcgccaagaacaatccacgacctgccaacaacaaccggagataaggcaagctgaaccaactcattccaaagctcttttctggtaccctcctcatttgaagcgtaaacaatagacaccacaaaccaagaaggagaatcaggaagaagaagctcacatgtgatcatttgcagggacctaccaataacaactaccttcacacttggatcccacaaaacccatatttttcccaaaacagagaattcataattctcaacaaaagaccagccaggcaaaaggttagagatgaacttcttctccttaggctgctttacatgtgtctcaatgagacctccaaaaagtggtttattcaaaagaaaccatttcttaaaaccgcggcggtgactggaaatattaaatccgcgaacattccaacaaaagagcttagtacacatacttaagctttggttttgaggcccttgcctcgtagattcctcttctgacgcttagacaaaaccttgatgaaagcctcttcttcagtgtcagtagataacacgtcagaggaatcatcctcaactgcacaaactgtgcctgaacaaatgccaacctcctcattttcagttgcattatcaatgattacagcaaactgtccaacacttgaatctcctttctggaccttatccaaaccgagagagatcccattggtctgaactgaaatagacccaaaaacactatcttcaaccttaagagacttggacttagccacattcttcacagaccaaactaagccaccatcttcctttcctttgacagggagccgagtttgagtctcttgacccagagaagcttcacagaccaaactaagtccaaataataaaatcagtaatttatcaaattgaactttttttctccatcttatacttattatttattgtaaattatgagaattattaaacagacgtatgggcttaggttccttcggacagacgatatttctttctcgacacttccttcttcttctccatgtttttgatgaacacctttaatgatcttttttgcgtagaatcctggcgaacggctataattgtataatcgttggagatctcctaataaatcacagtatctgagattcgaattccaaatccctaggtgtattaatgaacatttggtcaaccaaaccaatgtaccaccaaaggggcttacacgaactttacttttctttaggaagaaaaataaaagtcagttcaaaaaaatacattgtccgtttataatgggcttttaacgttaaagccaagcccataatgatacatgacagcccattcattttagtactctaatttggggtgaataatccgtcccgcgttaaaaaacacagaatcaaaattacttcatatcttcttcacgtgagagtcacgtgttcggtaaaagtggttgaaagttgaaacccattggggaacaaaaacctaaaggagtctcatttctgctgggtcgagaaatcgctgatagagagtagagagacacacgcaggtacgtgaatcttcgcgacttcgatctctttgtgtatcaaatcaatccgttcttgttaaagttttcatttttaatcttccaatttcaatctgggtctacttaaatcaatcgaaatctcaatttcaagctgattcttataaagtttcgatttttcttgctgttttagattttgagctgcgtgctctgttttaagcttgaaggaggaaaaacatggcagaccaagaatcagataagaacattgagatttggaagattaagaagctaatcaaaggacttgaaaccgcaagaggtaatggaacaagtatgatctctcttataatgcctcctagagatcaagtagctcgtgtcactaagatgcttgctgatgaatacggaaccgcctcaaacatcaagagtcgagtgaatcgtcaatctgttttatctgccattacttctgctcaacaaagattgaagctttacaacaaagttcctccgaatggtcttgttctctatactggaaccattgttactgatgatggtaaagagaagaaagtgacgattgatttcgagccttttaaaccgattaatgcttcgttgtatttgtgtgacaataagttccacaccgagcctttgaatgagcttttggagtctgatgataagtttggtttcattgttatggatggaaatggaactttgtttggtactttgagtgggaatacaagagaggttcttcataagttcactgtcgatcttccgaaaaagcacggaagaggaggacaatctgcgttgcgatttgctcgtcttaggatggagaagagacataactatgtgaggaaaaccgcggagcttgccactcagttttacattaatccagctacgagtcagcctaatgtctctggtcttatacttgctggttcagcggattttaagaccgagctaagtcaatcagaactgtttgatcctcgtcttcaagctaagatattgaatgtggttgatgtttcttacggaggagagaatggtttcaaccaagcaattgagctgtctgctgagattctatctaatgtgaagttcatacaagaaaagaaattgattgggaagtactttgaggagattagtcaagacactgggaaatatgttttcggtgttgaagatactttaaaggctctggaaatgggtgctgttgagactcttatagtgtgggagaatctagatattaataggtatgagttaaagaacaacacgaccggagaaatcgtgattaagcatttgggaaaggatcaagagaacaaccaaagcaatttccatgatgcagagactaatgcagagttagaagttcaggagaagatgcctctgcttgaatggtttgctaacgaatataaacgttttggttgtacacttgagtttgtgactaacaagtcccaagaaggatc

SEQ ID NO: 71 - DNA, 86139 bp, Arabidopsis thaliana
gatccacaccatatgcaccaaacaagatatcaattcttcattttgttttcatgttctaaacacaaatcctgaaattgctagattagtttttttggtctcttcaaatttgtgcttaattatcaggttcaaaatatttcggatacgctgaagcaatttaaattatcaggaggctacacgccaggtgttgaatctaaatatagcttatgcatagaattatatgaaaattctttcgaccgccgtgataaaaccctcgaatatttggctgccaaagactataacagcgtaaacactgtagtcggtgaaacgtcgacaaatatgtttacgtgtattgatgatttgtcatccatgaagccaataccacaatattttctgacggaaactaatgatattaaaaatttgtctaccattatcttagtgattctcgaatgtttcataagtaagagaaaagaattctgtaattctcgcaatctatattaataataatattagtatgattgttgtcattatccaatcttaatatataaaagatattaaaaatataaaacttttcttgactccctatgcttacgaatctctcattgctacattacaaattcttttctaaatcgttttatttgattcgctggctcgtgagttgactcgtgagctgtttctataattgcttataattttttttaccggaggtcgttggagtccggcagtggtgttgatttcacgagatgagaaagagatgacgttggttgtcggagatgtcgatgtcgtcgaggaagtgtgttgttgtcaaaaggtggcgattgttattgggtttgaccaaaacacacaacattgggctcttattgggccagacgaaattgacataaagaaaagaagaacaaaagtggcccatcacatctatatatctctacgtgggatatgatagttgaggtaggtgtgagacaagacacaaagggagttctagagagaaagagaagaaacgagagtttattcttcaagaagctttttccttctttgttctttgtctttgatctttgttcttcttgagattgtacctgaaaccaaagacaacatcacaagtcaaatggtgtttgtaatctctttgatatagcgaagctttggaagcaagagatctcccccgagacatagcggttaagccgtgaactcggtatcaatttttgtgtttgtttctctgacaagcaaccgttcagtttcgttttctctacagaaccaaacggctaaggctaagaagctaaggtgatgactcaaggagaagccaaatagactacggttagagaaagccgagtgatgatggttcgagtcaaacagaagctaaagctaaggtgatggttccaagaatcaaagtaaagaaggaggtgttcaaaggtggacaccaagaagaggagaagagaagcttacatgagagagaggaagctgaagaaggctgcatcgacaaccggaagagacgtgagggaggctcacagagaagatgcggagaagacatggagactgcttgagggaaagagaaatcccaagagctccaatatctgaaaatcagaaacaattgacaagacaggtcaattgtagaaaagagaagaaggagtagttgaattgaagtgataaagattaaagagtcaagagttgcctttgtgtgataagaagaaaatcaccaagaggaagacaagagaccgagacttcactccagatcacctagaaaagaagaaagtagaggatgagttcgattaaggaaaatcgaagcagagggagatgaagaacttcacgcacaaatacgtcgagaagaagaaactcgatgcaaggatattcaaagcaagagggagatgaagaaggcaagcttaccagtgagctgtgccaaagatcgtgaaagggattcacacaagagaagaggcgaatcaccaagagaagaagaagcaatgggattgaattccctaaaattgaattggggatttaatctacggattcttgggggagtgttggaattgtgaatcctagattaaatcctgcaacaaggaaagctttacgaaagtaagagaaggagcaaggaagaagaagatgtcatgacaagaaggtcaacgacacatgaagaggaaggaacaaagtcaacagaagagatgttgggctttgtgttttgttgtaatgggctgcagatgaattaggcccaagtatgtatagttaatgagtgttgtgttatagagtcaaagatgttatgtaaaagtgaattaaggagttgggagttccaacatagtagagtggctgatgtaagtcttaagacaatgatgtggtctagggtctaagtatgtgtaatgtagaaagtggagcaaagccactatatgtatgtgtgtcttgcgtaagattatccaagtttattatcaatgtagacatgcaagtgtttaaacgtgttcttgtaatttctgttttaacaagaacaaaaccgaggttgtgagaaaagcagagaacttctggtgagaattacaataaatgcacaatcatcataagttttaaaaaactaaacaactacacgaagataacgcagaaaagccgggtactttttgttttcaattataaacgtcatgtttctcccctctatagcgttagaaacatcagaatctcctccaaatctttcttctgatttctctatttccttctcaagaccctatcgaaagcacaaatcatgccaaacaataagtaacaaaaaaacacacaaaatcaattagtacccgcaattcacgcaacaaatttgtatgcatcttgattcaatatattatcatattttctcatatttagaatttgttttcatagaaaactcgtaaattttaaaaatatcattcaatgagttagtttttttattaaatggctattgtaattaaagatgaagtactaataaatttagagagactaataatatattatttattttcgtttataaatttaataaaatacaaatttacattttgataagttttatattatttgattacaaaatatttagaaaactttccatattttcaaaaaaaaaattattttcttattttgggtttttccattttacaaaaatcaaataagaaataaaaaataagaataattttataaatattaattagctagatggcttataaagattggtcgttttaaaacttaggtggacggctttagaagcaaatagcttcaacttttatataatattgattagttgtttgtgatttatttaattttccctaaacttttaacccattaaaagagatgcccttacatcttagtcaaatagtaacaacatgtatttcaaatctaaggaagaaaaattatcttatgggttatcatattactgttaaatcaaaatcaaatatttttcttacctaaataaagagtcaaattatcaaaaaaaaaacattgaattgtttgacaaattgctaataaattaaatcattgtattatggtacataatctaaaagcatttaattttgaaaaacttttcagcctatataaatctcacgtaaattccaaaacacacaaaacaagaaaaatggtggcatacgtcgataaaaacttttcattggcttgttttttggttttacttctttttgttgactcatcgtatgcaaggtttaatacgttggttacaaaagatcagatccacaccatatgcaccaaacaagagatcaattcttcattttgttttcaagttctaaatacaaatcctgaaattgctaaattagattttcctagtctcttcaaatttgtgcttaattatcaggctcaaaatatttcggatacgctgaagcaatttaagttatcaggaggctacatgccggatgttgaatctcaatatagcttatgcatagaattatatggatatgctttcgataatcgtgatattaccctcagatatttagctgccaaagactataacagcgtaaacactagggtcagtggaacgttggaagatatatttacgtgtactgatgatttgtcaacaatgaagccaataccacaattttttatgacggaaagtaatttgattaaagaattgtctaagattctcttagtgattctcgaatgtttcataagtaagagaaaagaattctgtaattgagatctataataaaataatattagtatgattgttgtcattatctttttttaatatagaaaaataagaaaaatcgaaaacatttctccactccctctacctacgaaactctcgtttaaagctacattcttttctttttttgtcatccaatctaaattcttttcttaattgttttaatcgacgagttgactcgtgagttgactcgtaggctgtttctctaattgcttatataagttttatacgatgatggaagaaactagaggaaattgtcaaaagataagaatccatttcttctacgcatattggtggttttttggtagaatttgttctctatgttctgttaaggttataaattctcatcttgtttttgcttaggatttgagattaatagtagaaatagatgattcatcgcatcacttttggatttggaatcgagtccttgcaatttattgtattcatataaaggtatgatatcagaaaaggatttttgtttcatttgtgtgatggaccttaaaatgactatatataacaaaaacacaattttatttatatgatgatttatatatccatcattctgtgaacggattagattttctttgcctcgtagatcaatggtttgtctagtatagtatagacaagttcaaatttgtttggttttgcttaacgaatcattaatttgtattttaatttcatcttccttaatgcaatcgccgacgtaagacaatcaattcaagcaaagcttcaattttctctcttatccattatcataaatttccaaaagcctaatcctttacctgagaagcatcttttctcatttctggagcttacgaggctgatcggtctcgtccgattgaaattggtatccacgttcttgaaacaatcgagacagaaggttaagattgggatatatttcgcaacttggtgggcattgaacgatgtgtccaataactacaacaagaaggttttgaatgcttttccttacctgtggctaactttgatgctttctcttgcttgtggccctctgatgatgcttgtctcttgggtcagtagagttgcagatgctctttaaatcgatcttgatttcttgaaaactttgttcccgttaaaggatctaactttcattactgttgtttctttataaattgtcttgctttaggtgtgtttgatcttgaaagggacacatatttagattaagtgtgtaagtaatattgatggaactgtatgatgatgattttgattgttcaggtggctttggcgcatacaattggacatgttgaagcgatagtgagtatgtctaaagtagtagtgtccttcacacacacatcatcaaaagcagtgaggcaacctttagcgtctttgtggatgagtatgtctgagtaacgggtcataatttgaatatatatatatataatttcatacatattattttgaaatttataatcgtatatactacaataattaataacatattaaacttttttatgtgtatcatgtgatccaatttttaatacaagctggaaatcatagaattgacgggttttgatcgatattaatataagatggtatactataggtgaaactctaaaattaacaatcaaaatacaagtgtataatcttaaacactaaataatataaataatatcaacaaaacatatacaactcgcagtgtactatacattaaaaatcaaataaaataatatcatatatttataaatcatctttacaaaaaaaaatttaatttaactaaaatataagcctatccccggtttaccgcaggttaatatctagtagttgactaaaatgttcgtcttttacgatatgattttatttaaaaaaatcgttctaataattgtacgtcctagcatatcatcgtcctctctataatctatatgttccaaccacctaaatatatcaaaacctttttaaaaaagtctcttcccaatatctacatatacatttttgcagccattttgtaaaataaatcatgtagttgggacttatttacaatggctgccactggattttaatatttgtttttgataattagaaaaaaaatcttcgaattaaatatttgacatttaacaatcttccttaaatctctccacattaactacacgattagttattaaaataaaacttccaaaatatttaatatcatttaattaccacaaaattatcatttttgatattgcttttctccatgactattacaattcaattataatcttcaaaccgcaaagatatttgatagcatttaattactacaaatttacaaaatatttagacaataattcataaacatatcataaataagatcaacattaataaaataaatagtttttttatgggacgggttggcgggacgggtttggcaggacgttacgtaataacaattgtaaactataaaataaaaatattttatagatagatacaatttgcaaacttttatgtatactaactttaaaaaataaattgtttacgcggtgtaccgcgggttaagatctagtatcactacaaaaaagcagcagaaatttcatcctcaaaaatttgaagggattttgatcaagagggaccgatatagaactctttgcaaattcattgaattttcgaaagaatttctttctctcggaaattgacgatatttccgggcatttctgacaacatacgacttttgatataaccgaaccttattaccaccatcttgatcctttttttttaacaacataactaggggtgtcaaaatgggtcaaaattcatgggtcaactcaactcaactcaacccatgaaccctaatgagttgaaaattttgactcgaatgagttgatgggtcaaatgagttgatgagtcaattggtgtgatgagtaaaatgagttgggttgtaatggttaatagtttcaatgatttacccaattaacccatcaaattttgtaaaattgaattaaaccaactaaaatctctaaatcaataccaatttaagtttaaccaacacatctaaaccaatttaataaaaataatatttttccaaatttcttaaatatacaagcgatgaaattgagaaaaagtaaactcgtaatttttccaccaaaaaacataaacccatgatttttctgccaaaaacgtaaacccatgattttcccgccaaaaacataaacctgtgattttcccgccaaaaacgtaaacccgtgtttttcccgccaaaaacgtaaatccgtgattttccagccaaaaacgtaaacccaagattttcccgccaaaaacataaatccataattttcccgccaaaaacgtaaacccgtaatttcccgtcaaaaacgtaaacccgtaattttccttccaaaaacgtaaacccatgattttcccgtcaaaaacataaactcgtaattttcccgccaaaaatgtaaacccgtgatttttccgccaaaaacgtaaattcgtggtttttccgccaaaaacgtaaacccaaaattttcccgccaaaaacgtaaacccgtaattttcctcccaaaaacgtaaacccgtaattttcccgccaaaaatgtaaacctaatattttcccgccaaaaatgtaaacccgtgatttttccgccaaaaacataaacccgtgaaaagtggaatccgtaaatatcttaagtttgatgataatgaattaataatgataattatttattattgttttatgataataattaattaaattattacttaaatgggttaacccatttaaaacctcaacccatcaaattaaatgagttatgagttgatccaacccatttaacaacatgagttgggtcaacccataactcatttaattctaaactcatttgattatgaattgagttgagttgggttatccattttgataaccctaaacataacaacgataataacgaccttcccatatttcaaaaataggctgtttctgatctataaggtccaaacaaaataaattttagttgggtcttttgaaaattttaaaatactagtgagagcagcttgaaatttgtaaagattcagaaaatagagcctgttgttgcaataaaataatgttttggggcttgtttgtatatcagatggactcgatagggaccggctctgaaatagagaagagccatttgcgtttcattcctcaagagtaggcgttttagcctggccaagtaagtccttttgtgtccttctaattagtatttttaggtctaacaggaacaacaccagggcatttatcttttagcctttgcaaaaataacaacgttttttagtacgtatgaaatcaaaccgcatcaaaaccgattcactcaatggaaattgaactactttagtaatatattttacttttagtttttattttattttatttaaattagattacatttctagggtgttcacatttctatacatatatacgatttatatttagatgttcaaattttttgtgttgatttaaaaagtttggattattctttttgtatttttcattgtcggtgtttttcaacaaatcgacaatgttataagaaaagtgttctttcaattatcaagataaaaaacagtagtatggtaaatttctagctggaagactatgattttttccattctagggttagagactaattgtgatggtacatagatttatattgtcgcatataataatagttaatatctttcatagaagaaaaagagtttgcattttacaaaaaggaaacgcgaaaataatagagttacttaaagttaaatcagccaaaagcttaaaaaaaaacataaaactaaattcatatctcatgaatccaaacatataatcaagctgaaactcgtttagcttgtccactgttgccactaagttgtaactgagagttaaccttagaaagattctcctcatcttcttcatcttcatcatcttttggtgttgtcttgtaatagcaagcatagagtataagttgtactgctcctgataccgttccaagtccatttccaatctatgaaaaaaataactaagtgaaactactaatagaagaagaatagtatatagtaacatatatcatttaataaacttaccaaaatgaaaaggtcgaacttaataagtgcataaataacccaaacgacaccattgaggaaattggcaagtgagagagagaatggcatgtacttcacacttttggtcttgatcaccttactctgtttcaatcacaacaaaaatatcatgtttttaaattattgaaaatgagagaaaatactaaatatttaagaaagaaaagaagaggatatttataaataatattttaccatgatggtgagaggagcaatatacatgagactaacaaaaatgacacaaaagattccaacaaaagaagatctctggttatgtgtgtggaacaatagcaatgtgcatgtggctactattcctacaaacaccatctctcctattaaccatagccccactttcacctgcaccatgaaccaatttgattaaaataatttcagaaaaaaaaaaaaaaatctacaaacattttgttttgcctatcactatcctaaaacagaatcaatcatagtctaccacttcttattactataatgttttagctttcaatttaagccaaacctaatagcgattttaggtttagataatgattggaaaaaacatttaataaaattaagtgaaaagaattgagatatgaatggaaattactaaaccttgcgactagttggagaaaagaagaagaagatagcgagatacaccagctcaatggctaaaccggtaccatttatggtgatcacaaggagactatctggttgaaccattggtaagccataaaagacccatagtgcgcaatttagaaccgtggctaagtatgggtcagctttgtactcctccacctttttcttcttgtatatggttatgaacgtaggtctgcgtaaatatacatacttataaacattaatttaagagatctataagttgttataacttataagtttatagctagatagagagagattaattataatgattacatgggagataagaacaagaacaaggagatgacatttcctgcgacgataaacaaatagtttataaagtattagtaaacaaagattagagattcttcaaaatgttcttatacatacgaaactcatatttatacgtaccacaaatgccggcaatgtttctcgcaactgtagcgttaaccatttcacttcaaaagaaaaatccgaactagaacaaggagcaagaacaaagaagagagcgagcgagatatatatgtaattcggtatgttaaacttgtatggtttttgcatatatttatagatagaagatgagatgtttgtataaatatagatactcatgtataccactatgatataagtatgtgtatatgtattgatgacgaagcaaaactcaagaagtaaaggaattgaaatgaaaacgaccttgaatttttgtttttccgttttggggaaacaatcatgacatttatctgaatatctttcaacactttctcgttggcttattatttttggatccatgattataactattatgcctaccttacatagtatacgtgtgtatatgtatatatacatgtatatttcacatgcatgtgattgtatgcaagttcctttgtaatattcttattcacgaccatatttgaatatttaaaaataaaaactatcaaaaagttatccacgtgacgtgaatgtaagcgagcactctgatagagaaacaaatcacgtaagatatattttcctctccttttccatctttttggacgaattttaaatatgcgttgttatattataatatatatatatatatatatatatattatatggtaaaatatttgttaatttgcatggatttatagtatatattttctctgcttaggagacatctcatttgtttgcgatagttaaattaattcatattacagttacaaattaaacgaatgtttacaaaagtaatgatataaagagttcgagtttaagtctgtattgaaataactaatacacttatttagattatttctaatgataaataaagtttcgaagcgaaaggtaaatgactttacaggtgttgtgagaaggtagacaaacaaatgatttttgtaactttaatataaaataaagtaagcatgcgacaatgtccatttcgagtttttgatgccgatgtaaccatattgctaacgatcttttatgaaatctatggacgataaaaatcgcaataatatatttgcttcccggccggtgcactttacctaattatttttttgtcaaatagatttttatttttagctttgaatttgaatatagaataagtattttcgtagtgatatgagtaaggtataccaacaactagatcaattgtttattaagatacaaaattagttttactgagatattacatggtgaaaaggatgtttttttcttccaaaaacaagattgaaataagaaagttatactattaaaaatttaaaatactaatctattcacatagctagtctttcagttaaacatttatgttgttgatcaaaattattatgaaaaatcgtttcataatggttcgaatatttctaatgtgatttcaataattgttttctactatgcatatttcaaatagtaaaagtctgtttcacatactagacaaattatttttggtttcggtcaagaatcagtctgttgtaaaaaaatataataacaaaatattatatagttggattaccaaaacaaaatctatttacattcactttttactctatgggtgtttaaaaaatttaaaacaattaaattatttacaatttacgacaatggatcatattatcaaattctaaattttacttactaaaatatttcactatatatgtttgtatatgttgggggcagatcgtcatctccgtggaaccactaagttgagaacaaatatgcgaaagtcagcaaacgaacatcaaacaaaagcatttggtccaaaagtttatcgaatgaaaatttgtaaccaaaaaaaagtttatcaaaggaatacaaaaaaagttaaacgatttgctttttaaaaacatttttaaaagtttatgccaaaagtttattaatttattctaagaacatttttaaaagtttataccaaaagtttataaatttattctacgaatttttttttcttgtattgaatgtaaaatttatttaacaccaaaaaattgttttacaacggatttctttacccaattatttcatgcatgcacttattattcttcaaagtgatgtgctttggtttgtgcatcattaatgctctctcttcaccacatcacaacgtcattaatattcgtttggcaaattatgatttatactaacttatctattactatagtgatgaattttttaactctatattaattgtcttctagtacaaaaatttattcgaggcgtaaaaatactctcgaaatggaattggaaaccaaaaatctcgtgtataaagctttcttctctagggtgattgcttgacaaaatgtcacacacactataatggtcaaaccaacaagtccaaccacaatgattttttttttttacttttaaacaataaaatattataacccataaccaaaaacgactactgaacaatgttgttgatgtagtttaagatttgatgaatttgtaataaagtaaagttcaactgcataatatatagtagtaataatctatcgtattttgattactgaattcactatcttgatatttttttcaccagtaaagatgtatatagaagatatgaaaagttttgtaaaaaaaccaatgatctaagctgatttatctaagaagaaatgtgtcgacctaaatttcatatagtagatgtatatatatatatagtatgctaaagttgataataatcgaaagcttttcttgtatagatagatagattagatatgatagcttattaatgttctatatagatataactttaatttatacactatagatttcaattaattaattttaatacgttttacctaacaaaataagaaggtaattcatcatataggatggttacatcttttggaaatattattatattatataggatatctacatctagcttgactattagctaacctatttcaaagactaaattgtaatcagggtttcattctaagtgcttttttttgttaagaaggaaaaaaaccttgaaggcaaaatttattgtaaacaaagaatccaaaatgcgaaccaataagtggtttacacgtaaggcatttcacaacaatgaaataatcattctacgtgcgtagaacaaataattatttcttaaaatgctaacattgtttttttgagaagagctatatattgttgacataaaaataaagcagagctacttttcttttactacaaatgagagagttattaaacccacattttgattaattattaatatgacttgccaagcgaagtaccaaactgatttttgagatttaccaggcgattaatttgtttgtcatggtaatgctcatatttcaaatcagttttaatatcgttgttgtgtatattatatgggatttaaatttgatagtgagaccaaaatatttgggcacagtgaaactaatatcggagtaaaccaaacagtccaaatccacatgcatgaacgtttcaagttccaaatagtaatatgaaaagaccaaaacaagaaaacatcaatccacaatcggttgttatccattactgcaattgtaatgttttattctattattttggctcaaaaaaacatattactttataaattttgtaccgaacacgatagaattgaatcctaacaaggaacaattccaaaccgtccatataaaaaaattgtctaattaaagaaagcaaaagctttgcggtatctctcttacaaacaaaagtagacataaagtttgaataattgcatcatgtgatactatatactattcaaacaaagaaagtcccacccaggatgttgaattcgccacgttatatatccaaaatcttaacagtatttatttatatcttccaattgttatttttttctgatatccgaactaagtgttgataatctaacgtttaattaagacgttaatcaatcctcccgaattaatagagttgaactagtgatcttgcactcactttcaaaactactagacgtctagttattaccatttttaaagcattttagtcctcgctcctaatgaaataaaagagaattatgcaattgactactataaactactctatgtgtatgatgaaaagaaatgattgggaagcaagaaatataatcagattaagaaatgattgtaattcgaagaagtgtaatcttcaaattacttatcaataaagtattttttttagcatcggtcaagacattggtacgtaagcatatattacgtatcatggttaattttggtttctttgagcgtaaattctatttacaaaccaatcagaacatgatatatggatgtcgagtccacaaaaagcctcacaaagattacttttatgtatgaatcttttggagatgtcccgactaatataagtaggagaagctagtgtgtatccatcacctatggagaagttggaggattatatacattatatataggggtgtcaaaatgggtcaaaattcatgggtcaactcaactcaactcaacccatgaactttaatgagttaaaatttttgactcaaatgagttgatgggtcaaatgagttatttggtcaattggtttgatgagtcaaatgagttgggttgtaatggttaatggtttcaatggtttacccaattaacctatcaagttttgtaaaattgaatgaaaccaactaaaatctttaaaccaatgccaatttaagcttaaccaacacatctaaaccaatttaataaaataaatatttttccaaatttcttaaatatacaagtgatgaaattgagaaaaagtaaactcgtaatttttccaccaaaaaacataaacccgtgatttttccgccaaaaacgtaaattcgtaattttcccgccaaaaaccaaaacctgtgattttcccgccaaaaacgtaaacccgtgattttcctgccaaaaacgtaaactcgtaattttcccgccaaaaaccaaaacctgtgattttcccgccaaaaaccaaaacctgtgattttcccgccaaaaacataaacctgtgattttcctgccaaaaacgtaaactcgtaattttcccgccaaaaaccaaaacctgtgattttcccaccaaaaacgtaaacccatgattttcccgccaaaaacgtaaacccgtaatttttccgccaaaaacgttaacccgtgattttcctgcagaaacgtatacccgtaattttcccgccaaaaacttaaacctataaacctgtgattttcccgccaaaaacgtaaacccgtgattttcccgccaaaaacgtaaaccgtaattttcccgccaaaaacgtaaacccgtgattttcccgccaaaaacgtaaacccataatttttccgtcaaaaaaatgtaaacccgtgattttcccgcagaaacgtatacccataattttcccgccaaaaaacgtaaacctatgattttcccgccaaaaacgtaaacctgtaaacctgtgattttctcgccaaaaacgtaaacctgtgattttcccgccaaaaacgtaaatccgtaattttctcgccgaaaacgtaaatccataaaaagtggaatccgtaaatattctaagtttgatgataataaaataataattattaataatgataattatttattattgtttcataataataattaattaaattattacttaagtgagttaacccatttaacaactcaacccatcaaattaaatgagttataggttgaccaacccatttaacaaaatgggttagtcaacctataactcatttaaccctaaactcatttgattatgagttgagttgagttgggtttacctattttgacacccctaattatacatggtatagaagcaatcaatattgcgatcgcttaaacattcttgatttgataacatttttttggttttagtcgcgctaaacctatgaccacaccataatatgtggatttcgaatccacaaaaagcctcgcaaagattaattttatttatgaatcttttttgagatgccctcaactaacataagtaggagaagctagtgtatcttcatctatcgagaagttggatgaattatatatacattatacacatagtacggaagaaatcattgttgcgatcgcttgaacatccttgatttgataacattttctaggggtttttgtcgtgctaaacctttgatcccattgctcctattgacaaaagagacgtatgagaaatattttttttttcctttacatataggtattgaaaaagaaaaaaacgaagtcatagcttgaatgcaaatatattttgagaaatttttaattttgcggttgcagttgtaagagataatataagcatagcttatataacagcaaccactttgatctaatggttgatcaaaggtttaatgttttttacactattttgagatttcattccaagataatgtagttgtttttgtagattacgatgcaaagttttttgaaaattctagcatatttaacataaccaaaattcacatcaaaatatctaacggatagaagtatctaaagtatctttatgcttggctagatattggctttttcttttcttgtttgtcttgctttctgttgttcttacttttcttttttggtcggccatttttcattgtatttgccttcgtgttggtccgatcaatgagtaaacccgattactggaataggaatctcacacgtgttgacaacatacatgttgggctgacccgttttcgtttgtgcttatgacatcccaaactcacatgaccccaaaaaaatggaagaagaataagaaaacagtatatatgtataaaagaagacgtagaaaacatttaagaccaagcaaagaagaaaggattgcttcagtttgttctcgttcctgaccaaaaacaaatcataattttcagaatttctaggataccgaaaaaatcacacctctacgaaaatggtagtgtgtatatctaatgatgttataatatttgcaaatgagaggataatttggaaataacatttaagaaaacaaaacccggccttcttaaaaaaagactatggtatgggccaatattgagatttaagacgttttagcttattatagaccggacgttgaccctttgtaaccatcaagctctaaattaagcctgagagagagaaaactaagccgtacagctctagagaaagtgccattttctccctttttatcatattcagttttctttactactatcaaattatgcttatatttgaaaataggtgttactatcaaaaaatttcaaaaacttctcttaaaagtttcggacaattagaaccatctttttctaaatcatatatatgaaagaaggctaactctctcccacaacttgacacatcagcacatgagagcttgccacctagacttcataaaaagtaatacataattagtaattaattcaacataacaactaaaataggaggatataattaatcagaacttgaaccatcactctttctacatattttaattcaatatatcctctttttattttaagatccacttaagtggctaaagtgatcataaaatccaaacatggtacacatattccttgcctaaacattagacgattattatgaaagaaactaaatgaatatgcaaattaaatatatctaagcttttcgagatttatgctaagaaaacaagtaatttgaaagatgtttgaggagctattcttatacctaatacgtaagatataagattatgacaagaacttaactaaactttccaaaaacatcaagttgaatatgcttagattgaatatgcagaaacatggttaataaagacatgttatatttttagtgtaagaaataaattttctaaaatttcaccgtctcacaatctaaacatataaccaaaacaacaaggatatataaattttaaaaaaactgaaaatctaaaacaacaataaaaaacaactcaaacacattcggttttcagatgaactaatatagttggacttttcaaaaacaattagaaagcatatttatgtttcaaaatcgatgcattcaactttactttatatgaatagacattctataaaacaatttgtaaatagtaatacataaacccgcacgtagtgcggctactcatctagtactgaataattcttattaatcaaggaaactggagccatagtacaaagctagactacaaaggaagatacatgtcttcaaagagaaagattaaattattttcctaggaatataacaaaatattgaatagttcgacggttagaaaatcacttacaagaaaagaaaaagaaaaaagccaaaccaaagagaatatgacttaatgatccaaagtccaaacgaaattcaagaggttgaattcaaagtctgctaggcacatttccctctgccaaaacccttgccataatagattctcggacatcattcaactcttcgtagttagataccttcacaggcaagaaactaaaagcatctgtctttttcactaaagaagtgaatgcattcacaaatgcagaaggaacacagctgagaatcccttggttccacatatcatctagacgatgcaaggataaaatctccttgtatgatgaatggaaagttagttaccatctcggtgggaagaaacgcatagatactaggaggaaagctatctccaagggcaagacggtctccgagtagaaacaccaacgttgtcaacaattcctcaacttcgcctctccttcccacacggttctcatttttcaccgttaacttttgcctccacatgtagtaactaactgaatgtttttccacaagctgagagatgtatcatgtacgactcagcatcaatgctcttccttgacaccaaattagtctcgctaacaatcccgtgtgagttaacaatgctgaccttatcttggtagtggatctttgatagagaggcgcttgatctttgaaagaaacaacagaacctcaggatgaacattggagagttgttctttcactggctttactttgtcacttttcaaaggcatgattattgttgtggtcggaatagcagaaccaaaaccattaatcttttgaatatcgaccagagaaggacgtttctcaacccactcaggaacaatgtagccaaggttgcaattgcggtgctaagagcaaacatgattatgattggaaacacatatgaaaacgctggagtacatgaaaccaagcataacaagcataacattttccataattaagatcagcttgattccttgtttttgatatctactgactgtagaggatatatatggtctcgaatattagacttgcataaagaacatcagaaactcaactacacgtatatattcacatgcaaacatatctaaccaaacattatagaggaaaacacggactcacaaatagtatatgcacataaaaacaaagataaatgtgggttaaagagatatatacttacttggataagttccatgaggaagtgaacatccttggactagagctcagcggagagattcttcacagcctgatgaagatcctccgtcaaaggattataagctctgccaattgagaacttagtctcccggattagatcgatgtgttgctttgtcgattccgccattttttctacttccttcttttcttctctttgtgaatgttgtcatgttgaacaaaagagagagtgtgggaggaatttaaatagagacggagggaagataagacttagaaattaaggacttgaaggttaacttgattggctaaccaaaagacaaattaaatctcttgttatatagtataaagttactagaaaattaagttatgcaacttggtaaatcttaagttttaaagagaggaaaatgacttcgtaaatctagaatacgttgcttgttagaatgtgtgttcaacgtataaagtaagtagtgtgaaggatagttttttgcatgcatttttccaagtttttgttattaatagaatacgttgaacacacaattcaccataaacacatgatttcaatctatcaagccttcttccgtcaattgatcttttaagttccaattaattacaccagcatctatatgaccaatcacaacttacccaaaacatagcttctctaatcctcttagaacatccaatgaaactctacccatactccctcagtttttattatttgatatttgaaaagcaattttttgacaataaattaaaagattttttttttttcaatatctatatgatattttcaacttcagtgtaaaattactagtatttttattgattttgacgattattttattattggttgaccgtattctaaaaaataataaatgatattttagaggaaggagtattttatattatgcagattcgtaagcaaaaactttaaatatataacataaaaacaaagggagtatttttccactgttttctaaggaagaaaaaattatagcgcaacaaaatttttgaagacttctaaaataagttctaggcggcgaattgttatccactataccgtttttaaactgtaagtttaataattaaggtttgagttattttggtgtatgttttatatatattaaaagatgttaattaattttcatagtatatggacttggtgaatgctgatatggatctgaatgatcttggtctacatgtgttacagcggcgtgtggtatgctctcataaagtgatgatttcttttgtcttgtttactctgtaaatattcagagtcatacattttgcaaagtggttgagtgtgcattgtattacccactggctgctggatcttcctgttaaccttcatccaactaggttcttatctcgcattcattcagttgcttgctatcttcttcatccattgaacttgctcaacattcgaatcgctcacctcattagcctcgttttagacatcaacgaatcactttctcatgatgttccagcttacaaagattaccgaacggttagagagctcgagaacgagtgtatggcggtgcgccttacaagttcttagtggtcgaatttactgggtatatctctagagtgagatctaaagctctttgtttttaagaatatatttatttttaaatgaactttctacgctttgtttgaatttattgtcatagttcatagttgacattttgtttcttagaagattgtattaaaattttactttatagagttcatttgctcctttaaatcaattaaagaaacccaataactagaattttcatgggaagataatcaaccatgaatcacgtaaatacaaaatttagactatcaccttttatagccaaataatcattcaccaaaatctgaacatatgattaactaacaatgcaagtgtctcgcctaaataatatagatataatctacattattcatcccaaggtattgagtatctttctattaggaaatatccatattattaaatttggttaaggtaagtataagatattgtttttagtgtaagtaaatattttttttttatatctaatattgccgcatactaagtttttggacaaatataacactcaaaatttttttggacaaaaataacactcaaatgaaatatatttttttaaattaataattacaaaatataataaatatggtaatttagtgaatttggtttggcgggaaaattttgaaggacattttggtgaatttttttattttttattcagtatatccttcttgaatttggtgatttttgtttctttttaatatgattttttaatttatttaaatttaaatcagttttattatttattctgattttccaattaataaagaagtaaaataaaaaatcatcatcttcgactattcatcgtccgaccactaacattttagatttttattcagtactttgtatctattcaccattttttttattgcaattgttattataagatcccagttatccattggaaagagagataacactaccatagaaagaaatcttaattcgaacgaatcttgctaagattggaatttttgtttttgtttttgaaccacataaatattgcaatttctaaggcataatatttaagagatctttgctccaactctaaacaagaattagccgtaaaaaccatactcattcctttatgctctatataagagaaggtaaccatctcacataatcataactcaactaactttttattgttctcaaattgatgtttatatggatcaatccatactaatccaaaatccatggataaaaagagtggaacttttggatattggtagataggatttgatgagtttcatgaattagattgaaataggttgggttataatggattagtggattatccataaccaacccaatagagtgtaaaccatatataacataattaaatatctaaaccgatttagtaaagcgaaacaaaatattctaaatcaaatttgtacactcatatgacggttgatttgatgatggtgatggtaattaaacatgagaacagtccttgataacatgctaaatagaacatgcttaaatcgaacatgagaatatgcttattgaagattatgacactcggtttgatggttaattcgatgtgatggtgatgatgattatgatgatgatggttattaattaagtattaattatttaaattgtaataagaatatacaatccattaatttaaatgagttatggtcttacgaattaatccaaactatttgctaattgagttggttggtctccctaactccatatgagatatatgagttggtttgatttggtttaactaatttgacacctctactttcatatgatcttatatcacaattatcaatcattgctaatagttaggttatgagttccaccaaatcaataggtaaaaaagtatctcttatgattttgattaatactttgctgtaaatattgatcggtgtattaactaatttgtatttgcaaccgtatacattgcaagaaatgttggaacaatttgcgagaaaagtctaacagtttacacagcgcagaagtaataaagtcattacatggaagcaatattggtgaaatgcttaatgattatgaatagtgatgtatataaaaatcctcctttttttttataagtctttttctaagatttatcttttcatctcatcctaacaattttgtattaaaattctactatcatcagatactcgagaagatgtatttgggaagttattgctgctctatttcgaggtaaattcttggacttaataatacttctggttatactcgagacaattaccatactaattggtaatttaattttcatattattgatttcagtgtaataatatattttggttgacctttgtaatctaacatttcaatttaatattaattgtttgatttatttactctccacttggattatatgtgtatcttaagtcttaacgtaaaaattgtcatttcattgatcaattgtttttcttgctatgaaggagtgtttacatacaagtaaagtagttcaatcaattcgttaatttgaattttctctctaacttgaaattgatgggttttttttggggaatttttatatcagttttaagtgaaggtcactataatttcaaaaatcagaaaattcaacgccttcaatgtttaactttgtttataaactattttgtcaagaaaacaaaattttatttgttaacaaacatcttatttgtcaaacataagttagatatgttttatgtttttgggttggactaccaatgtttcttattttgttcttttatctactcatcaagttaatccaaattagtactattttaatttgatcaaaaagaaaaataaaatccatattttcaaaaagctccttaatatatcatatcgaaaatgagttagaatcaatatgaatatatattagataaatataaaacataattattctaacttaaaattgatgtaatattcatagttagatggaaaataaataaagaaaaattattttagttaaattataagaaaaagtgataattgtactaatgatatatatatatatatatatataaatgagaaggattgtataaactttatgtcacatatttaatattctatattctaatggtttatgttattttttattcattatgtatatatacacactctgtttaccaaaatcctataatgttaatgtagctaaatggttgagtgtctcttatgaatccaaaaagtcagatgtttgattccccttgatcacaaattttgcttcttattttctaatgtctagaatgacgtcattttgattttacggagattctaacggaaagataattccgtgattgacatatcctaaatggccaagtcaatgaaagtatgaaacttgattatttttttcaaaagtcaaactaaattttaggatttaaatgtcttcttgaaagttcatgttttttcatctcaaatttaaaagtttgggtttttttcgacattttccaacaaaaaataatattttctcttgtttctttatttgttttcagaaaaattggtatgtagctaatttgtctcttcaaaataacattttttaaaaaaggaaaacaaggccttagactttgggcctttcttaagaaaaagactttagaatgggccaatattgagacagtgtacttagctcataaaccgggcgttgttgactccttgtacatataaccgtcgtgttttaatatacgcctgagaacgagaaaacgacgtcgtataaattcaaaccgccgtcgatcgtcactacgtatataaagggcttttaattacacggcgaagtctctctgttctcaagaaattaagaaactgagaaaaaaaaaatgggagtacaaggtctttgggagcttcttgctcctgttggtcgccgtgtctccgtagaaaccctagccaacaaacgattagccatcggtaaacaaatctccggcgatcaacttcaattgtattgtattatttttccggcttcttcttcatcgttcgaatttgcagatgcgagtatatggatggtacaatttatcaaagcgatgcgtgacgagaagggagatatggttcagaatgcacacttgatcgggttttttcgaaggatttgtaagcttttgtttctaaggactaaaccgatcttcgtctttgatggagctactccggcattgaaacgtcgtactgttattgctcgccgtcgtcaacgtgagaacgctcagactaaaatccggaagactgctgagaaattgctgcttaatagggtttgtttagtctcgatttggtgtggttggttataattagcaagtttttgtgaggttttgagttggttttgggatttttgttgttgtagcttaaggatattaggcttaaggaacaagctaaagatattaagaatcagagattgaagcaggatgatagtgatagagtgaagaaacgtgtgtcttctgattctgtggaagataatttgcgagttcctgtggaggaagatgatgtaggggcgagtttttttcaggaggagaagctagatgaagtgtaagctgttaaatttttgttgttttttaaccgtgaatttcagttttgttggtggaatttgctttaatgagcttagttgttgtagatctcaagcatctttggtgggagagactggtgttgatgatgttgtcaaagagtccgtggtaagtgaatactaaaacattgaattgcaaagaaatacattagatggtgttgttggactgacttaggtgaattgtgttactaagtatccacttcattccttttttgttcattagttgggatttgttggcacagaccaactccaaataatttgatgctaattgtgcatgtctgtcatagttgatattctttttgttccattttatgccattagtcatgcatcttgcggtaatgaatcagaagctgggaaatctatttgacgctgtgttgttgtgatgtcttacctgttatttatttgctttcacatgcccttccttagtcatggtatttttatgttcaatccttaatatgtcaattcttttactgtcattctttcttcagtaatttgtaaatgattttttttgttgagatttatataacgactatgatttgtttgttggtgattcgcagaaggatgatcccaagggaaagggagttttgttggatggggatgacctagataatcttgtacaggattcctcagtacaggggaaggattatcaggaaaagttggatgagatgtaagaagagtaattgagatattgattgaggatgtttatttgattgaagagtaatttcgtgttttcctgtcttggtgtaatataggttggcggcatcccttgcagctgaagaagaacgaaactttactagcaaagcatcgacttcagctgcagcaatcccgtcagaggaggatgaggaagaagacagcgacggagatgaggaaattttattggtaatatgtggtcttcgtactacatctttctcttgttttatttattgttgcttaagttacagatattcaggggatataaattggttatgttgaagatactttagttaagcaatcaacaccacttgtcaacttgtctgctcctctttctgcaaagggaaaaattgcttattctggatgaaatcctcatttgcttagtaaagaatcatgataatgtctttggaattatgtgtcgttttttcgtctttattaaggagttatctgatactttaccatcctcatctgctaataagattttgtctacctttctagccagtaatggatgggaatatcgacccagctgttctggcttctctccctccatccatgcaacttgatctccttgctcaggtaattaactatatttacaccatatctttgcagcatgttaaatttcatggacgtttcagattatttaataatgtctttacttgtagatgagagaaaaattgatggcagaaaaccggcaaaagtaccaaaaggtcaagaaggtgagttacataaatcactggctcattcttggtccagttatgtatttgaatctctatgtataaggagacgcggaacactgactatggaagtaattatgtataggcccctgaaaagttttctgaattgcaaatagaagcatatcttaaaactgtagccttccgtcgcgaaataaatgaagttcagagatctgctggtggaagggctgttggtggagttcaaacttctaggatagcttcggaagcaaacagagagtttatattctcgtcttcttttgctggtgataaagagtgagtttcagtttgaagtcttattaaagaataaggttctttctaaagtgaaaataactgatatatttaatttgttctagagtactggcatctgccagagaaggaagaaatgatgaaaatcaaaagaaaacgtcacaacagtctttgccagtctccgtcaagaatgcttccccgctgaaaaaatcagatgctaccattgagttggatagagatgaacctaaaaatcctgatgaaaatattgaagtatatatagatgaaaggggacgttttagaataaggaacagacacatgggaatccaaatgacacgtgatatccagaggaacttacatttgatgaaagaaaaggagagaacagcttctggttctatggctaagaatgatgaaacattcagcgcctgggagaactttcctactgaggaccaatttcttgaaaaatcacctgttgagaaagatgttgtggacctggagatccagaatgatgattccatgctgcatcctccatcttccatagagatatcatttgaccatgatggtggtggaaaagatctcaatgatgaagatgatatgtttcttcaattggcagcgggaggaccagtgacaattagttctacagaaaatgatcctaaagaagacacttcaccgtgggcttctgacagtgattgggaagaagtgcctgttgaacagaatacttctgtctctaagcttgaagcgaatttaagcaatcagcatatccccaaggacattagtatcgctgagggtgtagcatgggaagaatatagttgtaaaaatgccaataactccgtggagaatgatacagtaacaaagatcacaaaaggatatctggaagaagaagctgatctgcaggaggctatcaagaaaagtcttcttgaattacacgataaggaatccggggatgtccttgaagaaaatcaatcagtaagggtaaatcttgttgttgacaagccaagcgaagatagtctttgttctagggaaacggttggtgaagctgaggaagagagatttctggacgaaataacaatcttgaaaaccagtggtgctataagtgagcagtccaacacttctgtagcgggcaatgcagatggtcagaaagggataaccaaacaatttggtacacacccttcttccggttctaataacgttagccatgctgtgagcaataaattgtcaaaggtaaaatcagttatctcacccgagaaagcattaaatgttgctagtcaaaaccgcatgctatccaccatggctaaacagcacaatgaagaaggttctgaaagttttggtggagaatctgttaaagtgtctgctatgcccatagctgatgaggaaataactggttttcttgatgaaaaagataatgctgatggtgaatcatctatcatgatggacgataagagagattatagtagacgtaaaatccagagtcttgtcactgaatcaagggacccttctcgtaatgtcgtcagatcgcgaatagggatactacatgacacagattcacaaaatgaaagaagggaggaaaataactctaacgagcacactttcaatattgacagttcaacagattttgaagagaaaggcgtgcctgttgaattttcagaggcaaatatagaggaggaaattcgagttctcgaccaagaattcgtaagtttaggtgatgaacagagaaaacttgagcggaatgctgaatctgtgagcagtgagatgtttgcagaatgccaggtttgccccttgtctttatacatatgagtcattgtcctctttatacagcccttttgcaaactttccgaagtttctgttcgtgtttgatttgacaacaaacttataatgctttgtcgatcttggttttccgtaggagctactccaaatttttggcataccgtacatcatagctcccatggaagcagaggcacagtgtgcatttatggaacaatcaaaccttgttgatggcattgtcactgacgattctgatgtattcttgtttggagcaaggagcgtgtacaaaaatatatttgatgatcgtaaatatgtggagacatactttatgaaggtgtgcatttcctttcttacactctgttttccaacatgtggatttaagtacctcatttctttttattttggctgtgatgatcacataagcttccatcatactatctatggtttgtcctctgttataacttcttagctcttctgtagtttcctctggattgtaacttttttggtagtaggttaaattttcctttatcaggaataagttgatacattgtttcggtagtaagttgatatatttgtatttatcgatctgtttgaagttacaatttaaccgcatgcattcactttttcaaatgtctggtgattacatctctaatctcttttgatttttcaggacattgagaaggagttaggcttgagcagagataaaataatccgcatggcaatgcttctaggaagtgattacacagaaggaatcaggttagctgaggttttaactgcataaggtcaaagttccgctctttatgtaattgatatcataattgttttgacatgcagtggtattggtattgtcaatgctattgaagttgtgactgcttttcccgaggaggatgggcttcagaaatttcgtgaatgggttgaatcacctgatccaaccattttaggaaagactgatgcaaaaacaggttcaaaggtaaagaagcgtgggtctgcctccgtagataataaaggaatcatctcaggtgcctcgactgatgacaccgaagaaatcaagcaaatcttcatggatcagcatgtatggctcttttaccataacttaatgttaaatttattatggtccaacttgttcaagattgacaaaacctttctcctaatttgattacgatttgaattttacagagaaaggtaagcaagaactggcatattccattgactttccctagtgaggctgttatatcagcctacttaaatccgcaagtggatctgtcgactgagaaattctcatggggcaaacctgatctttcagtacttagaaagtaagttgttcctttacttaacatttcatctaaacagtatggcatagcttgacctttttttttggagccacttacagcggcagaaaggtttcaatgaatctgaagtatatgaaaaatatatatatcatgacttgtccgatggacccggtttctgtaataatctacttatcaatttatgaaacaatgtcctgagttctgattctgtagtatcactttttgtgaaggctatgctgggaaaagtttaattggaacggcaagaaaacagatgaactactactaccagtcttgaaggagtatgaaaagcgcgaggtcttcatctaacatttgatctcttatcgttgatatgcttatgaataaataatatgaacagaatctgacaatttgttttctttccacgaagacgcaacttcggattgaagctttctattcctttaatgaaagatttgcaaagatccgtagtaaaagaatcaacaaagctgtcaaaggaattggtggaggtctgtcgtcagatgtggccgatcatactctccaggaaggtccaagaaaacgaaataagaaaaaagttgctcctcatgaaactgaagataacaacacttcagacaaagattcacctatagccaatgagaaagtgaaaaacaaaaggaagcgcttagaaaaaccatctagtagtagaggtagaggcagagcccagaaaagaggacgaggaagaggaagagtccaaaaagatctccttgagctatccgacggcagttctgatgatgatgatgacgatgacaaggtagtggaattggaggcaaaaccggccaatcttcaaaaagtgcgaaaggtaagctttcttaatggaaccaaattacttcttttaattgattatgtagtgggttcactttgttatctgtcattccccagtcaacacgatctcggaatcctgtgatgtacagtgcaaaagaagatgatgaattggacgagtcaagaagcaatgaaggatctccgagtgagaatttcgaagaggttgacgaaggcagaataggaaatgatgattctgtagatgcatcaatcaacgactgtccttccgaagactacattcaaacgggaggtgggttctgtgcagatgaagctgatgagattggagatgctcatttggaagataaagctaccgatgattacagagtgatcggtggcggattctgtgttgatgaagatgaaacagctgaggaaaacacaatggatgatgatgcagaaattttaaagatggagagtgaagaacaacgaaagaaaggtaaacgtcgaaacgaagaagatgcatcattggatgagaatgttgacattcattttgggaattcttcagctggaggattaagtgcgatgcctttcttgaagagaaagaagagaaaaaactgaaaaaacttcgtttagttttatattttagtaaatggtaaaagtaattaggggagtaaaaaatgtatgatatttgaaattttcttatgtttaactgttttgagagaatcaacaaatgattatgatgtgaatagaattagaatcttgaagttacaagttttaagtggttttgcggcaaacgataaaggtaaacagtaaacgttaaaaagaatgagaatcaaacagttttatgatccattgacgatggtctccttttaccaaaccctttgtttctcgagaaaaaaacattcttctacataaaatttctcaacaagttttgagtctaactacatttttcactgaaatatttgtttgccttcgagttgacccagggacccggatactcacgggctcggttgtaacatgaagcccactgttaatcaaatcatatgttatcagaaactgaattttgaaaaacctttctcttatttatatttttgagaacggtttccaaaaatgatattttccaaaattttcgaaaagaaatatatgattcaaaaataaactgagaaatgtgaagaagcactaacaagtgacaaccaaacattcattagtttaggctgttgaccccaaaaacaaatataaagtttaggcttcaaacctctattcacgttacatgattatattagggataaccataacaatctaatcgattaaatccttcatccaaattcaaattatatgattttgaagaaactgattgagttccttttgttacaagattgtctttggcagaaagaatattttgaaatgggtaaacaataaattattgaaaaacgaccaagatttgagaacgtgcaactttcccaaacatcagacaccagattcaatcttccatatggaccatatctcatcggcactggttgctattattgtgtaacgatagaatcgtgaaaaacaaatacaaaatagaataaatgatcttaatataccaaattgagaaagaaaaaaatacaaaataaatatgtgattgtatatatagacgttttatgaatatatgtctagagatgtatcacatcacatcactgaaacatatatttttgtagttttacttttactatgtttagattggttagagatgcaactgtaggttaattgttgtaaatgtagctttgttttttttttctctgtataaaatatcttatagtatctaaatatttaatataactgttttggaaaaagactcaaatatgaacaaacacaaaatatttcgagaggtattactggtaaagtcttattggtaaatcaaagtctggagacattaccaattcacatacatattttggtagagtaactattaagtttaaaattatattatcgaattacagttaaacctttataaattaatactcgataaattaataatctttacaaattaataaattcttccagtctcgagttgggaccagtgtaaaaagtgacacaaatcgataaattaataagataataacttttttgaaagtcctatgtaaatatatggtcccatcaatatcataaattaataattgtataaatgtatcaattatatatatacattatatgtaagaaatttttttgaaatataattctaataattttttgcttaaatttgtatttattcttatttaaaatttagatttagtattttactgtatcaaaaacttttagtgttgttttctaaacatgatattatgttttacttgtaattgatttttgaaagatattttctagaatgaaaaaaatcctttagaaatttttgaaaagttactaaattaggaaaatctctctataaattaataaatattaatttatcgataaattaaaacttctctaaattaataaaatattgcagtcccaacattattaatttatagaggttttactgtatatgtatttgttgtaactcacgggttcaatagtgataaaggttaatatttctatatcatgattgaatttgattcccattgaacattaactatgcagattaatggcgacaaactaacggtaatctttaacatcggtgttgataaatcatgacgaagtgcttatgtgaaaagtcgttcacaaaatcgtttaccatagaaaaatgaaaagatttaagatttgttaatcatgaatattaagacaattatttattacaaaattcaaaatttaaggtattttctaatgatagcgtaacaaattaaaaaaaatacttatttacacagaatattatttatactattttttttctaacatgattttagtcttaaccaaataagtttgtaagttcaaaaatgtgttggttatctattataaaaattacaaaatttgattgaaaaaataattataatgctgattgtaactattttcgtaaaaatgctaattgcaatataacttttctataagattatttttttatatagcttttatttatttataagtctaattaaaacaacatgtacccaaaataaacaaaacacaaatcatagtcaatggtgtttaaaaactaatgtctcaaaccaagaaacatatcaatctcctttagtaatataattataatcttaaagttatttgttcacaactttttaaagagcttaatttaagtttatgatttgaatctaaaattgagaggtgggcaggacaaagtgagatgtcgagacaaaaatacagataagctaatttgtgcggtggattttacacaaactttgtcagtcacgagactctttcttattctaatggcaccaaaccctagttttgttcttttcttctttacttttttatttatcataaatattttatttggattctcatactctcatatgtctctttccctattgaccatatctttttatctcatctcttccctttcttgtgatataactttttactctattattatgacaagtcggggctagatatggttgtagtccaatgatcttattatttgctagactatagatttatatgtattggacacacacacttgataagaccatattttattgattctattaactagtaagcactaaatatagtctcgatatttttagtcttttttttttttgtcatctgaaatttaattaataaaacttgttgtggaaacaaggagagatacatatgcccaaacaagggaaactaaagctggcggacaaaagaaaagtccccagaaactaaagccggcggaatacatgatttccccggaaactaagccctgtgaaagggaagttaaaaacaacagaattaccaaacagaaaattcgaatcgaaagaggacgatgctataaactaagaacagaggaaaaaggctaaaatcctaagggaagcgataaaccaaagaatttctcgatatttttagtctacaaatcataatttcttttacgattcaaaattatatattttcgacaaataatttctattattttatctaaaaaactcggataattagtcgggtacggattaggttatgaaaataccttcgtaaaaccttataatatgatattgttttccggatattcgagtgggtgttctgacctcaaatgaagataaatccctaaaaccttgtaagttgtaacatggttttagggaatcatgttaatttttttggcaggatagggaatcatgttaatggcattaactaatagtgtgtacctaattagtaaagacatgtctattaagagaaaattgactaaaccggacaattttggttagaccggataaagaccatgtggtccatttagccttagtgatcatatgtatactcgatctagttgtaagttgttgtcatgtagctaacttcagaatcttactcactaacacttcgagtttcttctcattggcacaaaacttaactccattctctttttctctctctcttctatctttcaccaaaatgccataactctctcttcccctatataccaaaaattaatctgtatctctctatccatcaagagagagcatcacaatgggcaaacagagaagaaccatgatctcatttactctgtttctcacattgacaatgatgtcatcactcatcaatggcgataccgactcaattcaactaaacgacgacgttttaggactcatcgtcttcaaatcagacctcaacgacccattttcacaccttgagtcatggaccgaagacgacaacactccttgttcatggagttacgtcaaatgcaaccccaaaacatctcgagtcatcgagctttctctcgacggtttagccttaaccggaaaaatcaaccgcggaatccaaaagcttcaacgtttaaaagtactctcactttccaacaacaacttcaccggaaacatcaacgctctctcaaacaacaaccatctccaaaagctagatcttagccacaacaatctctccggtcaaatcccttcttctctcggttcaataacctccttgcaacaccttgacttaaccggaaactccttctccggtacactctctgacgatttgttcaacaactgttcctctcttagatatctttctctctcccacaaccacctcgaaggtcaaatcccaagtactctgtttcgatgctctgttttaaacagtctcaatctttcaagaaaccgtttctccggtaaccctagcttcgtctcaggaatctggagacttgagaggttaagagctttagatctatcttctaactcactttctggttcaatacctttggggatactctctctacataacttgaaagagttgcaactacagaggaatcagttctctggagcattgccttcagatattggactctgtcctcatttaaacagagttgatctaagttccaatcatttctctggtgaacttccaagaactcttcagaagctgaaatctttaaatcacttcgatgtatcgaacaatttgctctccggtgatttcccgccatggatcggtgacatgaccggtttagtacacttggatttctccagcaatgagttaaccggaaagcttccttcttctattagtaacttgaggtctctaaaggatctaaacttgtctgagaacaaactctccggcgaggtacctgagtctttggaatcatgcaaagagcttatgattgttcagcttaaaggcaatgacttctccggtaacattcctgatggtttttttgatcttggtcttcaagaaatggatttttcgggtaacggtttaaccggttcgatcccaagaggctcaagcaggcttttcgagtcactcataaggctcgatctttcgcataacagtctcactggaagtatacctggtgaagtaggactcttcatccacatgagataccttaatttatcatggaaccatttcaacacaagagttcctcctgaaattgagtttctacagaacttaacggtattggatcttaggaacagtgcactgattggttcggttcctgctgatatatgtgagtctcagagtcttcagatacttcaactggatggtaactcactaaccggttctataccggaaggaatcggaaactgctcttctcttaaattgttgtaagtcactgtttcttgtatacatttttgcttcattgcaaatgttttcgtatattgattacaagttttcttgttgcaggagtttgtctcataacaatcttaccggtcctattcctaaatctctttcaaacttacaagagctcaagattttaaagctagaggctaataagcttagtggagaaataccgaaagagcttggggatttgcagaatctgttattggttaacgtttcgtttaaccgacttatcggaaggttaccattgggagatgtgttccaaagcttagaccagagtgctatacaaggaaacctaggtatttgttcaccgttgttgagaggtccttgtacactgaatgttccaaagcctcttgtcatcaatccaaactcctacgggaatgggaacaatatgcctggaaaccgagcaagcggtggttctggaacattccaccgcagaatgttcctgagtgtttcagtgattgtagcaatatcagctgcgattctcatcttctctggagtcataattataacgctgcttaacgcgtctgttagaagacggcttgcatttgtagacaatgcgttggaaagcattttctcggggtcttcgaaatcaggaagaagcttaatgatgggtaaacttgttctgttaaactcaagaacttcacgttcctcgtcttcgtctcaagagttcgaaagaaacccagagtcacttctcaacaaagcttcaagaatcggtgaaggggtttttggaacagtctacaaagcacctttaggagagcaagggagaaacttggctgttaagaaacttgtcccgtctccgattcttcaaaacctagaagattttgatcgcgaagttcggatattggcgaaagcgaagcaccctaatctagtatcgatcaaagggtatttctggacaccggacttgcatcttctggtatcagaatacatccccaatggaaacttgcagtccaagttacacgaacgagaaccctcaacaccgcctctttcttgggacgtaagatacaaaatcatcctcggtacagctaaaggactcgcttatctccatcacacattccgtccaacaaccatccacttcaacctgaaaccgacaaacatcctcctcgacgagaaaaacaacccgaaaatctctgatttcgggctatctcgtctcctaacaacacaagacgggaacacaatgaacaacaacaggtttcaaaacgctttaggctacgtagcgcctgaactagagtgtcagaacttaagggtcaacgagaaatgcgatgtttacgggttcggggttttgatactcgaactggtgactggtcggagaccggtggagtatggtgaagacagctttgtgatacttagtgaccatgttcgagttatgttagaacaagggaatgtgttggagtgtattgatcctgtgatggaggaacaatactctgaagatgaggttttgcctgtcttgaaacttgctctggtctgtacttctcagataccttcgaatcggccaacaatggccgagattgttcagatcttgcaggtcatcaattctcctgttccccaccgtatcatggatagtttctaaacatctttgtgttatagttaatttttcattagcttttctttttgcaaattttactttgtctgtgtcttttgttgtggtctttgtgtagagattgcttatttcacaatgctacgctttctgttccttcgttatcattatcgtaacaatcattgaccattgctatcgtgacattaatagtttttttcttttcttttatgagaattaattctacatgcatttagcaatagtacaattacaaatgtagaacaatttctcacattgaacaattaaaaacatattataaaaataattataaatttatcattctagatttaattttcttatatttttggttgctagtgtaaatcttttaaattgcaagaatactcgactttctaaaggtttcaaggtagtgacggattcaaactttttagtaagagcaaaatgttaaaaaccaatttttttttataaaactcactaaaagagtatatcataaatactaataacaccctaaaatgtttttttttggaattaatttttcattgctttcaaatttaatttaaataacagaaagtatattttgttttaggtaagatatatcataacaaacttgtacttgtggttaaattaagttgggtagattgcattcaacgtattctaatcatgtatttttcaaatagatatggttctgaaagacctatgaccaaatcttatcctttatctttctctgttgatgttaatagaattgtctgtctttttttttttgggaatagttcttgattttgtgtgtagaacaagaaaatgtgaaactgtcattttataagcagtaaaaaataatttgacttgctaaaaagataaagatagttatgaaaatgactaaagggtttattatgtcccatgtgaaaaatgaattttagccgtttggacgaataatttctcttgataatatattattttttacgtgacgtataattcatcaaatacattaacgcattcttttttgtaccatattattttttatataaaatttttgatctggaataagtttatatatccgtcatatatatgtgcagtttattgttttggggttctagtaattacttctatatgatcacttaatgcgttaaatattttgatatatccatttacgcaaatatcaattgattcttaatgttttgtaagttgtaaccatcttgtatggggttagcccaatgtgtttgtatccaccatatgatccctaaatactcaataaaaatgaaaaccattcgacaaaaaaattatcaattgattatatatttcgttttgcaaatactcttctggttttttctaacaagttttcctatgcggtttctaagtaagttatgtgctcttcttgttgcaacttaatccaaagacaaaaatgtagtcaataaataatcaaaatgagttggttcatgtattagctttctctgaaaacaatctttataaaaaaatacgtttggaacaatgtttgatatatgttatatttgatttaattattgttgtccgtccattttggttttctttataaagaaacacactaattcaaagcattcaattaatacaaggtggggtggcttaaatcgggtaagaaggacagaacaataatgtggtacatattattgtgaaaggttgttttcttattatctttttttttttgtattcgacgtcgttttctatcatctaataaaaaagtttctgattcttttatttacttgtaggacaaaatcttttgtcactaattgatttcttacaccgtagctttccatcaaattgaaatacacacacaaacacaagcgcatcacgtttcacggctacaataatgttcttttagattttgttattttcctaaatactgacgtaaaagtcatatccaatataattgttttgtcttttcaatttctttttatgggcagacccaaatattatgcataaacattatatattagaatatattttagttgttagtgagctaattaggttttattgtatggcgtgtggaaacggcatgcttccattatatgcgaatggtctaaaccatgtgttttggtattcaattattatatagacaattagttaggccttggcttttttttttgcgattatgatataatcttatgaacctgataaagagaagatctaatcttatgaacctgataaaaagaagatctaatcttggttcattaaaataaggtagtattaaatttgtacggaagttgataagttgtatacctaatttttttttttttggtaaaatgtaaagtatttagggtaaattagctaaataaccaattcctgaaaagaaattaaatatctagcaccataagttgccgaattcagagagtaacgcatgaggtgtgtgtaatgacaacacactctttcaccacacactccttcacccaaattctatacatatcatcatagaaaaatagaatagtatatatttgttcaaaccaaaactttgattccgatgaatccaaataatcaattatatattttttgatggaatgatactaaaccctaagataatatatagggaacctaagggttttaatctaaaacaatgattaaatcacttaacatccttaatcaaaacaaacaattcattttaaaacgtatatagtacaatgtatacgtaaatagtatattcacaaaatagaatagtatctctcaaaaatcttccaaaatcaaaatcgatttattggctatttccctttagaatttccaacatcgtaaaccctttatcgcttctagatctaagaaatccataacatgatcgtcaatttgttgttcataattctcaattttattttccatggatttacaaattaaaattctcatatgaactttgatgggaaagtgaagattaatttgacataattggcgaaaggatttcaccggatttttctagtattctctggctgacgaagaataaatatagtcagagtattattgcgctaatggtgttgttataaaatagagtaaatcagatttgagtgatcctatcgacatttaagattgatccatatataattttgacttttgtttagttgatggtgatgtatgtaaagattcgtaagaaaagggcgagatagatgaaaggagcacacttcataaaagagaagaagatttattcacaaggatgtcttttgaagaagaaagaagaaggagagcgagatgtacaaacacagtaagaaaagggagagagagatgaaaggagcacacttcataaaagagaagaagatttattcaataggatgtcttttgaaaaagaaagaagaaggagagcgtgatgtacaaacacatgatagtattgtcaatattatatatattatacataatatttttttctattgtttgaagtgttagtttaccaattaaagtatttttgttggttatatttgccaattccccaagtatttataccattttcgaagtttcgacataagttaaaaaggatataagaaccggaaaaataacgaaaatctacagaaagaacagacaatgacaaaacaacaaaggaggaaaacatatgtatagagcgaaaacaaaagaagaaacaccgattccaaaatgccaaactcggaaatttgcgtgatttcctccacaactccaagaagctggagtctcatcctaagttgtatacctaatttgtttacagaagttatctatggtgctaaaaaaaatggttttaacacttgaaaaaaaagcttttactaaagttatatatatatggtttagtggttttctttagtgtatgagtcgatatgagaggacagtaaaagataaatcattttttatataaaaaagctgttgaatattatttgttatttgtgataaacaatttgaatagtaaaacatgttacataatttctttagctagtgcttatagaaaattgattttaaaacaaaataaagataaaagttagtttctattcaaaaaattgaaaatgattgccacatcatttaaaactaaaagttaaaaattaaaggtaaaattggttttttttttttgaaatcgctttaattgtaagggtaaaagtggatatttgtttttactgaaatcatgagtatgaaaataacagcaattttttttggataataaacgcacattttaattattatgtgtattttttccaaccaaaaataattgagtattcaacgtctagataaaaaagagactgagatttttttcgactttttctccaaaaaaaacgaagttccaaaaataatgatgaaattagtagtggtaaatggtcaatttaaatccgttgctacaaatcaaaatttaaatctgtaaattaactaaatctattaaattattaatgaaaaccaatgtaaaaagaatctcaacttctcaagcatactttgtttcaaatattctactattcaaaatactcccttaaatcataacctgaaactcacataagctgatccaaaattgaatttcattccacaatttttctcttaaacttcatataaacatgtcagcatgttacacggccttttttgtctgcttcatatatctctcaagtgtgtgtactacacaataacatttcctgaaaatctaactttcacccactcaccatcttttcttctctctttccccatcaaaaaaaacaaaaacaaaacacaactctgtttctctcatcttaaaattcatgtaaaaaaaatctacaaatcaaagagagaaacagagtaaagagaaagagaagaagatggcgcggaaatactttcagagagaagttttgccggtaacggctttggtaataatggaatgtgcaaacgttggtttaaacactctgtttaaagcagcaactttgaaaggcatgagctttcatgtcttcatcgtttactcttatggtctcgctgctctgcttcttcttccttctctgttttgctctttcaggtctctctctcttcttgattcgatctcgatactaaatttttcatctaatcttgaaaattggctaatcggttcttgtttaatttcacagatcaagaactcttccaccgatgaatttctctattctctacaaaatcgtgctcttagggattattgggtaaaagtctcatctcttgaaattttctaccaaataaaaaattctcagttcttgaaatttttctttaatttcaagcaatacctgagtgttgctgaaataggttaatttgatctttaattacctgattagatcaaattttttgcatgagtgttactgaaattctcagtttttgtttaccaaaatttagagaataaaaagtatagaaagagacatttggcttaaagttggttccaaaagctgcaactttactgcaaaaatctaaaaacattattattattataaacaaaaataaattcaatttttgggggtttatttatatgatttaatcttagtaaaaaaatggaatatattatttggttttggttataaaatttttgattaataaaagtgtgtgttgacaatgtatatagatgctgttcatgatttattcttagtaaaaagtggaatatattattttgttttggttataattatttgattaataaaaatgtgtgttgataatgtatatagatgctgttcaaacataatgggatacacagggataaattatagttctccaacacttgcttctgcaatcagcaacctcactcctgctttcaccttcttgcttgcagtcgttttcaggtttgacaacaacatttctatatcctatttgacatattccttttacattatcaatttacaaaattaccctccgtccattaactgtatatgggccttattgtttagcccatgaggttatgatttgaaaacgtttggtgtaatgttgtaggatggagagtgtgtcttttaagagaacaagtagtgtggctaaaatgttaggaaccgttgtttctattggaggtgcatttatagtgactctttataatggtcctgttgtgattgctaaatcgccaccgtctgtttctttgcgatcgcaatcgactaaccctaattggatacttggtgcgggtttccttgcggtcgagtatttctgtgttccattgtggtacattgttcaggtctgaactctatatgcatatataacatatatgtcactatgtgagttttttggttttctgatagaatcatatgttctcaatattttttgtagactcaaatcatgagagagtatccggccgagtttaccgttgtttgcttttatagcataggcgttagcttttggaccgcgctagtcacattgttcactgaagggaatgacttgggtgcatggaagataaaaccgaatatagctttagtgtcgatcgtttgctcggtgagaatataattacactcatgtgtttttccctagagattatgagtgtgattagttttttgacaagcaaaatggttttattttggttgattctatttctatgtttagggattgtttggatcttgcataaacaatactatccacacgtgggcattgcggatcaaggggcctttatttgttgcaatgttcaagccattgtctattgcaattgctgttgcaatgggagttatcttcctgcgagattctctctacatcggcaggtacaaaaacaactcacacttttatttaaatagtaacgggtgagtccaagattagtttgggacttgcggttatgttagaaccatacctcaaaaaactgtggaaaatattaactagtcattctctaattctcagctcactttaactcttttggtttcctttctttgcttgaatgatgatcccagcttgatcggggcaacggtaataacaatcgggttttacacggtaatgtggggaaaagccaaggaagtggccttggtcgaagatgataacaaggctaaccacgaggaggccaatgaagctgaccttgattctccatcgggttcacagaaggctcctctcttggaaagttacaagaacgatgaacatgtatgagtatcatcaactagtgaagatcacgctatatatatatgtgtgaaaaaattcatatgtgaattgtctttgtaatttatttgatgagacaaatgtgatctttaattttaggatccaagtgttttctaatcacaatctaacaagtcctttttatatcctttttttcttagtctttcacatgatttacactagaatgattccaatatccttaagaataagactaattcttcacttaagatttaagaacatcttttagtgataactgataactacaggttttggcgaccaattttcatttgttttatagtccttgatagtggtgacgatatgtcctggatttaagacttactatgaactggaaaattaattgctcatcaagaaaagatatttaacctaaaaatctcaaaaattatcctaaaaatctttgtcctcataactataattaagttactaattaactaatggttagacattttttttttttaactatatagtaatagtgtaataataattgttgaaagtggtttttacttttactgcggtgggatgcaaaagtaagttgaagttgagattctaaagctcctaaattggtcaaaccgtcaaaccagagtttcagattcagacaatcaaaaacaaaacaaaaaaaatggctgggagattctgtcaaagagacggcgggatcatgacggcaatggtggcggtggagattctgacagagtgtagccaaagtagttggaacaatagtttgcattgtgggtgcacttgtggcaactctataccatggccccatcgtcttcgccgcatctaagccgtccttttatctccttcagcgtctttcggcacctccctcgcaaccgtccaattataattgggtcatcgggggaggtcttctgggttgaatacactctcattgccgtcgcttacattgttcaggtataaagaaaattaacattgtaatactttggtcatacaaggtatatctattgatttatttaatttcttcacatttttggtgggagtagacacatataatgagggaatatccgtcggaatttgccttggcactttcccacaatgtctgcgtttcaatctcttgtgcatttgttagtttattcgtggaggagaacaatcctagcgcatggattatgagatcgaaaattatgttgatatgcatcgtcgcaacggtatggaaatgtttctatatatagttttaatcaatgatcttattttgttaaatttgtgtaaatgatacattagggggtggtgaattcgacgagctatgttgttgaatcatggacagtgcgatataagggggctgtgttcctagcaatgttcaggccattatctatcgtaaccgctgtcgtactaggggcaatatttctaggcgattctctctatctcggaaggtgaaagaagaatgtttaatatatcaaaagatggatcaccaaattagtattaattactcatcttggattttcactttcagtttttactatctatatttggcagtgtgattggtggaacgttgatatcaatcggtttcagtgtccataattcattatttcatatagccaatggctttagcgctttagccaaatccagtgttctaaggcatattggcatgttagtatagaaaagttgtccttatctgaacaaatttttagtaatggaggcaacgacctttgtgcatgtgagctatgttatgtacaataaaaaacgtatctgaagtaggtcttcttcgaaaacgactcagaagattagattccaggcagtggcaaaacaagaattgtgactgactctgaaagcagctacacttacgagatcaaatgtttaaagggaatggttgattggatttcttttggctcgaagaggcatacatataaattttgtgatgatgccttagccaaactaagttttaagatatatttagagatatgactatatgagttttgtagattgagtattgtctaatctaatttgtgtgagaaatctagtgatgaaaattggccggtgaattttaaacgcgtgtatatatcaatctctattctctagtggtccttttctatagtacattggtccaaataatagggaatcttataataaattcaagagactgacaattatcttataaaaaattcaagaaattttatttcaatattttataaatgcataaaatttgtattacaatcaaatacaatatttaagttaaaaatattatactgatgaatacttatatattattatgaatattcatttattatatacttaactcttttcttttgtatttaaaattattttcatttattataaacagatttgaattgaatgatatttttaatacattttagttttaatcatttattgttttgctcatgtagacatcttagatggagagaggactaccaaattatatatatgattcatttattatatacttaactcttttcttatgtatttaaaattattttcatttattataaacagatttgaattgaatcatattcttaatacattttaattttaattttaatcatttattgttttgttgatgtgaacatcttagatggggagagaactccctaattgtatatatatgattggcccaaagaatatggaatcttataataaactcaagaaactaacaattattggacccataaattgacatttccttttacttgtaacataaagaaaagtaacaaagggataacaaattaaagactcacattccacaacaaatttttctaccaatgccaataatggccggaaccgcaagtccttggcggagagaggccgtgttcttgacggcaatgctggtggtcgaaaccagcgtcgtcggaataagtactttgtttaaatttgcaacttcaaagggactcaacatttatcctttcctcggctattcttatcttcttgcttctcttcttcttcttccttctcttttcttcactaacaggtttctaatatctttaatctttacaagaccatttttcttcttctttgtcaaaatctcttaaaaccatttataacaattcttttgtattgatttgtatgtttttgttttacaggtcaagttcacttcctccactaagtgtctcaatactttcaaaaattggacttcttggatttctagggtaatatccaaataacacattccttactccaatttcgaatatgtaactagcttccactaaatgttgctaatatatgatttttggctggaaaaaaaaagaacagatcaatgtatgtgatcacaggatacataggcatcgaatacagcagcccaaccttagcctccgccataaacaatatcactcctgctcttaccttcatcctcgccattatcttcaggtttttgttttctttgactaattattaagtttttgctgatttcaattttagtttttcggattattctagtcaacaagtcgaaattgtaaccattccatttccggctaatttaattttaataattataatagttttttatgttaaccgaaattaattaaactcaaaagaactaatcccgaaagatattgtttacatatgtgatgaagccgttcgctatgaatttttcgtgcattataataaagttctttagaataattacttcaaagttcccctataattttttcaattcgactatttttttttccataaatcatgttagttttcacttcactatattcaacactatagtttgctaaccaattctttaccactagccgccttacccctatcccacaactgtctcatactcttatcagtaactaggtaaataatctatatttatggtaaatgcgtttaatatgttcttctttctttctttcaatgcatacattaattcaggttttcggcatctatatttatggcaattgatatgaagatttaagttactatcgcactattgctcaatcttgtggtccaaatcatacaaggctgtttgcatgaatgaaataaatgcgtattaattgtgtttgatcattgattatttcttagccttcttttggaataaacacttaacacactaaatttcattttgtgaataaagaatggaaaaagtatctttcaaagagaggagtagtctagccaaattgatggggacgatattgtcactgataggtgcacttgtggtgattttctaccacggtccacgtgtcttcctcgcatcttctccgccctatgtaaacttccgtcagttttctccaccgttgtcatcttcaaactccgattggctcatcggtggagctcttctaaccatgcaaggcatattcgtttctgtttctttcattcttcaggtaccaattttttttccttatatatagtagaaataattttaaatttatggttaagtcaaaaattagtcattaaaaaaggtggaaacatacgaacacatggtttagagtagacctaggcgttcagatatttggttcggttctagttcggttccaattctttcggctctcgagtttaggattcatataggaactaaaacagttttggtttggtttgggttcgggttcggttttttcggttctgaagtttaattaggacccattcggatatttatttcagatattttttagtattttcggatattttcgagtatttttggatattttggtatttttatatatttttcaactatattttcggtatttttgaatgttcaatctaaaaataactaatatttttggatatataatcatatttagatattctcggatacccgaaatatttcagttcggttcgggttcggttccaattattttggttctagaatttaggattcatttgagtattttaccattttggtttggcttcggattcggttctttttgctttggttccagttcgtttttttttggttcgggtattatgcccatgcatagaggggtgaactttggtttttggttggagatgatgttataatacatgtgggaaaacacatatcttcatttagtaaacatcatttcattctaatatttattctatataatgatttttggacaggcacatataatgagtgtatatccagcagcattcagagtctcctttctttacactgtatgtgtttcaatcgtgacctcgacgattggactagtagttgaaaagaacaacccaagcgtttggatcattcatttcgatattactttgattacaattgttaccatggtatgttatatatatatatatattttaaagatatcaaaatatctactttttgatcttaacacttttttaaaaataaaatatttcaggcaatagtaacttcagtatactatgtgattcattcatggacagtacgacataaaggacctctgtacttagccatatttaaacctttgtccattttaatagcagtggttatgggggccatttttctcaatgattctctctatctcggatggtattaatgaatcaatagtcttcataaacatatctataaacaaaaacatctactcaccttcgattttgtccttcgttttgcagtttgatcggaggaattttgataacattaggcttttacgctgtgatgtggggcaaagcaaacgaagagaaggatcagttatcattttcagaaaaagagaaaacgcctcttctattaaaccgcaaaaacgaccaagtttaaaaagaaaaagaatatagacaataaaactactaatagttaacaaatactgttattaataccatatttataaaattgtcttatgtctctatgaacctaggagttggaaaaaaatgtgtgtatttagatttttttttcaaaatactccaacatttataaatacgagttaacatttttccttgactcctttggaacatatgaaaagcttaaattgatattctttgaagcaatgataggtaactgcaccaagtatatatcccggtatagtcacacatcccaagtttagtgaactacacgaattatgtgtattgtatgctaatgtataccaattagtaacatatgatcaacaccatcatattccttttacaccgtttgtcaaatccatttttaaaaccacttttggtgaattacgccgtagaaaaacaagtctaacacattgtaacattttgaagtggtaataaaatttctgattcaaggtttcaatatctataattattgaagtggtttcaatatccattattggatgatcatattttggcacaactgttttcaagtctgcgcaaagaatagggaatcttataataaattcaagaaacaacaattattggacccacaatacaccacttcccctctaactagtactatcataaatgaaaagcaaacaaattaagcgataacaaatcaaagactcacatttcaacaccaaacctttctaccatttccaatggccggagcagtaagcctttggcggagagaggccgtgttcttgacggcgatgctggcaggcgaaaccagcatcgtcggactaagtactctgtttaaggtagcaacttcaaagggactcaacatttaccctttcctcagctattcttatcttcttgcttctcttctccttcttccttctctgttcttcaccaacaggttcaaataactttaatctttctatgaccattcttttgtatagatttttatttaatttgtatgttttaatacaggtcaagatcacttcctccactaagtgcctcaatactctctaagattggacttcttggctttctagggtaatatccaaatacaacattccttcttccaatattttttatgaaattatcatccactaaactgttgctaatatatgatctttggctgaaaaaaattcaaaacaaaaaaagaacagatcaatgtatgttattacaggaggcataggcatcgaatacagcaacccaaccttagcctccgccataggcaatattgttcctgctcttaccttcatcctcgctgttatcttcaggttttattttaattcattttcctaaaagttttgcagattaatgtctaaccatcgagtcgacattctaacaaagtttctggcataattaggttattaggcaacttaaattggaagtagtttctttaaatcagtcacttcaaattaacttgtccgatggttttaattcagttcaacgcattatgttgctaaccaatgcttttttgctatcagccgtcttacttaatatagaacttatgttgctaaccaatactttttgctatcagccgtcttacttaatatagaacttgaacttttttttctaccagatgtacattttcaaatatatttatttggaccatttaagatatactaataatatatctatgcgagcaaaacgaacactgttaattttatccgggaaattaaagacaatagattcaagaaagcggaatttcttagtggtcaagataagctcaaagatcacttctaactagcttgagtagcaagttcgggtttgttgtagagtaaacttaagcctagggttcttgagtagagaattgtggaccctttggttggcctagctccctatttataccttcagggtgtcggttcttcgatatggcatgtttccatcatcttcggaggagaatatttccattgtccgatttgttactttttgtgtagattcgagtttacctttcaagattttcctctctagctagtacctaggtcggtctccgaggtaatcgaggtcgagctagtcaggcttaggcctccaaatcagattcgctattggaccaagtagttcaaaatactgaatggtttattcttgtttaaaatcaggttaagtactggatagagctaattaaatcactctcctacaatatccaatgcgctatatagtaatgtataagatcatagtttatatatataacaataacatataggtgatatcacgtactttataaacattttacctaacatgaataaatctgcacgaaactttatttgattcattagatgttttcgtaaaaaatagttatttaggaaaagtttcgtgaccccaaaactaaacgaaatcattcatgttcaaatgatatgaagttagcttgttactacatcactatagcacaatcttgtggtccaaatctaacaaggacgtttgcggtttgcatgaatataataaattcatataaactggtatttctgtaatcatttctattggaataaaacgtaacacaatcaatgtcaaatttttaacaaaggatggagaaagtatcattcaaagaaaggagcagtgtagccaaagtgatggggacgatactgtcactaataggcgcatttgtggtgattttctaccacggtccacgtgtctttgtcgcatcttctccaccatatctaaacttccgtcagctttctccaccgttgtcatcgtcaaagtctgattggctcatcggaggagctattcttaccatacaaggcatcttcgtttctgtttcttttattctccaggtacaccactttttataataaaaatatagtagaaactctataaattaatactcgataaattaataaacacgatcaattaataaattatatcggttctaagtcgggtcaatagaaaaattaaccaaaatcgataagataataagataataaattttttgaaatctctatgtaaaaatatgatcttaataatatcataaattaataatcataatatcttaagcatactttttaaaataatctactataatatgaatttagtgttgcttgtctttttttaaagtttgaatcttgttgaacttcatctctaattttctttttattgcatcaaaaactcctagtgttgtattttcgatatgcatctaaaagttgtgaagagttctaaacgcaataattgttttcttacgtgtcactatttctaaaagtttcacattatcgtcttcaacttcttcatcaacattatagacagaaatcacaatttcttctaaatattctaaattttttagtgtgctttattttcaccggaatagtcgagtaagcaattgacatttattctatccaaaaaatatagtgttatattttgcttaaatatttctttaaattaataaatattaatttatcttataaaataatatctattaaataaattaataaaattttatagtcccaacattattaatttatagagtttatactctagtttctaaacatgtatgaatgcatagcaaactagactgcttggagaaagctacacaaattgacgtggtttatatcttcatttattaaacatcatttaatttaattttaatgtttattggatagacacatataatgagagaatatcctgaagcattcacagtctccattctctacattctatgtatttcaatcgtgacctcaatgattggactagtagtcgaaaagaacaacccaagcatttggatcattcatttcgatattacattgtttacaattgttactacggtatgttatatatatgttaaagaaaattatcaaaatattttctttttgatcttaacattaattttattttatatgtgtaaactatttcagggaataataacttcagtatactatgtgattcattcatgggcaatacgtcacaaaagacctctatacttagcgatatttaagcctctgtctattttgatagcagtggttatggggaccatttttctcaacgattctctctatctcggatggtatactaatcaatagtcttcatacacatatctataaagaaaaaaaccattatgttcatttttgattttgtccttcattttgcagtttgattggaggaattttgataacattaggcttttatgttgtgatgtggggcaaagcaaacgaagagaagaacaagttgttatcattttcaggaaaagagaaaacccctcttctattgagcggcaaaaacgaccaaatttaaatgaaaaaaaatttataatcaaaggagttacaaactctgaaatagtctcttatatacatagcgtgcaaactattagtgtatactgtgtattgctttgtatataacttagaaaatgactatctaattgttttttaagttacgggtacgtaacgactatctaaattcgttagatcacgacatctaacgaattttggtcgattttaagtagtatcgatttaaagatttgtaagttaattaagcagccaaatagaggcattggaaaacaaatgaaaatatttctgatagtaacactggagaggtaggacgaggtaggatcaatacatggtcaaccatttgcttaagaaatgactacaaaagaaaatatatatttttacaagagagattaaatggtttgttaacatgatcatgtgagtttggtgaacggttttatagaaacagaaacactttctttaaaattcttgcattatcggtttttactatcactatattgtaagttttgcaacaataatgatctttaagaaagaaaaattgtactgatacttttaatttttttttaagtttctttgaacctagcatgtatagagtggttgggaaaaggaaacaaaggtgtagctttttgatttcttttgttccttgtactacaaaattcatacataaattctcaaattctagagagagattaaatactgagttaacacttttcctcaactccaacatatggaaacttaaattgatgttttaggttcgattagtaacacaaaatattatgtattttaccaaaaaaaataaatgataaagaataccatattaattaaaaatgatataaaataacgataaaatatcaatattaaaatgaaaatacagtcttatgtcctttttagtgccgttttatgattggtaaaaacgataaatcttattcatttttcaccaaaagaataaagaatattataaagtcaacaaacgataattattggacctacataatgctattctttatatttgtaacatcaagaaaagcaacaaaaagataatgaattaaagaatcacatttcatacaacctttctatcattttccaataatggcccggacagtaagtctctggcggagagaggccgtgttcttgacggccatgctggcgacagaaaccggcgtagtcggaataagtactttgtttaaagtagcaacttcaaagggactcaatctttacgctttcctcggctattcttatcttcttgcttctctccttcttcttccttctctgttcttcaccgacaggtttctagtaactttatgagtttattttcataaacatttggtggtattgatttcatttatttattttttgtttttctttacaggtcaagatcacttcctccactaagtttgtcaatactttctaaaataggacttcttggattgctagggtaaaaactcttactaacgcaatcttttttccaatcttaagtatgaaattatgttcctatttgctaaacatgtgattttttggtggacaatctaataaatggttttggctgacaataaaaatgaacagatcaatgtatgtgatcacaggatacataggcatcgaatacagcagcccaaccttagcctctgccattagcaatatcactcctgctcttaccttcatcctcgccattatcttcaggtttgatatctatatttttttttccaattatttgcagatttcagattgttctaaaagcaaactattctagttcaggtgtcgaaatcgaaacattttctttcccgggcacaattggctaaataagtcaacttaaaattgaatattgtttttttagttcaccaaattaagttttttaaagtcgggtcatgttactatgttaggttttacaaaccaatatattttgctaaccaagcttttcctaatttggtaattcctagttgccctatgcggctatgctacccactatctcagataaatatactgtataaacgtactgtatagtgaattaggtaaacgacgagtagtgaaaatttaattataaataaatccaactctttaattatatcattacgttgcattaaacaaccacagtaaacataataaattgttattgaagcgcaatattctccgttataaataaacgtattgattagtaatactcttatgtttcttattaattaatattttaggaaaaaatttgttactaaaaaattgatttttaagctttttatttaatattaattatttcttattgataaatattaaactccaaaataaataaaatattattgattttgaattattaaaaatataaatcataaaaaataatacatttataatttgtttttaataggttttcttaatatgtgtatttttccaaaaaatcaaatattaagaaatattatcttaaggagattagcaaaactaccttttttactacttttttgcaacaatacctctttatgttgtccattttacaaaatatctctttccttgaacagaatgaccgaattactctcatctaataggaacatgtaattggaaactgaaatttttccgccaaactttttttctgccaaaaaacaaatttcccgccaatttgtttttttgtaacaatttttttctcaactaaaatatgcttttaaaaatccttgtaaatattttttggcggaaaatagatttacaagggattttaaaatggttttaaaatatttacaatggattttaaaagggttttaaaagatttacaaagatattaaaaggttttaaaaagatttacaagagtttttaaagggtctttttgtaaattctttaaaaatcttttaaaaacccttgtacatcttttaaaacccttttaaatcctttaaaaatctcttgtaaatcgtttaaaacccttttgaaatcccttgtaaatctttcaaaacacttttaaaacaattttaaatcctttaaaaatcttaaaaaaaacttttgtaagtcttttaaaaccctttaaaatcccttgtaaatctttttaagcccttttaaaatttcttgtcaacattttaaaacctttttaaaatcccttgtaaatcatttaaaactcttttaaaattccttgtaaatattttaaaacccttttaaaatctcttataaatctttgaaaacccttttaaaatcccttgtaaatctattacccacaaaaaaaaactctttttgcgggaaaatgttttttaaaaaaaaacttttggcgggaaaatattttgattggaaacttttggcgagaaatttattttgaaatagtttaggcgaaaaaaatattaatatttcattttattaatctaaaacaatttttaaatatggataaaatgataattaaaaatttaaagagaataaaattaaaatggctaaaaaataagggtaaagttgaaaatgaacaccaaaaaaaggatattagaaagaatttttctatatcttactgtgaaatttagtaccccaaaagtaaaaaagtaagttactgttacacataaactccacaaaaaggcttgcatataaacgttggtaaataaatcataaatgtcagcatccctgtttgtttgaaaaaaaaaaaaaaactgtttgtttgcatttcaacaagatgcgtatgaattcttctttctttgactatttatacctttctttttattttggaatccataaaatataacacaaatttttaatttgtggataaagaatggaaaaagtatctttcaaagaaaggagcagtgtagccaaagtgatggggacgatattgtcgttaataggcgcacttgttgtggttctctaccatggtccacgtgtctttgttgcatcttctccgccgtatataaacttccgtcagctttctccgccgttatcatcttcaaattcagattggctcatcggcggagctcttcttaccataagagacatctttgtttctgtttctttcattctccaggtacaaatttttgttcttatacataatagaaataatacaaagtgttggatatgttccatgcaaaagagactaattttgttatcggaggcagaatttttaaaatacaacagacttaaccgaggaaaattagttcaaccgtaaacccactggatcctcgaacctaggccaaatagagaatctaacttgaaaacaaaaacccgtaaagaattaccccataccagcaaaactcatgtgctatcacaaaacaacgtaccatcaaattctaggttaatcaatagatgatggcaggcctggcccgccaataaagcaggaaagcaactgttttaaaccacacaatgtagtctagtggttagactttctataacttagtcccgattcacaagttcgagcttttactaatattatttgctctatttgtttttgcattccttttcatcctttttttctttttccaatccacatattttagttatgtttgaggccacttaaagttaaggaccggccctcgatgatcgagttggtcatagaccaatcactatttacttacctatagaagaaaactctcaaccataaacattggatgttaaaactagatataggcatacaggaagaggcggccatggggtcaagcaagacaagcatgtttgaagtcgaaataaataaatatatatatatgtaagagtatgataaagtgactaataaggtgtcaagtggtccgtttaacgtccaataggtttgaccatttggaccattttttttttggggtttaatgaacggtccataatggtttatggtccaaaaacttgtccaaatccatgaaggataaccatgtccattggatatgtccatggtcgtccattactgtacaagcttcctgtttgattcaaattcatctcaattcatctcaaccgcatgatagtgttggattctaagagtactaatatcagtgatatgtgcgaagttggagtcccattataaccttttgccgaaaatatataatttttcactaataagaggccctagtaattattgttttgcttggagtcatgaaactcgtaaagccagctctggaaatagctggggttttgaagttaatcaactatcttcatacatcaaatatcaaattttgttttttgaaagaaggttgaacatgcatatataatttcaatgtttattctataaaatgtatttggccaggcaaaaataatgagtacatatccagcagcattcacagtctccttcctctacattgtatcggtttcaatcgtgacttcaatgattggactagtagtggaaaagaacaatccaagcgtttggatcattcgatttgatattactttgataacaattgtaactatggtacgttgtacataattttaaaagattaccaatatatttacttttgatcttaacctagtattttataaaacatttcaggcaataattacttcagtatactatgtgatccattcatggacagtacgtcacaaaggacctctatacttagcgatatttaagcctttgtcgattttaatagcggtggttatgagcgcagtttttctcaacgattctctctatctcggatggtatgtgatcactcatcaattgtcttcattaattatacacatttataaacaaaaacattttcaagcttttgcttcattttgcagtttgataggaggactattgataacgttggggttttacgctgtgatgtggggtaaagcaaacgaagagaaagatcaattgttgttagtttcaggaaaagagagaacccctcttctattgaacggctaaaatggccaaattagaattaaaaataaattagaactaatttacatattcttagccacacttttgggtaatgtgtacatgtatattactactgtatttcatgttgcgctttgtttataacttgaataattgttttaaccatgaagtaaagacactctatatccatggttagtaaataaggtaaattgcgtacagtagccgttgacccacttttaatttcaaattttgacactgtgggctgggcatttcatttcttagccattcagccaaaaactgaccaaaatgccctgacgaaactgaacccggtttgtacgtacggaccgcgtcgctggaatccaagagaaccgggtttgtacgtacactgttcatcgacgagaaatgcattaaatattttctgggtttcggcgaatttgacacttgagattgaaattaaaatttttaaaaattggttgggctcagaagtttttaatgctaaaaagttttgacaaaactaaaactcatgattacctattataatatagattatattgtaagatatttacataattgagattagaattctgggaaaaaaacgaaaatcaaaattgtgttacggtgaagaatctgaagtttttagttgctgttttacaaagtttgaaggattgaaggggagacaatctgtgttctaggtaagaaattcgtgttaatcctattaattacacttgagaacgtgatatgaaagtaatgatacgtttttaaaaatttttgagttcataaattgttttgttggagatctttttgtatttgtagatataaatgtaagctctttgatctgttttgttaaatttataagtacataaattattttgttagagattctttttgtctttgttgacataaatgaaagccttcaaaaagatctgatttttttgtatttaatgttgttctgacctgaggaatttatgttgcaggtatggagttacctgtattaattatggttggtgagtggatatacaaagaagaaggttggaaatttgaagctgaaaaaggaagtttcggacgctgtgtacgtattacagacacaacgacgtacacggatttggcaagtacaatatgtgatgttttcagctataagtttagtgaatggaaccctataataagttactggatgcctggaaagatgtctaatatgatagcaagtaatcgccctccagtatatattgagaatcaaatcagcatggatacatttatgttgattcgtaatggcgatccttctgttaacttgtttgtgtctttttaccctatcggcaagggaggccatacagagacagaggttacaaatgttgatgcagctcataatttttacgaagatataaatgtagatgaggaggatgacatagatgaaggtgatgagaatgaatatgaggacgaggataatgaagaggacgaagatatggatgtacatgacgatgacaccgatggtgaaagccgtgaaattaccctcgaccctacagtagacggtagtgaaggtagtggcggagattacgattacaataaatggggtgacatgattgtggaacaatatggaaatggtcatgttgaggaggacgtcgtgaatgacactcaacaaaccgtggaacccccaagggaattcactcgtctattggcatcgtgtacgtcgacgggtacacatgtacctcatgtagaacccactggtgttttggttgacactacaccaacctctgctccatccccgacgtgtcaacatggtttgtaccaatgtacgtacactagagtctgtgcagaggagacaagatgcgaaggtgaattagttgagcacacggatgatatagctgagaacgtaactggagatgatggtatagtcggatggagtatacgcgcttttgtggtcagggtgtttcaaaaatgcgtgggaataaatgagttcgacctgggtctcatcttggcagataatcgagtaatatttcgccaatgtgtttataacttttttactttcacataccgtacatgtcactaatcatgatgatttgttgtagggaatgcgttcccgcatagaggctaccattaatcgtcgccttgcttcattttactctggccgtaataatatatgcgtacactatagtaatgtgtacgtacacggtagtaatgtgtacgtacaccggagtaatgtgtacgtatacgggagtaatgtgtgtatatatgtacgtaaatatctaaataatttgtatatttacgtttcaaattttttttgaccataaaatcaaaacattcaaatcatgtatgaacaacacatgaaaaaagtacatgaaactaacatatatatcaaatttgttgttgtgggtggttagatatttattaggattcgtacatatacgttccattaaataattttgtgtacgtacattataaattaaatatatatacatgaagaaatccgatgaaaggtataactgtaattttccagtcatctttaacctaagtatccttttctacatttgagtgtcactaatgaacatgttcttgattgaaaaagcatcaattatttagaaaagaattaagtcattcaatcatttgtgagtcctaaacgggagataagacatgatttttggaataatataagcacactactaactatgtatccggtatagtattgaaaggtaaatattttacgtacatgaatacgtatagttatgaaagccctgcagtttagtattggaaaataggttttacctgaatcagactacgattcgttgaatatcatatttgcataatttatattgagatatatagccatataaataacttaattttgatgtcaaaaaattagattaatggtgtaccatgtacgctccaataaatatttttgtgtacgtacataatataagacttatgtgatttaggcattcttaggatataaatgtttggagaggtcatacacgtgtacgtgtatctcaatattatcgtgtacgtctacgggtttagttttaaatcttacctattctcaacaaataatatcgtataacataacgcttactaaagaatgtcaaaataacaattaaatagaaacaacaacatcaaaacaaaaaatatcatatatatcgtactaaatacataacatttggctaactcgccgtatgcaccatcgtagataccaaacattacaaaaattcgtcaatattgtaaataacaatgtcttcatctctagtaggactatagtagaatataccctcaccatcgtcaatattggtttattattgtatcaataaatatatctcaacaattttaactcatgaaaagatgtacgtacatcatttttcaaaagtattaagaatatctatactttgactatatatttttacttaattattatatatgcatagattttatggagaaaactccggaaatatctcatctaatcaaaataaccaaagccgtaccatgtcacatatgtaaacaatatctctcgggattggctcgtttgagtctatattaatatcggttgacaaaaaaaaaacaaaaaaaaaaaacaaagatttataatgtacaaactcaatatataattgtgtataccgctttaacaataaaacataatctattatatttacatgtccacatgtacgtacaccgtaaattacatatacgtacacataagaaatttattgaagggtataattataattttgcattcgtcttcaacctctgcaaccctaattttgcactcttcttcaacctctgcaattttaattttgcactcttcttcaacctcttacccttacccataattgtcgtcgccgacgatgatacattaacttccgaaactcctcgccgccgactactcttcttcatctctgccattttagtatgataaccagaaaatcctctttttgttagacactttaaaacgaactcgatcgaaattttctccactcaagcaaagactcgaactcgaacagagcctcaatcggaattgggtttaagttttgtcggaatttttatgcgtcttcgaatacggagttcgtcgaaactgttctgcgtttctcgaagacagtttttgattttattttaagttttaaaattatttacatttttatttatttaattttaaagatttaaaattatttccgtaaccagaatacaaaggaacgaaactgaacagttttctttcatttctcgttccagggcagattcgtccaattaagcccaagtggctaaaagctggttggctcaatccactttacctcttcgtgaaaaaaaaactgagaaaagtgttaacggtgaaattttctttagtaaatatttatagatatgacctttaacttattatatagaaaataaaagttgacattatatgtctcttgtttgagaacagtttctgtatctctctcattttttttttttaatccattgtgtatttgtgaggaacgctttgtttaagagtttgtccatcttcaagcgttacaaaaacactcgaggttttataattgataaaatctttggccatttggtcggaatttgtgaacacgacttctcaattccaagagagttaaaagaaaaaccacacttgagaaagtccaataagcataggcaaatttaaatatccaaattatcatttcacgtataacaaggagagaccaaatgatagaatggcccaccaaaatttcaattatttttgagacttaatcatcattttggtcacaagatatacaaaatactctcctggatttttatcatgagtcattccacacactaagctttatatcttttgacttgccgacaatggcctccattactctccgtcggagagacgccgtgttattgacggccatgttggcgactgaaaccggaaatgtggctatgaatactttgtttaaagcagcgacttcaaaaggccttaattcttataccttcctcatctattcttatctcattggctctattgttcttcttccttctcacatcttctcttataggtttctaaataacaatctttttgttagttaataaaccctgtttgattgattcttgttttgtcaaaagttttcatttgattacttgtgcattcttttgcaggtcaagatcacttccttcactaagtctttcaattctctgtaaaattggagttcttgggctgctagggtaaagccaactacacttcttgttcttcttcaacttttgaatgtaattattttcctaattgttggtaaagaaatttttattaacctgaaaatgtttctaatatactttactttttgctaaatgtgaatataaatgaacaggtcaacgtatctgatcacaggattcataggcatcgaatacagcaacccaaccttagcttcagccattagcaatatcaatcctgccattaccttcatccttgccattatcttcaggttttattttaatccatttacctttttttcttacaattatgaattgttaattagtaacgtcagaaattttctacctattaacaaaaaaaaatataaaaacttttgtttctcgttaataagtatttaattgttaattagtatttaatccatgattttttgggttagttttataaagagaatattaattcagataacacagatatgattatttaataaaggtgagctgttttgtagattaacacagataagacacttgaatcatcagtttgtaaaataaataaataaattttgtacttaatttacatgtttaataattaaattcagaatttcgatagcagtttttcaaagtttaattatatattgttagatctacatcaggttcaggaaaatgacaggaataaataacgacaaaaaaaatgacaggaataattgtgtggcacatgttagtcaggttcatatttttaaaatggacattagctataatgtaacatcaggtcctatttgtgatgttctaaataaaaacaattttttaggtttttgtaacactaatattttactttgattttaatcaatttgatgtataaagaatttcagaatttttatttatcagaagaaggtttggtatgatcaaaagaaagtttgaggtttgtttttttcctgaaattgatcagtttggaagttttgaaccgattttaactacttacagaacaatatttaaattttgcggatccattttcaaaaaataaatcaaaacttaaatttaagttttgaactttataataatcgcattttcaaaaaatgcctaactaagtcgtttcttttgtgagatacagaggaggccatatgagccccgaaacacattataatcttgaacatataggaacatggaggctagagcacatatatatggtacccttatttattatacagtattattgatttaagtagtagtcacaatgtttatcggttcttggagaaactagaacaaaacaaaccacaaaaatcccagttttgtagttatacatttttgtaaaacctaatccttttcatttttaattatttaaaatttaagtacaaaaacaaaactcgagagagtgaaagcctaccatataattttaggtgcgaaacccggaaagacaactaaaaatccagaaataccaaatctttcctcttaatttagagtacacaataaatccaccacaattttttttaatggggctattctgagaaccgaaccacaaaaacacaatgtctcaaaacatcttttgggatgattaaaaaaaaaagtttgtgagtttctattattctttaatgtattaaatatatatttgtttaagagaagtggaaataactacatttttaaaattatttttatttattactgtgtcaagttttattacaaatttcataggtgatagcaattttgaaaattttcatttgtatgattaaaatgaattgctttttccatttagcaaaatatttgatcatttaaatatttatcatgttttctatttgtgaaacaaaaaaatagaatggagaaagcatctttcaaagaaaagagtagtgtagccaaaatggttgggacaatagtttcactagttggcgcacttgtggtagttctctaccatggtccacgagtcttcaccccatcttctccaccatttccacaactccgtcagcttcttttgccgttatcatcctcaaactcggattggatcatcggtggttgtcttttagccatcaaagacaccctcgttcctgttgcttttattcttcaagtaataacatattaattctcttaacttgatacatcatacatacttgcatgtacataaactaaattttccttatagtagattaatattgaattggacaggcacatataatgaagttatatccagcaccattcacggtctctttcttctattttctgattgcttcaatcttgacgtcattgatcggaatcgtagcagaaaagaacaatccgagcatatggatcattcattttgacattacattagtttgcatagttgttggggtacgtaaattttaatattttagaaaacttaattatatcttaaacttcttttcaatactatagctatttttcgcagggaatatttaatccaggatattacgcgattcatctgtgggcagtacgtaataaaggacctgtttacttagctatattcagacctttatcgattttaatagcagtgattatgggagcgatttttcttggagattctttttacctaggaaggtatatgtatatatgaatcaataatcttcagacacacttgtttgtgaaacaagaaaaaccacacatctaatctaatggtttcttgttatgtggttaatgttgcagtttggtcggagggattttgatatcgttagggttttacactgtgatgtggggaaaagcaaaagaagggaagactcagttcttgtcgctgtcagaggaaactcctcttctagacgaaaacatagacgaccgaatatagatttacaagaatattggaaacgatgatttaattaatatgattagctctttgtagaatgtgtttgtgttgatcgagattaggagcactctattagtaacaataaaatgttctatatagctttgtaactgaacattgaacaatatattttgttactcatttttgaacacatgttacggacaaatgtttttgaataatatgaaaatagattgagagagttgggaaaattggaggaagaagaagcgacaaacctgtcgctaccttcatcaagaatcataatatcagtgacctctccccatgaagagaaatgtttacaaaggctaatcatgatatcatctttagaaagcgaatactcatatcacagggaaaaacctaataatttgactgcgggagacaatattatcatgtgaaaaaaaaaaaaaaaattatcaacaagacaaaattacaaaatattaaattaataaataatctcgtttaactataaaatcaaattttaatatttttgtataaattcgaaccgatatttaatttctttatgttgtaaaacataaacgcaaactgtttttttttataaattcgaactgaaatttaattttgtttaattgtaaaatttaaattaatttataaattcatatataaactaatatataactcgatttaatgacatattagactttataattaaaatgaatttaattttttgtagatggtagattttagggtcttttgtaaaactaacatattttgataaagtatttaagaatatagcagtataatatggtaaactaaataaatagcacacatgagagatgaaatgtctaaatactccttcatgtttgtttcagtgtgtagacacacgggcgtgagattgtaagctgatgatttcatgtgttatagagagtggagagaaatgagagtttgtgagtttggtaagcacacaagacgagaaaaaaggtgggataaggagaggtgatggtggtgtgggcaacgacgacggtgatggtgtgggcaacgacggtggtgatattgattgcagtggtggtcgtcgcggtggtggcggtgactctgatttcaacaccatattgcagcacaataaaataaaaaaagcaattaattccagaaatcagatactacattctctaatgtaccaaacaatgcaaaagtaatatctgcaaatcgtggatgtcaatttttgtatctagaagtgatatagtttttactaaagtctaaagactcatactatttagtaatttttggataaatagtatactatttacatcaaatctatggtttctgttatagtcctgatttctcactcctaatcatcaaagttcatgaatcgacacttgtcgatttgaatcagatctgtttcagaagtagatcaatcgaatgggagttcgaaatatggtgtttgtgagaaggagagtaaatgaaagagacactagaaagagcgagagagaggataagaaacacatagaggcggataaaggaggaagaaaaagccaaattctggaatgagaagagagataggcgaagagcgtgttgttcacatagggttataactggaattaatacagaagatataaagaatatcaccttcttttttgttaggtgttagttttctaatttatatttttttgtgtgtttcttttgcaaatttccctagattttaattggcttaaaaaaaagttgaatctttattactttgaaaaacttccccttttctcctcctccatcactctcagggtttctcggttcaccaaaaactcctaaatctctctctcagatcgtcactacccttttcaattccatcctcaatcttcaaaattcccaaacgaaatcaacaaaagatgtcgcaaggctacgcaatcgagctctacttcgatccagcactcgagaaccaagtcttgaaagcttggaacgtcttcgctcgtcgtcaaatcagtacatatctaatcaacaacgagtctcgtccacacataaccttattctcaactacttcatccatcgattcaacaaagcttgaaccaatcatcaaatcattctcatctaaacaagaaccaatctcactctctttctcttcaataggaagcttttctagtgacgacaatgctctgtttctttcgccgacgccgtctctttcgcttattcagcttcagcttcagttatgtgaagtgattaagaaagaagggtttgagattggtgaagagtatcgtgttgattcttgggttccgttttgttctgtggctgttgatgttcctaagtcacgtatctctgaagggtttttggttttgagagatttgaagcttcttgtttatggttatgctatggatattggtcttgttgagttttctcctgttcgtgaagttttctcttttggtcttggtaacaatttggaatcttgatatgaatgtttagctttcagctagtaacaatctgattatgtaattcctttggtttagttgacaaaagtttcgagcttgatggaacattatagaagcaattatgtttaagttgttgtttaggttacatctacgtttagtttatggagttttggtgcgaacttacttgtgcttgattcttctgcagattagagttaagcttgaccaaagttgtattattgatttgagattcttcaattgtgttttatgtttttgtgcatggacatgacttggtcgaagccgttttgcagttaatgtctttacaatttcacttgatgatgttgatggaacagtatagaagcaattatgtttagttttgaattgtgctagatcaagttttctgtaaaagatttgatcttctttgttcttcagagcttcttcatattttatatttgtttttgaagaatttgctatcatctgttatcaattgtgatcttgatgactggagtataagttacacttggtggaagaatatagaagcaatgtagtcatggtttgttgggaaagaaatttagctactatgctttaatcatctgcagatttatgttactcattggggattcttcatttgagtttcatgtctgcatgaatgctcgaaggcatttctctgttaacatcttgcaggattcaatatgaaaaaactcggtgaatacatgaaacagtactgtactatctgcggaagattatgagcaaccatatgaggtaaacgaaagttttgtattctattgatgaattgtgtatcattgataaaagaatcatatcagtaatatgcttgaaaagaagaaaggtaaaagaatgtttatatccacaaatcatatcatcttaactgtctaattatcgccattaaaaagtcgttccacgcatcgattggcccgggcaaacaccaatgcacgcaatcattataacctttcatccatttatttccccagtaaccattgggatgcccatcaggtctcatctgcataacccttgtcacatccaataccgcaaacttctttgctttgttgcctcgttttgttataccttcaagctgttcaatctgagatttcctgatcttcatctcattgctctgcaggtcaattttgttttctccgaaaggactcgtcctgctgcaagttcctccggtgtcccaagtcccattctcgaaatgcgcaggtgaaatagtcctcagtaccgtcactaaatctttcttacacatctcacactcattgatttgcctaaggacagctgagtaaacaagcttaaacccttcttccgggctaatctgagtcatgtttggtaagttacagtaaatgcaacccagtgtctcatctcctctatgtataaatataggtctgaagaaccaatgagcagccgagacaatagcaatgtctgtattcggtagaccattaaaccacccttcatcgatcttgccgatatctagatcaaacaatccagtacctgtattgttactatctcttctctctcgttcctccacaagaaacttagtccacgaggtcgagagagtaaaatcgtgcttcggaaagtaccaaatcctgtttctatcttctccatccttgtagatgtccttaggagtttcttcctgcacaagcaaacacacaaaaaaagcttaagcaaaagcaactattctcttcttgcaaacaaagcaacgtatatacataccattgacaacaagcaaagaagagattccatatggttcctagccacagaatcaccaataaaattcatcttcttccctcgaaccatactgagaaacgcctttggattaaacctcggaagatcgcaaccatcgggtttccatctccagaacaagaaatctttgtcgggtctcccttgttttatgcagttcttcgagtcgggaatcgtagcacagctcgagtttgtgtataaagatcctcttttgtctggaacccaatgtcccttgaacaaatcacactcaggatctaaccaaaaaaacacaacacaaaagacaaacaaatcattagaatttcaaacacaaactaaagaacacataataggaattaaacaaaactgagagattttcataaaaaaaaacagcaagattgtgggaataattaaatataataatcaaaagttttgtaagttcacaaatacaaatattcccacgaaattttcgtaacatgagttcttggagagaaaaaaaaactaacaaaatgttagattctgctcatattttacaaaatatcaagaacaaaaaacagcaaaaacgtacgtgggaacaaataaacataaaatcataattttaaaatacttcacagaatacaaataatcaaaataaatcccaagaacaagttcgtggagacaaaaaaagaaagtgacaaaagcaaaagagtttgatgatcatcatttatattttctatggttttaccttaccgatttgaggttggaaagaaagaacattttgatcagcgatggatttaaaaggattctgataaacaaagaaaccggtgaagaaaagagttatacaaaaggaagacaagaaaaatggagaaaatcttccaatgttcatcatcatccatctctctgattttttctctgaagtttcacgaaaaatcgatgacgatgatttcatcgttgcatgtcgatcatccctagaaacattaccaacgaataaacttatatatgtctataattctatatatacacgcgtagagatttttctttttattctctttccttaaaaaagtttaaatttgggtggtgaaaatgaaaatttgtgaaggaaaaaaagttataacggcgattttttatgatatttttgtttgttttcttcaatgatgacgtaacggtagccgtcagatgaatacacgtggcgtgctacgaggtggtatgtgtttgcatgtgaattgtggattggtaagttttttctagttttcttgcactaaaccacatttcacggcgtaatctcttttttttcctttgttgaaattttgttgccactttttaagtattttatttaaatgtgtaacgcgtctactataatctttctcgattctccttcttttcacaacttttattgatttcaaaacttatgtatactaggctatttctaataatttgaaaatatttgtactatattcatcattcaccaataaaaaggaaagatcacgattcacgaatcatgatgaattgatgatacattgataggtgaatatatgcagagtactgaatgatgagatcccgtggaaatccgatagagatcttttactatggactaatcaaaaattaaaaaagaaatatgaaaccataatttatgttgggcttaggcccaagctgtttgtatcatcatcataaaaccaaaaaacgtcataaatataaaaaattttgacaacaaaaaaccaagatttgtactgacgtttaggtcatgttcgtttctgagactgatgcatctaactgcatatgccaactgatgttcgtttaagtacaattttgcagacaagttagatggagcatccaaatgcgtttgacaatctcatccaaaaaagactattttttaagatgcatcttgagtttagatggatgcatcatcctcagttaaaaaccaacaaagttataaatatgaaaactttttgacaacagaataataattactagacttatatgggatcctgttttcaaaaaaagaaaaaaaagaaaaaaaagacttatatgggatccaataaatgttatttgaagtcaattacacgacgattatataaaagtttgatatttgtctatcttgcgtcctcaaaaaaatactgatgggtttaaacacataaattagcttttctattcaagacattttggtaaaagtgtgatcttttttattttttttctatggtaaaagtgtgatctattcaaaggattaggggttgccatgccacattcgtagtagtttagtgagatcaagagcataattaaaatattgaagattttacaaatgctttatctcgtcaaaaggaagcattataagtatgaccaaacccgcgacttgataatttcagactcaagctaaggtttttttgtttaaattttacttgattctctcaaagatgaaaaaaaaaaactacataggagtttgaaacaaagcatacgaaaggaagaataagaactcaattcccttcgttccgccggttaaaagaacagtcatgctttgaagattaatccactagttaatcattaattgttgtgtgacactaactaaaactaaagatagaagctagaacaatttagaaagaaccagtcatatctaaaaatacagagtgatagattaatgatggttgattagtagtccaatatggtagcgttttttggacttaagcgagtgttagctatgtgctgcattctagcttttaatttctcatcattgatgtcaaaattgaataaatgggcattatccatgtaagtgtggttttaattcggaatatttttacctaaatcgaaaaaaacgattgtctaaccgaaccaaattacctaaaccctaaacctctatttcaagtcgtttcaggactcttttacccaaaccgagtaatccgaattaccgaaattctaaactaaaccggactgattggacccattacccaagcatactacagtaaaacctctataaattaataatgtcgggatcctgaaaaaatttattaatttagagaggtattaatttatcgataaattattaatttatggagagattttataaattttgtaattttttacaaaaatgtgatctaaaaggtactttttctatacaatcaataatttttctaaaaatcattacaagtagaaaaccattattaggtttaaaaacaaaaacaaaaacttttttatacgtagaaaaattattagaattgaattttacaaagaattaatataaattaaagaaaaacagtactaaagtcatattttactaagttttacataatatataatcataaatataaatatatattcataaatttatacaattattaatttataatattgatgagaccatatatttacataggattttaaaaaaatatattatcttattaatttatcgatttgtatcaatttttacactagtcccaactcgggaccagaaaaatttattaatttatagaggttattaatttatcgagtattaatttatgaaaaatattaatttatcgagtattaaggagtgaatccattcattcacccctttttaatgaccaattagaatttgacatgtcatctattaaagaataaataaattaaaatcaaccaaacaaaagaaattaagaaaacaaattctgtaaaattttaattaaagaaattatttgtttggctttataaaatagttttagggtttatattttgtgattaaacaaaattatattttggtttgggttgataaaatagtggttagggtttatattttgtggttaaacaaaattatattttggtttgggttgataaaatagtggttagggtttagattttgtgattaaacaaaattatattttggtttgggttgataaaatagtggttagagtttagattttgtgattaaaacgaaattatatttcggtttgggttaataaaatagtggttatggtttaaattttgtgattaaagcgaaattatatttcggtttgggttgataaaatagtgattatagtttatattttgtgattaaaacaaaattatattttggtttgggttgataaaatagcggttagggtttagattttgtgattaaacgaaattatattttggtttgggttgattaaagagtggttaagatttagattttgtgattaaatttatttattctttaaatagataacatgtcaaattcttattggttaactaaaagggggtgaatgaatggattcacctcctagggatgaacccaagaattgttcttaatttatagaggttatactgtagtctgtaattgcttatattaaggtttaggttgatttaacaaaatgttagactcagttcagcttaaaagtaatcagaaaatttcttctcaatttgttcgtcttctctcatctccgattttcagataattctctattccttcctcgcaataagtctcatttcgttttgggattcatctcggtttgttcatcaactgtttttatggacatctattttctttatactagtaagaaaaagtgaaaaacatataagttgcgaattgcgatatacctctttgtctagaagtttttgttgtttaaggaatatcacattacaacaacaccaacaataacaacaaaatgctacatcgagaaaagatgatttttacataaagaaagttaaaacaatgttccatcaactaagattagaaagaccaaacgtcgttagctcaattggtaaagatcctaggcgaatcttagaggtcgccgattcgagtgacgcttgggacgaaactaatattacatgctgtggtttcgggtcaggggggaggttacgggtttcggcccaaaacttccagatattcaaaaaaaaaaaaaactaaaattagaaaggagaaaaaaatgtgtattaaaatgtgaaaattaatacatagttattgcggaagatatacacactaataatcactcgtttacgtgataaaggtgcaaaaaaatgaattgcaacaagatattccatattgaaaaatataagaatgctaattgagatacttgttttttccagcaaaattaatttatattgaatacaacaaagtagatagccaaggtggtggcataatacaaccagagaattgagatgcttttaacagaaaaaagaaataccaaaaattgatagtaaaaaagataaatagcattataatcggggaacattttgtttttttttttttgggcaaaagacttttccattaaacgaagattaaggagataaacaaacagtcttcgactaacgctgatttggcgataacatcggctctccgattcagatcgtgattgataaaacaaaaggaaacattcgaaaaaggaggatagagaaaggatgtcgtgaagaatcccatggagctcaatcgggtgagttccttcattgattgctttgattaacgtttgagaatcatatatccttatatattggtgaatttgaaattgatcgcctggttgattgctaggtgaagggccattgcttctgccatgagcggcgaactgatgaactggaccgatccaccttccataaattcaattttccacagaggatcgaacattatccagccaagaccagctttgtgcgaatcctctttccacgctgcatccgagaaaaccctaattgtatctaactgaataaccggtgtcaggactggaactcggagggcctgcggtggtgttgctaaactctgtgcggtaatccactcttttgcttgaaccatggcttgtgatataacatcagatgcctttacttgacggttttcaaaaatcttcttattccttgtggtccagattgaccatagaagccaagggaatagaggtccattgactaagcccgtcggtagtaaaaccacaaaagttctggatgcttcaatgattgctcttagagaggtgttgtggacaaacacaggaagctgtttaaacgaagccttagcccagacttgtttgacgaagctgcaaaaaaagaagagatgattcatagattcctcaagaccacaatggggacaagtcgctgtggtattgattcctctaaacttcagattctctccaatagggattgcatttttcattgctttacacatgaagaattaacttttggggctgtttttgtcttccaaatctctttttgccaattgaatccttgttgattgcaggattgaagagttaacttcctgttcttctcatttgcaatgtggtatcccgactttgcagaataatcaccagtcttagaaggtaaccacgcatacttgtctcttgcgcctagtttacttggtataatttccaagattgtatcttcataggctggcaggatttgagcaattttctctctattccaggtgaagcttcttggacagaggagttgtgagaatagcatctcatgagtttgatgggtgggaggtcccattggttgcaggggtatagaggaggagagccaaagatcatcccaaattctcgtgttctgtccatttccaattgctctaccaagctgagttttcaataagtctccaattgctttaccaagctgagttttcaagaaaaccatctgaattgcaatacttccccatgagaactttagcgagtaaacaagatggtttggtaagcaaacgccaacttatctttgctaataaagcctcattaaaacttttaatgtctcgaaatcctaatcctccatccctcttggatagagttaattttgaccatgaaatccaagccattttatgtttctcgtcggagccatcccaccaaaaccttgtcaaagccgactgaatacctttatagagcgatcctggaagcttgaagctagacatagtataagtcggcatcgatgctaggacggactgtaacaatgtagccttgcctgcgcttgataggaattttgaagaccagctgagagctcgctgtcttgttcggtctatgataagattgaacaaatcttttttcttccttccaaagagttcaggtaaccctaagtactttcccagaccgctttccttttggattctgagaacttgtttagccaaaattcttgcttcttcactagtctttgaagagaaagttatggctgatttctctgtcttaatcatttaacctgaagcttcctcatatttatgcaggatagacataagttctaggcaactctttctgtcagatcggcaaaagcacatggtgtcatctgcaaagagcagatggttcactcttggactgcctaatgcaactctaattccaggtaattttccttctgcttgagcttttagacaaagacctgaaaggacctcactacaaaggatgaaaaggtagggtgagagggtatctcccagtcttattcctctggttggagtcactgatccttgagctgatccattgagtagaaaagaataggagactgtgtcaatgcattgcataatccagtttacccatttaggatggaaccccaacctctcaagaactaatctgataaaatcccattcaagacgatcatatgctttgctcatatcagttttcactgccatatagcatatcttttctgctcccgagagtgtagaacttcatgagtgattaagacattatctgtgattgctcgattaggaacaaaagctgattgattctctgcaactatgttttgcaggactggttgaagtctcttggaaagcagcttagagataatcttgtaaaacgcggtgcagagggcaataggtctgtattcagcaacctttgtagggcttaagatctttggaataagtcgtatatgagttgcatttattcgccttggtagatgactcgatgagaaaaaaatttgcacctccaaaatgatttgagggaccacagtttcctaattagattgaaaaaagcttgctaaaaacccatcagggcctggagctttgtctagatgtattgcataacaagctttttcttatttatgcagaggagggcatagctattaggatctcatttgtttcatttgagatgcgtggaagaatggcttcattaacagtagagagtctgtctccttcctgagaggtgaagagtttatgaaaatactcagtgaaaactataagtatttcactttctttgtacactggttgggattcagcattttcaatgacggaaaacttattgattgcctttctgcctcttgtagcagcatggaaatattcagtattcttgtctcctaaagccagccaaagttggcgatttcgttgcttccaaaatgcttcttcggccttataggctaaaagaagagtattatttagagaggagattaactcagcactgtttgtgggactagacatggccttgtcaagcttttgtttgtagtcctctatcagtttttggctgttctgatgtgcttctcttgaccatcggattatactagcacgacatctattaatcttctcctcaactgattcttgatcatcgaagctccaagcctctgagataagtaacctaacttcctcgttatcccttaggcgacgatcatatctaaataatcccttctttttctttttcttcagatcaaagtgagtgataagcggtcgatgatcagatccttcaaatctcaggtaatcacttctaccagaaggatactcttctgcccatgcagtattagacatggctctatctagtctacagtgaactaggtgctcatttcttgtgcctcgccaagacagaaagtttccagaatgtcttaagtcaaacaagtcacatgttgacatgaatgatctaagatccacaaaagatccaacaggtcttttgattcctccttctttttctgatggttcaatgatatcattaaaatctcctgttataaaccatggttcagaacggttggttcccaaatcagtgagttgattccaaataagctttctttttgatctatcaggttcaccatataggaaagtggtaaaaaatcctttttcttctgcttttattagagtatcaatgaaattttggcaggagaaaacgatttctacttcaatttcttgtttccatagcagggcaagtcctccacctccagggctgtgaggagtaactaggtgaattgctacttaacccaatccaatgagagcagtgaggacgacagcatctggatttttcgtctccatgaggaataggatttctggtgagatattcttctttatctcatccagtctatgagctgttatgggattccccaacccacaacagttccaacttgccacttttaaggaagaggattggatggatgttgaaaatccatcctaccttttgcaatagctggtatgatttttgtcttaggaggtacctaacttgttgatgggatatttgcaggattctgtcttcttctagagggggagccattactgtgagaaggtacagaatctgcctgtgcagttgttagtctggttagagcggacttcctcttgggtgagccttgtgtaatacagagttgtttcttactcaactttgatcccactaatctcatagggcttttattaaccggtttaggagtaggcggtctgcctcttttttcttcaccataggagcttggagtgcttggttatcctctaagattggggcctgaatcgcttccaccaatgatggttggtgagcttgagctgctgcagagataatattagctgctgtggtagccatcagacctacttcttctccctgattaactctgtgtcttcttgcagcactttcagtagggtcattacaattaatgtattgtaccgttacatctcgcagctctcccataacttccgcagttgtagggataggcggtggtttgagaatgttgtcattagtcatttcgcgttcgagaggtggccttctgtttctagatgattccgagatttcttgatgaatgttgtcttttgaatagagtttttctctttctctccattgaaggtttggagaggatggtttgtcatgatatcgttcttgcggtttcgagtgagttctagcatctctagttgaatctcctctatagtagtcttgggacttggaaggtgatctcctgtaacttggggttctgtagtcaagggatctcctgtctgaatgtctttgctgagagagaccagaaaatctgtgagctctacgatctgatgaactgccatcatttcttcgagtatgtcctgaaggtacttgagagatgtgtctgttatttgagagattcccactttgggacttgtttcttgaggagagctgttctctttatggcggtagaggaggtagtgaactctggttttgagattttctacttgactgcaaaccaggacagttggatttctcatgtgatagcctgttgcagtgggagcagtgcttttttaatcttttgtattccagcgtcaccagagcttcactgccatccgggaagtcaatcattgcatcttttacaggaggttgcagaccattcactaggactttaactcttgctaccgctggagtaagttcatgatcaactagttcacccgctagaccaccaatgtcaattagcattttgggtttcaagtagtgaagagggattccttgaacatcaatccagaagggaatctcggaggagaaattatctgatataacaggttcctatctctgtagaattaccatccaatcatcaaaatgataaggtctgctgtttagaaccttgagcaagtcttcctcaaagtcaaaacaaaactggaagcgtcccctgccaagatctgacccaatggcttttccattcagattccatctgctagagagaaaaggtataagggaccacaggcgttgttgcactgcaggatttgtgagacgtcctatgagggtaagagagtttttttggaccaaatctgaggtatccagctgcggagccttgagtcttttccgggaaggctgagagtagtagtcatcagctatcgcttttcctttagcataataaggtatgcggcgatccatcttctaatttagtcctgaacaagctttaattttgaacagttcttgggcttgaactttgcaggatgagacaagaaggtagagatctttttgtgaggaggcagcttttgtagaagtttcagagatggttcaaagatagttcttcacactaggtgagattttcctgaaattttttcaaatggttcttcacaaaaagtgagactgttctctatccaaaccggacagaaagtttctagataaaattccaggaactaaaagagtaatgacaaacattccttcttcagggtaattgcattcattgcaaacaaacatcacacaaagtaacacaaagtacaaggagtacaagatatagaagtttagatatcgtttgggcagttgtttggactgcattcaatgagaaataaacaacctcttttaagggagaggaaactctttaagcagccgttaaagaagagagaccttcctcacgggaagaggggcgtctcctacgccggctcctccgtgggaattcgccggaaagatggttttttgggttgtttttgatagaacttctattttgggtaaacaaaagtgggtgagaatttctgtttttagtaaaaaggtttggtttaaatctggtttttcaaaaagtagtaactagaaatagaatctcgaaactcatgcgagggaaagtttttttagctttctttctcctcttcctatattttctattccctcatatcggggaacaatttctatgaattgttattgacattaaattatagtaaattagagagaaagtatttgttcgtttttgtcgattatatccatgagaactcttgtttcaggtgattgtgtttgtcgattttttttgttgtgtttcgtggcatgtgaagtttttgtttgaagtgtggagtttttgtcgatttgttttgttgtgtttcgtggcatgtgaagttttatagtttgagtgtagagttttagttttgtttgattattttttgttgtgtatttgtgattgtgaagtttttttatctgtcgtgtttgtgtatttggtgcgagtatttttgtcttgagaagagagacatggagattttacctgcctcttcatttgttctggactacgggatttgccttgacgactttggtaaccaaaagacctgtacacatgcatgaagcaagagaaatatcaaataagagactaaaaaacagagaaaattatttgaccctttatgtaaaagaaacatgaggaacaacttaccttaatatgaagtatctaagaaactgtttggctctcccaagtcttcgagaatacgattccatacttaatttgatatcttgccccttaagtgttgtagctctgcaataaggaatgccaatattttttttttaacttacaaattgaatacaaaagaaaatatgtgaagagacggatgaaactaactgatcttgcttcaaggtaccactagaagtagattatggaatatttgaaacaccttttgatactggccccgccgaagcttttgatgattcaagtcgttagtagagaggagagaacatgttaatcagacaaccagatcatgaagattggagaggtaccttgaacaaatcctggtcttgctttttcaagcacaagagctagtgatgagccttttatatctttgatattcatttccatctgagaaaaatgcatacgactaatccgatattaggttcaagccacgaatagaacaagctaacccaaggatacctaccgtgtcttgtccactgactctccagatctcggaaaggcatccttccactatttttcgcagatc
